(19) United States
(12) Patent Application Publication
(10) Pub. No.: US 2013/0157873 A1
(43) Pub. Date: Jun. 20, 2013

(54) METHODS OF ASSESSING A RISK OF DEVELOPING NECROTIZING MENINGOENCEPHALITIS

(71) Applicants: Matthew Huentelman, Phoenix, AZ (US); Scott Schatzberg, Phoenix, AZ (US); Renee Barber, Phoenix, AZ (US)

(72) Inventors: Matthew Huentelman, Phoenix, AZ (US); Scott Schatzberg, Phoenix, AZ (US); Renee Barber, Phoenix, AZ (US)

(73) Assignee: TRANSLATIONAL GENOMICS RESEARCH INSTITUTE, Phoenix, AZ (US)

(21) Appl. No.: 13/698,907

(22) PCT Filed: May 19, 2011
(86) PCT No.: PCT/US11/37262

§ 371 Date: Mar. 8, 2013

Related U.S. Application Data
(60) Provisional application No. 61/346,309, filed on May 19, 2010.

(51) Int. Cl. C12Q 1/68

(52) U.S. Cl. CPC C12Q 1/6883
USPC 506/2; 536/24.31; 536/24.33; 435/6.11; 435/6.12

(57) ABSTRACT

Methods of using single nucleotide polymorphisms (SNPs), SNP haplotype block, and haplotype to predict whether or not a subject will develop necrotizing meningoencephalitis (NME) and probe sets that facilitate those methods are disclosed. In particular, the subject is a canine species.

### BACKGROUND OF THE INVENTION

[0001] Necrotizing meningoencephalitis (NME) is a non-suppurative inflammatory disorder of the canine central nervous system. Overrepresented in Pug dogs, NME also occurs in other small breeds including the Maltese and Chihuahua. The etiology of NME is unknown but non-Mendelian inheritance has been demonstrated in Pug dogs, suggesting a role for genetic risk factors in the development of disease.

[0002] Necrotizing meningoencephalitis (NME) is an idiopathic inflammatory disorder of the central nervous system (CNS) that primarily affects young to middle aged toy breed dogs. NME has known non-Mendelian inheritance that shares clinical similarities with atypical variants of multiple sclerosis in humans. Inflammation in NME is characterized by mixed mononuclear cell infiltrates within the cerebral hemispheres and cortical leptomeninges with common clinical signs including seizures, depression, behavior change, circling and visual deficits. Similar to severe non-prototypical forms of multiple sclerosis (MS) such as Marburg variant, NME is overrepresented in females, is rapidly progressive and often carries a grave prognosis despite aggressive immunosuppressive treatment.

[0003] NME initially was identified in Pug dogs in the late 1960s and is known to have a strong familial association in this breed. Purebred dog populations provide a unique opportunity for mapping genetic traits and recent technological developments have made it possible to leverage dogs as a model for the study of human genetic disease. Dogs and humans share similar physiology with over half of the known canine diseases having a similar phenotype to analogous human diseases. An evaluation of canine NME, a disorder having clinical similarities to atypical, fulminant variants of MS in humans, is needed for identifying at risk and affected dogs, allowing development of targeted therapy and identifying similar genetic factors that are associated with the development of rapidly progressive MS in people.

[0004] Whether it is a human population or a canine population, the standard for measuring genetic variation among individuals in a population is the haplotype, which is the ordered combination of polymorphisms in the sequence of each form of a gene that exists in the population. Because haplotypes represent the variation across each form of a gene, they provide a more accurate and reliable measurement of genetic variation than individual polymorphisms. For example, while specific variations in gene sequences have been associated with a particular phenotype such as disease susceptibility (Roses A D supra; Ulbrecht M et al. 2000 Am J Respir Crit. Care Med 161: 469-74) and drug response (Wolfe C R et al. 2000 BMJ 320:987-90; Dahl B S 1997 Acta Psychiatr Scand 96 (Suppl 391): 14-21), in many other cases an individual polymorphism may be found in a variety of genomic backgrounds, i.e., different haplotypes, and therefore shows no definitive coupling between the polymorphism and the causative site for the phenotype (Clark A G et al. 1998 Am J Hum Genet. 63:595-612; Ulbrecht M et al. 2000 supra; Drysdale et al. 2000 PNAS 97:10483-10488). Thus, there is an unmet need for information on what haplotypes exist in the dog population that are associated with NME. Since canine NME is a disorder having clinical similarities to MS in humans, canine NME haplotype information would be useful in improving the efficiency and output of NME and MS diagnosis, prognosis, and the several steps in the drug discovery and development process, including target validation, identifying lead compounds, and early phase clinical trials of drugs for MS.

### BRIEF SUMMARY OF THE INVENTION

[0005] The present invention provides among other things:

[0006] It is an object of the invention to provide a test that classifies a subject into an NME disease risk group.

[0007] It is an object of the invention to provide a test that predicts whether or not a subject will develop NME.

[0008] The above and other objects may be achieved using methods involving receiving a sample from a subject, isolating nucleic acid from the sample, detecting one or more of the markers listed in Table 2 and classifying the subject into a cohort based upon the presence or absence of the marker. The marker may be directed directly such as by Sanger sequencing, pyrosequencing, SOLID sequencing, massively parallel sequencing, barcoded DNA sequencing, PCR, real-time PCR, quantitative PCR, microarray analysis of genomic DNA, restriction fragment length polymorphism analysis, allele specific ligation, and comparative genomic hybridization. Alternatively, the marker may be directed indirectly such as by microarray analysis of RNA, RNA in situ hybridization, RNAse protection assay, Northern blot, reverse transcription PCR, quantitative PCR, quantitative reverse transcription PCR, quantitative real-time reverse transcription PCR, reverse transcriptase treatment followed by direct sequencing, flow cytometry, immunohistochemistry, ELISA, Western Blot, immunoaffinity chromatography, HPLC, mass spectrometry, protein microarray analysis, PAGE analysis, isoelectric focusing, and 2D gel electrophoresis. The marker may be a marker that is associated with a high risk of developing NME and the subject is classified into a risk group comprising subjects with a high risk of developing NME if the marker is detected in the sample. The subject may be any animal including a dog such as a Pug Dog, Chihuahua, Maltese Terrier, West Highland White Terrier, Yorkshire Terrier, French Bulldog, and Pekingese.

[0009] The above and other objects may be achieved through the use of kits comprising a first probe capable of detecting a first SNP selected from the group listed in Table 2, a second probe capable of detecting a second SNP selected from Table 2; and wherein the probes are associated with a microarray of 1000 or fewer elements. The first probe may be capable of detecting a SNP associated with a higher risk of developing NME, or the second probe may be capable of detecting a SNP associated with a lower risk of developing NME.

### BRIEF DESCRIPTION OF THE FIGURES

[0010] FIG. 1 depicts the SNPs in DLA class II region on Chromosome 12, with alternative base as listed for A_{R}, the allele associated with NME risk, and A_{NR}, the non-risk allele.

[0011] FIG. 2 depicts the SNP in STYX region on Chromosome 8, with alternative base as listed for A_{R}, the allele associated with NME risk, and A_{NR}, the non-risk allele.

[0012] FIG. 3 depicts the genome-wide association results for 28 NME cases and 45 controls. (a) Fisher's exact tests were performed to compare SNP allele frequencies and negative log P values were plotted across the genome. The horizontal dotted line represents the threshold for significant association after Bonferroni correction of −log(P)>6.24 with a strong peak on chromosome 12 maintaining genome-wide significance. (b) MaxT 100,000 permutation testing was performed and negative log P values were plotted across the genome. The horizontal dotted line represents the threshold for significant association after permutation testing of −log(P)>1.3 with one SNP on chromosome 8 maintaining permuted significance.

[0013] FIG. 4 depicts haplotype analysis of NME-associated DLA II locus on chromosome 12. A 4.1 Mb region located from positions 4,713,392 to 8,834,652 with 19 haplotype blocks generated in Haploview. Negative log P values from single SNP associations were derived from genome-wide analysis after removal of population outliers and individual SNPs were plotted as red circles. The horizontal dotted line represents the threshold for significant association after Bonferroni correction of −log(P)>6.24.

[0014] FIG. 5 depicts haplotype analysis of NME-associated locus on chromosome 8. A 488 kb region located from positions 31,736,206 to 32,225,068 is shown with 4 haplotype blocks generated in Haploview. Negative log P values from single SNP associations were derived from genome-wide analysis after removal of population outliers and individual SNPs were plotted as red circles. The horizontal dotted line represents the threshold for significant association after Bonferroni correction of −log(P)>6.24. The additional blue region within each haplotype block represents MaxT 100,000 permuted haplotypes.

### DETAILED DESCRIPTION OF THE INVENTION

[0015] The disclosure provides a method of assigning a subject to a necrotizing meningoencephalitis (NME) risk group in order to assess the likelihood of the subject being afflicted with the disease. This method can be employed to assess the risk at early stages of disease progression. The method includes providing a biological sample from the subject, detecting a marker in a biological sample, which can be a haplotype associated with NME and assigning the subject to the NME risk group based upon the presence or absence of the haplotype. The method involves directly or indirectly detecting the presence or absence of the marker. Multiple markers disclosed herein may be used in combination to improve the accuracy, including two or more, three or more, four or more, five or more, or ten or more of the markers may be used.

[0016] Detection of the disease also includes detection of the haplotype by any SNPs/markers within the haplotype, but also indirectly through SNPs/markers outside the haplotype and leveraging linkage disequilibrium to identify carriers of the haplotype. In addition to determining a patient's relative risk for NME, the diagnosis may include prescribing therapeutic regimens to treat, prevent or delay onset of NME.

[0017] A haplotype may be any combination of one or more closely linked alleles inherited as a unit with little genetic shuffling across generations. An allele includes any form of a particular nucleic acid that may be recognized as a form of the particular nucleic acid on account of its location, sequence polymorphism, epigenetic modification or any other characteristic that may identify it as being a form of the particular gene. Alleles include but need not be limited to forms of a gene that include point mutations, silent mutations, deletions, frameshift mutations, single nucleotide polymorphisms (SNPs), inversions, translocations, heterochromatic insertions, and differentially methylated sequences relative to a reference gene sequence, whether alone or in combination. The presence or absence of an allele may be detected through the use of any process through which a specific nucleic acid molecule may be detected, including direct and indirect methods of detecting the presence or absence of the specific nucleic acid. Different alleles may, but need not, result in detectable differences in gene expression or protein functions. An allele of a gene may or may not encode proteins or peptides. Different alleles may differ in expression level, pattern, temporal or spatial specificity, and expression regulation. In the case of encoded proteins, the protein from different alleles may or may not be functional. Further, the protein may be gain-of-function, loss- of-function, or with altered function. An allele may also be called a mutation or a mutant. An allele may be compared to another allele that may be termed a wild type form of an allele. In some cases, the wild type allele is more common than the mutant.

[0018] Different combinations of polymorphisms may also be called haplotypes. The pholymorphism may be a single nucleotide polymorphism. The genetic sequences of different individuals are remarkably similar. When the chromosomes of two humans are compared, their DNA sequences can be identical for hundreds of bases. But at about one in every 1000 to 1,200 bases, on average, the sequences will differ. As such, one individual might have an A at that location, while another individual has a G, or a person might have extra bases at a given location or a missing segment of DNA. Differences in individual bases are the most common type of genetic variation. These genetic differences are known as single nucleotide polymorphisms (SNPs) (supra). SNPs act as markers to locate genes in DNA. Given the relatively close spacing between these SNPs, SNPs are typically inherited in blocks.

[0019] The difference of a single genetic variance such as a SNP can delineate a distinct haplotype. A “SNP haplotype block” or “haplotype block” is a nucleic acid sequence containing a group of SNPs or polymorphisms that do not appear to recombine independently resulting in reduced genetic variability but are passed together from generation to generation in variable-length blocks. The combination of polymorphisms, haplotype patterns and haplotype blocks may be referred to as a “haplotype” or “haplotype structure” in a nucleic acid sequence of interest. For example, a haplotype can be a set of SNPs, alleles, or genetic markers on a single chromatid that are genetically linked and thus are likely to be inherited as a unit. “Linked”, “linkage”, or “allelic association” means the preferential association of a particular allele or genetic marker with a specific allele or genetic marker at a nearby chromosomal location more frequently than expected by chance for any particular allele frequency in the population. For example, if locus X has alleles a and b, which occur equally frequently, and linked locus Y has alleles c and d, which occur equally frequently, one would expect the combination ac to occur with a frequency of 0.25. If ac occurs more frequently, then alleles a and c are in linkage disequilibrium. Linkage disequilibrium may result from natural selection of certain combination of alleles or because an allele has been introduced into a population too recently to have reached equilibrium with linked alleles. A marker in linkage disequilibrium can be particularly useful in detecting susceptibility to disease (or other phenotype) notwithstanding that the marker does not cause the disease. For example, a marker (X) that is not itself a causative element of a disease, but which is in linkage disequilibrium with a gene (including regulatory sequences) (Y) that is a causative element of a phenotype, can be used detected to indicate susceptibility to the disease in circumstances in which the gene Y may not have been identified or may not be readily detectable.

[0020] As described above, two or more alleles likely to be inherited as a unit may be termed a haplotype block. When one or more haplotype blocks are associated with a pheonotypic trait, the haplotype block serves as a genetic marker represented by a genetic locus comprising one or more linked genetic variations that would be inherited as a unit more frequently than not in an individual having the associated phenotypic trait. Therefore the haplotype block, an/or the haplotype may also be used to identify individuals from biological samples for traits of interest. The haplotype block may, in turn, be used to identify individual polymorphic sites, or candidate genes for developing therapeutics and diagnostics.

[0021] When a SNP haplotype block is identified by a SEQ ID NO, a set of at least two SNPs that are associated with an allele of a gene are grouped together in a linkage unit or block. In one embodiment of the present invention, the presence of SNPs detected in a given haplotype block disclosed herein in a dog is associated with a greater risk that the dog will develop NME, if it has not yet shown symptoms of NME; whereas the absence of SNPs detected in a given haplotype block disclosed herein in a dog is associated with a lesser risk that the dog will develop NME. A nucleic acid may be termed to be specific to a SNP haplotype block or specific to a SNP within a haplotype block. A nucleic acid specific to a haplotype block or a SNP within a haplotype block contains sequence that is complementary to one of the double stranded nucleic acid sequence of at least one SNP that is grouped within that haplotype block. Such nucleic acids may be complementary to a SNP that is associated with the nucleotide sequence in the linkage unit or block or any other SNP associated within the haplotype identified by the SNP haplotype block.

[0022] A marker may be any molecular structure produced by a cell, expressed inside the cell, accessible on the cell surface, or secreted by the cell. A marker may be any protein, carbohydrate, fat, nucleic acid, catalytic site, or any combination of these such as an enzyme, glycoprotein, cell membrane, virus, cell, organ, organelle, or any uni- or multimolecular structure or any other such structure now known or yet to be disclosed whether alone or in combination. A marker may also be called a target and the terms are used interchangeably.

[0023] A marker may be represented by the sequence of a nucleic acid from which it can be derived or any other chemical structure. Examples of such nucleic acids include miRNA, tRNA, siRNA, mRNA, cDNA, or genomic DNA sequences including complimentary sequences. Alternatively, a marker may be represented by a protein sequence. The concept of a marker is not limited to the products of the exact nucleic acid sequence or protein sequence by which it may be represented. Rather, a marker encompasses all molecules that may be detected by a method of assessing the expression of the marker.

[0024] Examples of molecules encompassed by a marker represented by a particular sequence or structure include point mutations, silent mutations, deletions, frameshift mutations, translocations, alternative splicing derivatives, differentially methylated sequences, differentially modified protein sequences, truncations, soluble forms of cell membrane associated markers, and any other variation that results in a product that may be identified as the marker. The following nonlimiting examples are included for the purposes of clarifying this concept: If expression of a specific marker in a sample is assessed by RTPCR, and if the sample expresses an mRNA sequence different from the sequence used to identify the specific marker by one or more nucleotides, but the marker may still be detected using RTPCR, then the specific marker encompasses the sequence present in the sample. Alternatively if expression of a specific marker in a sample is assessed by an antibody and the amino acid sequence of the marker in the sample differs from a sequence used to identify marker by one or more amino acids, but the antibody is still able to bind to the version of the marker in the sample, then the specific marker encompasses the sequence present in the sample.

[0025] In the present invention, the marker represented by a group of linked SNPs, “haplotype block,” or “haplotype” may be detected by a variety of methodologies or procedures that are well know in the art including, but not limited to, nucleic acid hybridization, antibody binding, activity assay, polymerase chain reaction (PCR), S1 nuclease assay and via gene chip or microarray as well as any other assay known in the art that may be used to detect the SNPs associated with a haplotype or the gene product produced from the gene of the haplotype including mRNA and protein. Hybridization of a SNP-specific oligonucleotide to a target polynucleotide may be performed with both entities in solution, or such hybridization may be performed when either the oligonucleotide or the target polynucleotide is covalently or noncovalently affixed to a solid support. Attachment may be mediated, for example, by antibody-antigen interactions, poly-L-Lys, streptavidin or avidin-biotin interactions, salt bridges, hydrophobic interactions, chemical linkages, UV cross-linking baking, etc. SNP-specific oligonucleotides may be synthesized directly on the solid support or attached to the solid support subsequent to synthesis. Solid-supports suitable for use in detection methods of the disclosure include substrates made of silicon, glass, plastic, paper and the like, which may be formed, for example, into wells (as in 96-well plates), slides, sheets, membranes, fibers, chips, dishes, and beads. The solid support may be treated, coated or derivatized to facilitate the immobilization of the SNP-specific oligonucleotide or target nucleic acid. Detecting the nucleotide or nucleotide pair of interest may also be determined using a mismatch detection technique, including but not limited to the RNase protection method using riboprobes (Winter et al. (1985) Proc. Natl. Acad. Sci. USA 82:7575; Meyers et al. (1985) Science 230:1242) and proteins which recognize nucleotide mismatches, such as the E. coli mutS protein (Modrich (1991) Ann. Rev. Genet. 25:229-53). Alternatively, variant SNPs or variant alleles can be identified by single strand conformation polymorphism (SSCP) analysis (Orita et al. (1989) Genomics 5:874-9); Humphries et al. (1996) in MOLECULAR DIAGNOSIS OF GENETIC DISEASES, Elles, ed., pp. 321-340) or denaturing gradient gel electrophoresis (DGGE) (Wartell et al. (1990) Nucl. Acids Res. 18:2699706); Sheffield et al. (1989) Proc. Natl. Acad. Sci. USA 86:232-6).

[0026] A polymerase-mediated primer extension method may also be used to identify the polymorphism(s). Several such methods have been described in the patent and scientific literature and include the “Genetic Bit Analysis” method (WO 92/15712) and the ligase/polymerase mediated genetic bit analysis (U.S. Pat. No. 5,679,524. Related methods are disclosed in WO 91/102087, WO 90/09455, WO 95/17676, and U.S. Pat. Nos. 5,302,509 and 5,945,283. Extended primers containing the complement of the polymorphism may be detected by mass spectrometry as described in U.S. Pat. No. 5,605,798. Another primer extension method is allele-specific PCR (Ruano et al. (1989) Nucl. Acids Res. 17:8392; Ruano et al. (1991) Nucl. Acids Res. 19:6877-82); WO 93/22456; Turki et al. (1995) 1. Clin. Invest. 95:1635-41). The haplotype for a gene of an individual may also be determined by hybridization of a nucleic acid sample containing one or both copies of the gene, mRNA, cDNA or fragment(s) thereof, to nucleic acid arrays and sub-arrays such as described in WO 95/112995. The arrays would contain a battery of SNP-specific or allele specific oligonucleotides representing each of the polymorphic sites to be included in the haplotype.

[0027] Detecting the presence or absence of a marker disclosed herein or a close isoform thereof may be carried out either directly or indirectly by any suitable methodology. A variety of techniques are known to those skilled in the art (supra). All generally involve receiving a biological sample containing DNA or protein from the subject, and then detecting whether or not the marker or a close isoform thereof is present in the sample. and then determining the presence or absence of the marker in the sample.

[0028] The marker may be detected by any of a number of methods. Direct methods of detecting the presence of an allele include but are not limited to any form of DNA sequencing including Sanger, next generation sequencing, pyrosequencing, SOLID sequencing, massively parallel sequencing, pooled, and barcoded DNA sequencing or any other sequencing method now known or yet to be disclosed; PCR-based methods such as real-time PCR, quantitative PCR, reverse transcription PCR or any combination of these; allele specific ligation; comparative genomic hybridization; or any other method that allows the detection of a particular nucleic acid sequence within a sample or enables the differentiation of one nucleic acid from another nucleic acid that differs from the first nucleic acid by one or more nucleotides.

[0029] A nucleic acid-containing sample used for various marker detection methods may be from a subject suspected of having or being at risk of having NME. Nucleic acids may include but need not be limited to RNA, cDNA, tRNA, mitochondrial DNA, plasmid DNA, siRNA, genomic DNA, or any other naturally occurring or artificial nucleic acid molecule. The sample may be any type of sample derived from the subject, including any fluid or tissue that may contain one or more markers associated with the haplotype. Examples of sources of samples include but are not limited to biopsy or other in vivo or ex vivo analysis of prostate, breast, skin, muscle, fascia, brain, endometrium, lung, head and neck, pancreas, small intestine, blood, liver, testes, ovaries, colon, skin, stomach, esophagus, spleen, lymph node, bone marrow, kidney, placenta, or fetus. In some aspects of the invention, the sample comprises a fluid sample, such as peripheral blood, lymph fluid, ascites, serous fluid, pleural effusion, sputum, cerebrospinal fluid, amniotic fluid, lacrimal fluid, stool, or urine.

[0030] The subject may be any organism subject or susceptible to NME or MS including mammals, further including humans. The animal may be a canine such as a Pug Dog, Chihuahua, West Highland White Terrier, Pekingese, Labrador retriever, Golden retriever, Beagle, German shepherd, Dachshund, Yorkshire terrier, Boxer, Poodle, Shih tzu, Miniature schnauzer, Pomeranian, Cocker spaniel, Rottweiler, Bulldog, Shetland sheepdog, Boston terrier, Miniature pinscher, Maltese, German shorthaired pointer, Doberman pinscher, Siberian husky, Pembroke welsh corgi, Basset hound, Bichon frise, and other existing or non-existing breeds.

[0031] Examples of indirect methods of detection include any nucleic acid detection method including the following nonlimiting examples, microarray analysis, RNA in situ hybridization, RNAse protection assay, Northern blot, reverse transcriptase PCR, quantitative PCR, quantitative reverse transcriptase PCR, quantitative real-time reverse transcriptase PCR, reverse transcriptase treatment followed by direct sequencing, direct sequencing of genomic DNA, or any other method of detecting a specific nucleic acid now known or yet to be disclosed. Other examples include any process of assessing protein expression including flow cytometry, immunohistochemistry, ELISA, Western blot, and immunoaffinity chromatograpy, HPLC, mass spectrometry, protein microarray analysis, PAGE analysis, isoelectric focusing, 2-D gel electrophoresis, or any enzymatic assay.

[0032] In Sanger Sequencing, a single-stranded DNA template, a primer, a DNA polymerase, \nucleotides and a label such as a radioactive label conjugated with the nucleotide base or a fluorescent label conjugated to the primer, and one chain terminator base comprising a dideoxynucleotide (ddATP, ddGTP, ddCTP, or ddTTP, are added to each of four reaction (one reaction for each of the chain terminator bases). The sequence may be determined by electrophoresis of the resulting strands. In dye terminator sequencing, each of the chain termination bases is labeled with a fluorescent label of a different wavelength which allows the sequencing to be performed in a single reaction.

[0033] In pyrosequencing, the addition of a base to a single stranded template to be sequenced by a polymerase results in the release of a pyrophosphate upon nucleotide incorporation. An ATP sulfyrlase enzyme converts pyrophosphate into ATP which in turn catalyzes the conversion of luciferin to oxyluciferin which results in the generation of visible light that is then detected by a camera.

[0034] In SOLID sequencing, the molecule to be sequenced is fragmented and used to prepare a population of clonal magnetic beads (in which each bead is conjugated to a plurality of copies of a single fragment) with an adaptor sequence and alternatively a barcode sequence. The beads are bound to a glass surface. Sequencing is then performed through 2-base encoding.

[0035] In massively parallel sequencing, randomly fragmented targeted DNA is attached to a surface. The fragments are extended and bridge amplified to create a flow cell with clusters, each with a plurality of copies of a single fragment sequence. The templates are sequenced by synthesizing the fragments in parallel. Bases are indicated by the release of a fluorescent dye correlating to the addition of the particular base to the fragment.

[0036] Other methods used to assess expression include the use of natural or artificial ligands capable of specifically binding a marker. Such ligands include antibodies, antibody complexes, conjugates, natural ligands, small molecules, nanoparticles, or any other molecular entity capable of specific binding to a marker. Antibodies may be monoclonal, polyclonal, or any antibody fragment including an Fab, F(ab)2, Fv, scFv, phage display antibody, peptibody, multispecific ligand, or any other reagent with specific binding to a marker. Ligands may be associated with a label such as a radioactive isotope or chelate thereof, dye (fluorescent or nonfluorescent,) stain, enzyme, metal, or any other substance capable of aiding a machine or a human eye from differentiating a cell expressing a marker from a cell not expressing a marker. Additionally, expression may be assessed by monomeric or multimeric ligands associated with substances capable of killing the cell. Such substances include protein or small molecule toxins, cytokines, pro-apoptotic substances, pore forming substances, radioactive isotopes, or any other substance capable of killing a cell.

[0037] Other markers may also be used that are associated with the markers disclosed herein such as SNPs or other polymorphic markers that are in close enough proximity to have a statistically significant association with the marker disclosed herein (e.g., other markers in linkage disequilibrium with a marker disclosed herein). For example, if a marker or a close isoform thereof is detected in the subject, then the subject may be placed into a group either at higher or lower risk for NME depending on which marker or close isoform thereof is identified (i.e., a significant enough number of markers associated with a haplotype).

[0038] The disclosure also provides sets of molecular probes for detection, including at least two probes capable of detecting, directly or indirectly, a marker disclosed herein associated with increased or decreased risk of NME, wherein the molecular probes are not associated with a microarray of greater than 1000 elements, a microarray with greater than 500 elements, a microarray with greater than 100 elements, a microarray with greater than 50 elements, or are not associated with a microarray. Such sets of two or more probes may include at least one probe capable of detecting, directly or indirectly, a marker disclosed herein associated with higher risk of developing NME and at least one other probe is capable of detecting, directly or indirectly, a marker disclosed herein associated with lower risk of developing NME.

[0039] If a marker can be detected through expression level alteration, the expression of the marker in a sample may be compared to a level of expression predetermined to predict the presence or absence of a particular physiological characteristic. The level of expression may be derived from a single control or a set of controls. A control may be any sample with a previously determined level of expression. A control may comprise material within the sample or material from sources other than the sample. Alternatively, the expression of a marker in a sample may be compared to a control that has a level of expression predetermined to signal or not signal a cellular or physiological characteristic. This level of expression may be derived from a single source of material including the sample itself or from a set of sources. Comparison of the expression of the marker in the sample to a particular level of expression results in a prediction that the sample exhibits or does not exhibit the cellular or physiological characteristic.

[0040] Prediction of a cellular or physiological characteristic includes the prediction of any cellular or physiological state that may be predicted by assessing the expression of a marker. Examples include the identity of a cell as a particular cell including a particular normal or diseased cell type, the likelihood that one or more diseases is present or absent, the likelihood that a present disease will progress, remain unchanged, or regress, the likelihood that a disease will respond or not respond to a particular therapy, or any other disease outcome. Further examples include the likelihood that a cell will move, senesce, apoptose, differentiate, metastasize, or change from any state to any other state or maintain its current state.

[0041] One type of cellular or physiological characteristic is the risk that a particular disease outcome will occur. Assessing this risk includes the performing of any type of test, assay, examination, result, readout, or interpretation that correlates with an increased or decreased probability that an individual has had, currently has, or will develop a particular disease, disorder, symptom, syndrome, or any condition related to health or bodily state. Examples of disease outcomes include, but need not be limited to survival, death, progression of existing disease, remission of existing disease, initiation of onset of a disease in an otherwise disease-free subject, or the continued lack of disease in a subject in which there has been a remission of disease. Assessing the risk of a particular disease encompasses diagnosis in which the type of disease afflicting a subject is determined. Assessing the risk of a disease outcome also encompasses the concept of prognosis. A prognosis may be any assessment of the risk of disease outcome in an individual in which a particular disease has been diagnosed. Assessing the risk further encompasses prediction of therapeutic response in which a treatment regimen is chosen based on the assessment. Assessing the risk also encompasses a prediction of overall survival after diagnosis.

[0042] Determining whether or not the presence of an allele signifies a physiological or cellular characteristic may be assessed by any of a number of methods. The skilled artisan will understand that numerous methods may be used to select a marker or a plurality of markers that signifies a particular physiological or cellular characteristic. In diagnosing the presence of a disease, a threshold value may be obtained by performing the assay method on samples obtained from a population of patients having a certain type of disease (NME for example,) and from a second population of subjects that do not have the disease. In assessing disease outcome or the effect of treatment, a population of patients, all of which may develop a disease such as NME, may be followed for a period of time. After the period of time expires, the population may be divided into two or more groups. For example, the population may be divided into a first group of patients who did develop NME and a second group of patients who did not develop NME. Examples of endpoints include occurrence of one or more symptoms of disease, death or other states to which the given disease may progress. If presence of the marker in a sample statistically aligns with one group relative to the other group, the subject from which the sample was derived may be assigned a risk of having the same outcome as the patient group that differentially displays the marker.

[0043] Other methods may be used to assess how accurately the presence or absence of a marker signifies a particular physiological or cellular characteristic. Such methods include a positive likelihood ratio, negative likelihood ratio, odds ratio, and/or hazard ratio. In the case of a likelihood ratio, the likelihood that the presence or absence of the marker would be found in a sample with a particular cellular or physiological characteristic is compared with the likelihood that the presence or absence of the marker would be found in a sample lacking the particular cellular or physiological characteristic.

[0044] An odds ratio measures effect size and describes the amount of association or non-independence between two groups. An odds ratio is the ratio of the odds of a marker being present or absent in one set of samples versus the odds of the marker being present or absent in the other set of samples. An odds ratio of 1 indicates that the event or condition is equally likely to occur in both groups. An odds ratio grater or less than 1 indicates that presence or absence of the marker is more likely to occur in one group or the other depending on how the odds ratio calculation was set up.

[0045] A hazard ratio may be calculated by estimate of relative risk. Relative risk is the chance that a particular event will take place. It is a ratio of the probability that an event such as development or progression of a disease will occur in samples in which a particular marker is present over the probability that the event will occur in samples in which the particular marker is absent. Alternatively, a hazard ratio may be calculated by the limit of the number of events per unit time divided by the number at risk as the time interval decreases. In the case of a hazard ratio, a value of 1 indicates that the relative risk is equal in both the first and second groups; a value greater or less than 1 indicates that the risk is greater in one group or another, depending on the inputs into the calculation.

### EXAMPLE

[0046] The purpose of this investigation was to identify disease susceptibility loci for NME through genome-wide association (GWA) of single nucleotide polymorphisms (SNPs) in affected and non-affected Pug dogs. 170,000 SNPs, genome-wide association was performed on a small number of case and control dogs to determine disease susceptibility loci in canine necrotizing meningoencephalitis (NME), a disorder with known non-Mendelian inheritance that shares clinical similarities with atypical variants of multiple sclerosis in humans. Genotyping of 30 NME-affected Pug dogs and 68 healthy, control Pugs identified two loci associated with NME, including a region within dog leukocyte antigen class II on chromosome 12 that remained significant after Bonferroni correction. Our results support the utility of this high density SNP array, confirm that dogs are a powerful model for mapping complex genetic disorders and provide important preliminary data to support in depth genetic analysis of NME in numerous affected breeds

### Study Population

[0047] Purebred Pug dogs were used for the case-control genome-wide association study. Cases were verified to have NME based on signalment, clinical history and independent evaluation of hematoxylin and eosin brain sections by a veterinary neuropathologist. Cases ranged in age from 4 to 84 months (mean=18 months, median=26 months) and consisted of 11 males and 19 females. Control dogs had no evidence of neurological or autoimmune disease, ranged in age from 5 to 204 months (mean=60 months, median=48 months) at the time of sample collection and consisted of 30 males and 38 females. Control dogs were followed for 18 months after sample collection to verify that they did not develop neurological or autoimmune disease.

### SNP Genotyping

[0048] Genomic DNA was isolated using the Qiagen (Valencia, Calif.) Gentra Puregene Tissue Kit or Qiagen DNeasy Blood and Tissue Kit. SNP genotyping was performed with the Illumina (San Diego, Calif.) CanineHD Genotyping BeadChip using the Illumina BeadArray reader following the manufacturer's protocol. Genomic DNA was isolated from 30 Pug dogs with histopathologically confirmed NME and 68 healthy, control Pug dogs without evidence of neurological or autoimmune disease. Genomic DNA quality was assessed with 2% agarose gel electrophoresis and quantity with fluorometric dsDNA quantification. Genome-wide association of >100,000 SNPs was performed using the Illumina Canine Infinium® HD BeadChip, and SNPs were analyzed with PLINK (http://pngu.mgh.harvard.edu/purcell/plink/) with a minor allele frequency of >5% and call rate of >98%.

### Statistical Analysis

[0049] Genotyping was performed on 98 dogs, including 30 NME cases and 68 controls. Genome-wide analysis was performed with PLINK (Purcell et al. 2007). Concordance on duplicate samples was 99.96%. Only samples with a call rate of >95% were included, resulting in analysis of 28 NME cases and 66 controls. A total of 172,115 SNPs were genotyped. Classic multidimensional scaling (Purcell et al. 2007) using a call rate of >97% and MAF of >0.10 was performed on 85,366 SNPs to determine population stratification, and 21 controls that were not clustered with the main population of dogs were excluded resulting in a final population of 28 NME cases and 45 controls for analysis. These 45 control dogs ranged in age from 5 to 204 months (mean=80 months, median=48 months). Prior to analysis, 7,324 SNPs were excluded for failure to reach the call rate threshold (>95%) and 81,001 SNPs were excluded for failure to reach the MAF threshold (>0.05). In total, 86,692 SNPs were used for analysis. Bonferroni correction was applied to account for multiple hypothesis testing with a resulting P value of 5.77×10⁻⁷ across 86,692 SNPs for genome-wide significance. To further evaluate genome-wide significance, MaxT permutation testing (Purcell et al. 2007) of 100 000 permutations was applied.

### Results

[0050] Initial genotyping was performed on 30 NME cases and 68 controls across 172,115 SNPs. After quality filtering and exclusion of population outliers, analysis of 28 NME cases and 45 controls across 86,692 SNPs identified two disease-associated loci that reached genome-wide significance with correction for multiple hypothesis testing. The strongest association was on chromosome 12 where 35 SNPs within the DLA class II region reached genome-wide significance after Bonferroni correction (raw P value for Bonferroni genome-wide significance is p<5.77×10⁻⁷) with the highest SNP having an odds ratio of 16.1 (95% CI: 4.7-55.5) (FIG. 3A and Table 1). FIG. 1 showed the genome-wide association results for 28 NME cases and 45 controls. In FIG. 1A, Fisher's exact tests were performed to compare SNP allele frequencies and negative log P values were plotted across the genome. The horizontal dotted line represents the threshold for significant association after Bonferroni correction of −log(P)>6.24 with a strong peak on chromosome 12 maintaining genome-wide significance.

TABLE 1
SNPs with genome-wide significance after Bonferroni correction

| Canine SNP | Chr | Pos | A_{R}/A_{NR} | F_{A}/F_{U} | P_{raw} | P_{genome} | OR (95% CI) | | Gene |
|---|---|---|---|---|---|---|---|---|---|
| CF2P178662 | 12 | 5166878 | A/G | 0.95/0.52 | 2.36 × 10⁻⁸ | 0.0020 | 16.1 | (4.7-55.5) | RT1-Db2 |
| BICF2S23225431 | 12 | 5217389 | G/A | 0.86/0.36 | 2.87 × 10⁻⁹ | 0.0002 | 10.5 | (4.4-25) | RT1-Db2 |
| BICF2P22942 | 12 | 5227499 | G/A | 0.86/0.36 | 2.87 × 10⁻⁹ | 0.0002 | 10.5 | (4.4-25) | RT1-Db2 |
| BICF2P194998 | 12 | 5275229 | A/T | 0.79/0.30 | 8.59 × 10⁻⁹ | 0.0007 | 8.7 | (4-19.2) | |
| rs8856588 | 12 | 5622709 | C/A | 0.79/0.30 | 8.59 × 10⁻⁹ | 0.0007 | 8.7 | (4-19.2) | COL11A2 |
| BICF2P574765 | 12 | 5710832 | A/G | 0.79/0.30 | 8.59 × 10⁻⁹ | 0.0007 | 8.7 | (4-19.2) | bing4-a |
| BICF2P1186632 | 12 | 5734305 | A/G | 0.79/0.29 | 7.24 × 10⁻⁹ | 0.0006 | 8.9 | (4.1-19.7) | TAPBP |
| BICF2P1185629 | 12 | 5791672 | G/A | 0.79/0.30 | 8.59 × 10⁻⁹ | 0.0007 | 8.7 | (4-19.2) | KIFC1 |
| BICF2P540937 | 12 | 5829667 | A/G | 0.79/0.32 | 6.27 × 10⁻⁸ | 0.0054 | 7.9 | (3.6-17.1) | CUTA |
| rs9189886 | 12 | 5843592 | G/C | 0.93/0.51 | 5.95 × 10⁻⁸ | 0.0052 | 12.4 | (4.1-37.3) | Syngap1 |
| rs9006653 | 12 | 5916360 | A/G | 0.79/0.33 | 8.07 × 10⁻⁸ | 0.0070 | 7.5 | (3.4-16.2) | Ppdpfb |
| BICF2P1200278 | 12 | 5931001 | G/A | 0.79/0.29 | 7.24 × 10⁻⁹ | 0.0006 | 8.9 | (4.1-19.7) | Ppdpfb |
| rs9125534 | 12 | 5935549 | A/G | 0.79/0.30 | 8.59 × 10⁻⁹ | 0.0007 | 8.7 | (4-19.2) | Ppdpfb |
| BICF2S23322760 | 12 | 5992526 | A/G | 0.79/0.30 | 8.59 × 10⁻⁹ | 0.0007 | 8.7 | (4-19.2) | Ppdpfb |
| rs8760645 | 12 | 6024841 | T/A | 0.79/0.30 | 8.59 × 10⁻⁹ | 0.0007 | 8.7 | (4-19.2) | Ppdpfb |
| rs9245050 | 12 | 6028685 | G/A | 0.79/0.30 | 8.59 × 10⁻⁹ | 0.0007 | 8.7 | (4-19.2) | Ppdpfb |
| BICF2P863589 | 12 | 6059850 | A/G | 0.88/0.47 | 4.83 × 10⁻⁷ | 0.0419 | 8 | (3.3-19.7) | Ppdpfb |
| BICF2P1115728 | 12 | 6064245 | C/A | 0.88/0.47 | 4.83 × 10⁻⁷ | 0.0419 | 8 | (3.3-19.7) | Ppdpfb |
| BICF2P1254053 | 12 | 6149213 | G/A | 0.84/0.35 | 7.23 × 10⁻⁹ | 0.0006 | 9.6 | (4.2-22.2) | MLN |
| BICF2P402427 | 12 | 6160615 | A/C | 0.79/0.30 | 8.59 × 10⁻⁹ | 0.0007 | 8.7 | (4-19.2) | Ggnbp1 |
| rs8694179 | 12 | 6164202 | A/G | 0.84/0.35 | 7.23 × 10⁻⁹ | 0.0006 | 9.6 | (4.2-22.2) | Ggnbp1 |
| BICF2P459960 | 12 | 6184107 | G/A | 0.84/0.35 | 7.23 × 10⁻⁹ | 0.0006 | 9.6 | (4.2-22.2) | Ggnbp1 |
| BICF2S22951431 | 12 | 6197313 | A/C | 0.79/0.30 | 8.59 × 10⁻⁹ | 0.0007 | 8.7 | (4-19.2) | Ggnbp1 |
| BICF2P1261424 | 12 | 6200280 | G/A | 0.84/0.35 | 7.23 × 10⁻⁹ | 0.0006 | 9.6 | (4.2-22.2) | Ggnbp1 |
| rs9120943 | 12 | 6218850 | A/G | 0.84/0.35 | 7.23 × 10⁻⁹ | 0.0006 | 9.6 | (4.2-22.2) | |
| rs9077055 | 12 | 6238545 | A/G | 0.84/0.35 | 7.23 × 10⁻⁹ | 0.0006 | 9.6 | (4.2-22.2) | |
| rs8677516 | 12 | 6257019 | G/A | 0.86/0.36 | 2.87 × 10⁻⁹ | 0.0002 | 10.5 | (4.4-25) | |
| BICF2P608380 | 12 | 6289014 | G/A | 0.86/0.36 | 2.87 × 10⁻⁹ | 0.0002 | 10.5 | (4.4-25) | |
| rs9132539 | 12 | 6299459 | A/G | 0.79/0.30 | 1.96 × 10⁻⁸ | 0.0017 | 8.5 | (3.9-18.6) | |
| BICF2P1340012 | 12 | 6311277 | C/A | 0.79/0.30 | 8.59 × 10⁻⁹ | 0.0007 | 8.7 | (4-19.2) | |
| BICF2P1211546 | 12 | 6320910 | A/G | 0.79/0.30 | 8.59 × 10⁻⁹ | 0.0007 | 8.7 | (4-19.2) | |
| BICF2P738783 | 12 | 6342204 | A/C | 0.79/0.29 | 6.06 × 10⁻⁹ | 0.0005 | 9.2 | (4.1-20.3) | LOC1127664 |
| BICF2P1313789 | 12 | 6653816 | A/G | 0.79/0.34 | 1.89 × 10⁻⁹ | 0.0163 | 7.1 | (3.3-15.4) | NUDT3 |
| BICF2P1380652 | 12 | 6809061 | A/G | 0.79/0.33 | 8.07 × 10⁻⁸ | 0.0070 | 7.5 | (3.4-16.2) | SPDEF |
| BICF2P1462329 | 12 | 6832252 | A/G | 0.79/0.33 | 8.07 × 10⁻⁸ | 0.0070 | 7.5 | (3.4-16.2) | SPDEF |

In Table 1, Chr stands for chromosome; Pos stands for physical position; A_{R}, stands for risk allele; A_{NR} stands for nonrisk allele; F_{A} stands for allele frequency in cases; F_{U} stands for allele frequency in controls; and OR stands for odds ratio. (Same below)

[0051] Permutation testing using 100,000 permutations identified an additional four SNPs that reached genome-wide permuted significance within the DLA II locus and a second region of significance within the STYX gene on chromosome 8 (P_{raw}=2.11×10⁻⁶, P_{permuted}=0.045) with an odds ratio of 5.9 (95% CI: 2.7-12.5) (FIG. 3B and Table 2). FIG. 1B showed that MaxT 100,000 permutation testing was performed and negative log P values were plotted across the genome. The horizontal dotted line represents the threshold for significant association after permutation testing of −log(P)>1.3 with one SNP on chromosome 8 maintaining permuted significance.

TABLE 2
New SNPs discovered with genome-wide significance after permutation testing

| Canine SNP | Chr | Pos | A_{R}/A_{NR} | F_{A}/F_{U} | P_{raw} | P_{permuted} | OR [95% CI] | Gene |
|---|---|---|---|---|---|---|---|---|
| BICF2S23516667 | 8 | 31971609 | A/G | 0.73/0.32 | 2.11 × 10⁻⁶ | 0.0452 | 5.9 [2.8-12.5] | STYX |
| BICF2P639740 | 12 | 6686088 | G/A | 0.79/0.33 | 1.30 × 10⁻⁷ | 0.0283 | 7.5 [3.4-16.4] | NUDT3 |
| BICF2P535495 | 12 | 6793393 | A/G | 0.79/0.33 | 1.30 × 10⁻⁷ | 0.0453 | 7.5 [3.4-16.4] | MGC8455 |
| rs8957837 | 12 | 8822596 | C/G | 0.77/0.33 | 3.94 × 10⁻⁷ | 0.0356 | 6.7 [3.1-14.6] | LOC112577 |

[0052] To account for the fact that several of the control dogs were younger than the mean age of disease onset at the time of sample acquisition, the data was re-analyzed excluding all control dogs less than 24 months of age. Both the DLA and chromosome 8 regions remained significant with Bonferroni correction and permutation testing, respectively, but the significance was not improved by this exclusion (data not shown).

[0053] Haplotype analysis using Haploview (Barrett et al. 2005) identified 19 haplotype blocks across a 4.1 Mb region of DLA II on chromosome 12, all of which were associated with an increased risk for developing NME with P values ranging from 2.1×10⁻³ to 1.13×10⁻⁸ (FIG. 4 and Table 3). A 4.1 Mb region located from positions 4,713,392 to 8,834,652 of the genomic DNA sequence available in the canFam2 Canine genomic sequence database on Chromosome 12 (SEQ ID NO:1) is shown in FIG. 4 with 19 haplotype blocks generated in Haploview (Gabriel et al. 2002). Negative log P values from single SNP associations were derived from genome-wide analysis after removal of population outliers and individual SNPs were plotted as red circles. The horizontal dotted line represents the threshold for significant association after Bonferroni correction of −log(P)>6.24.

TABLE 3
Haplotype blocks generated by Haploview for DLA II region of
chromosome 12

| | | Population | Case | Control | Start-end | |
|---|---|---|---|---|---|---|
| Block | Haplotype | frequency | frequency | frequency | position | SEQ ID |
| 1 | AAGGAGAAA | 0.59 | 0.84 | 0.43 | 4713392- | SEQ ID NO: 3 |
| | | | | | 4821633 | |
| 2 | AGGCAAG | 0.60 | 0.80 | 0.47 | 4836721- | SEQ ID NO: 4 |
| | | | | | 4923170 | |
| 3 | GCAGGAGGGGA | 0.49 | 0.79 | 0.30 | 4938082- | SEQ ID NO: 5 |
| | | | | | 5088561 | |
| 4 | AAAACAGGAAGAG | 0.49 | 0.79 | 0.30 | 5108726- | SEQ ID NO: 6 |
| | | | | | 5364188 | |
| 5 | AGAAAGCGA | 0.49 | 0.79 | 0.30 | 5491709- | SEQ ID NO: 7 |
| | | | | | 5672682 | |
| 6 | AAGGAGAAAGAGA | 0.49 | 0.79 | 0.30 | 5710832- | SEQ ID NO: 8 |
| | GAATGGACA | | | | 6078099 | |
| 7 | GAAGAGAAGGACA | 0.49 | 0.79 | 0.30 | 6149213- | SEQ ID NO: 9 |
| | GA | | | | 6342204 | |
| 8 | GGAACAGGAAAAG | 0.51 | 0.79 | 0.33 | 6492201- | SEQ ID NO: 10 |
| | AGAGGGCGAA | | | | 6982375 | |
| 9 | CGGGAAAAGGGGA | 0.67 | 0.88 | 0.53 | 6992493- | SEQ ID NO: 11 |
| | GGC | | | | 7270218 | |
| 10 | AG | 0.73 | 0.88 | 0.64 | 7338759- | SEQ ID NO: 12 |
| | | | | | 7350261 | |
| 11 | AAAAAG | 0.50 | 0.75 | 0.34 | 7384390- | SEQ ID NO: 13 |
| | | | | | 7643147 | |
| 12 | AGGAGA | 0.70 | 0.89 | 0.58 | 7725530- | SEQ ID NO: 14 |
| | | | | | 7830733 | |
| 13 | AG | 0.50 | 0.75 | 0.34 | 7927872- | SEQ ID NO: 15 |
| | | | | | 7944953 | |
| 14 | AATAAAAGAGACGA | 0.50 | 0.75 | 0.34 | 7950821- | SEQ ID NO: 16 |
| | | | | | 8158994 | |
| 15 | GGAGG | 0.50 | 0.75 | 0.34 | 8208369- | SEQ ID NO: 17 |
| | | | | | 8265940 | |
| 16 | GCAAAG | 0.50 | 0.75 | 0.34 | 8327142- | SEQ ID NO: 18 |
| | | | | | 8386063 | |
| 17 | GGCGAGCAAAA | 0.50 | 0.75 | 0.34 | 8429601- | SEQ ID NO: 19 |
| | | | | | 8533350 | |
| 18 | ATGAACCG | 0.51 | 0.77 | 0.34 | 8546686- | SEQ ID NO: 20 |
| | | | | | 8713747 | |
| 19 | GGCA | 0.51 | 0.77 | 0.34 | 8719506- | SEQ ID NO: 21 |
| | | | | | 8834652 | |

[0054] Manually forcing all of these haplotype blocks into a single haplotype resulted in the creation of a 4.1 Mb haplotype containing 241 SNPs (SEQ ID NO: 1). This haplotype was common and strongly associated with an increased risk of developing NME at a case frequency of 85.1%, control frequency at 38.4% with significance p value at 7.97×10⁻⁷. The strong association of the NME disease with DLA II supports an autoimmune etiology. Haplotype analysis of the DLA II region identified a large, common block strongly associated with altered disease risk. Polygenic loci with MHC II polymorphisms show the strongest disease association, as observed between DLA II and NME association.

[0055] Haplotype analysis of the STYX region of chromosome 8 identified four haplotypes (FIG. 5 and Table 4). A 488 kb region located from positions 31,736,206 to 32,225,068 of the genomic DNA sequence available in the canFam2 Canine genomic sequence database (SEQ ID NO:2) is shown in FIG. 3 with 4 haplotype blocks generated in Haploview. Negative log P values from single SNP associations were derived from genome-wide analysis after removal of population outliers and individual SNPs were plotted as red circles. The horizontal dotted line represents the threshold for significant association after Bonferroni correction of −log(P)>6.24. The additional blue region within each haplotype block represents MaxT 100,000 permuted haplotypes.

TABLE 4
Haplotype blocks generated by Haploview for STYX region of chromosome 8

| | | Population | Case | Control | Start | End | |
|---|---|---|---|---|---|---|---|
| Block | Haplotype | frequency | frequency | frequency | position | Position | SEQ ID |
| 20 | GAAGGG | 0.74 | 0.59 | 0.83 | 31736206 | 31795128 | SEQ ID NO: 22 |
| 21 | AG | 0.47 | 0.27 | 0.59 | 31866373 | 31883390 | SEQ ID NO: 23 |
| 22 | GGAG | 0.52 | 0.27 | 0.68 | 31971609 | 32009283 | SEQ ID NO: 24 |
| 23 | AGAA | 0.50 | 0.59 | 0.44 | 32183184 | 32225068 | SEQ ID NO: 25 |

[0056] The most significantly associated and common haplotype spanned the STYX and GNPNAT1 genes and was protective based on phenotype (P=1.43×10⁻⁶). This block also contained two additional haplotypes significantly associated with NME risk (p˜0.005, data not shown).

[0057] STYX, (serine/threonine/tyrosine interacting protein) is a pseudophosphatase that lacks intrinsic catalytic activity and is structurally similar to members of the dual-specificity phosphatase subfamily of protein tyrosine phosphatases. Protein tyrosine phosphatases play a key role in immune system function including lymphocyte activation, with mutations in PTPN22 having been documented in association with autoimmunity (Nang et al. 2005). STYX also is known to bind to the calcineurin substrate CRHSP-24, and calcineurin plays an important role in T cell activation. Dephosphorylation of CRHSP-24 can be prevented by administration of the immunomodulatory drugs cyclosporine and FK506.

[0058] GNPNAT1, glucosamine-phosphate N-acetyltransferase 1, is involved in amino sugar metabolism including the formation of uridine diphospho-N-acetylglucosamine (UDP-GlcNAc). UDP-GlcNAc is an important cellular metabolite necessary for the synthesis of N-linked and O-linked glycans that play important roles in normal thymic T-cell apoptosis. The disruption of GNPNAT1 is expected to lead to aberrant immune responses in NME.

The application's sequence listing, which the Patent Office published only in electronic form, follows.

SEQUENCE LISTING (25 sequences)

SEQ ID NO: 1 - DNA, 3031985 bp, Canine spp. (residues 1-1,515,993 of 3,031,985)
  misc_feature: canFam2_dna range=chr12:3499115-7980069
  misc_feature (16348)..(16348): n is a, c, g, or t
  misc_feature (50914)..(52022): n is a, c, g, or t
  misc_feature (53454)..(53454): n is a, c, g, or t
  misc_feature (82491)..(84213): n is a, c, g, or t
  misc_feature (85011)..(85257): n is a, c, g, or t
  misc_feature (99106)..(99109): n is a, c, g, or t
  misc_feature (109125)..(109274): n is a, c, g, or t
  misc_feature (110498)..(110498): n is a, c, g, or t
  misc_feature (161503)..(161503): n is a, c, g, or t
  misc_feature (186111)..(186183): n is a, c, g, or t
  misc_feature (218699)..(219347): n is a, c, g, or t
  misc_feature (241821)..(241821): n is a, c, g, or t
  misc_feature (308246)..(308372): n is a, c, g, or t
  misc_feature (370692)..(371051): n is a, c, g, or t
  misc_feature (378070)..(378312): n is a, c, g, or t
  misc_feature (415586)..(415980): n is a, c, g, or t
  misc_feature (589760)..(589971): n is a, c, g, or t
  misc_feature (613402)..(613507): n is a, c, g, or t
  misc_feature (671099)..(671210): n is a, c, g, or t
  misc_feature (707494)..(707733): n is a, c, g, or t
  misc_feature (711846)..(711846): n is a, c, g, or t
  misc_feature (724016)..(724202): n is a, c, g, or t
  misc_feature (726289)..(726641): n is a, c, g, or t
  misc_feature (760736)..(760736): n is a, c, g, or t
  misc_feature (772850)..(773113): n is a, c, g, or t
  misc_feature (845967)..(846164): n is a, c, g, or t
  misc_feature (854792)..(855533): n is a, c, g, or t
  misc_feature (857844)..(858340): n is a, c, g, or t
  misc_feature (862119)..(862322): n is a, c, g, or t
  misc_feature (924007)..(924007): n is a, c, g, or t
  misc_feature (929947)..(930107): n is a, c, g, or t
  misc_feature (939020)..(939020): n is a, c, g, or t
  misc_feature (995934)..(995934): n is a, c, g, or t
  misc_feature (1023746)..(1024280): n is a, c, g, or t
  misc_feature (1042346)..(1042346): n is a, c, g, or t
  misc_feature (1086299)..(1086530): n is a, c, g, or t
  misc_feature (1090884)..(1091495): n is a, c, g, or t
  misc_feature (1180064)..(1180064): n is a, c, g, or t
  misc_feature (1203152)..(1203403): n is a, c, g, or t
  misc_feature (1205580)..(1205654): n is a, c, g, or t
  misc_feature (1261565)..(1261660): n is a, c, g, or t
  misc_feature (1265815)..(1268727): n is a, c, g, or t
  misc_feature (1283221)..(1283516): n is a, c, g, or t
  misc_feature (1291187)..(1291766): n is a, c, g, or t
  misc_feature (1585931)..(1586093): n is a, c, g, or t
  misc_feature (1629707)..(1629939): n is a, c, g, or t
  misc_feature (1661396)..(1661532): n is a, c, g, or t
  misc_feature (1810970)..(1811044): n is a, c, g, or t
  misc_feature (2146553)..(2146607): n is a, c, g, or t
  misc_feature (2326448)..(2326555): n is a, c, g, or t
  misc_feature (2335467)..(2335676): n is a, c, g, or t
  misc_feature (2339555)..(2339771): n is a, c, g, or t
  misc_feature (2342726)..(2343924): n is a, c, g, or t
  misc_feature (2347835)..(2347907): n is a, c, g, or t
  misc_feature (2356676)..(2357299): n is a, c, g, or t
  misc_feature (2516052)..(2516052): n is a, c, g, or t
  misc_feature (2698993)..(2699296): n is a, c, g, or t
  misc_feature (2725258)..(2727787): n is a, c, g, or t
  misc_feature (2739697)..(2741058): n is a, c, g, or t
  misc_feature (2765197)..(2765240): n is a, c, g, or t
  misc_feature (2771231)..(2771984): n is a, c, g, or t
  misc_feature (2874929)..(2875182): n is a, c, g, or t
  misc_feature (2877909)..(2878472): n is a, c, g, or t
  misc_feature (2879203)..(2879310): n is a, c, g, or t
  misc_feature (2887589)..(2887722): n is a, c, g, or t
  misc_feature (2956542)..(2956542): n is a, c, g, or t
aagctattgttaattttgttatggatcaataattgcattgtcattacgttaaaaaaaagtacataatttcttagaaaaggatactttaagtatatagggggaaataatatgatgtatgcagtttcctttaaaatagttcagcaagggacacctgagtggctcagcagttgagcgtctgcctgcagctcagggtgtgatcgcaggatccaagatcaagtctcacatcgggctcccttggaggagcctgtttctctctctacctgtatctctgcctctctgtctctcatgaataaataaatcttaaaaaaaaaaaaaacaacaactaaaaaataaattagttcagcatagaaaaacaatacatgaagaaaatgtagcaaaatctaaactaccttgttaattctgagtgattgatatatggaggttcattgataataaaggttctctctgtatgtttgaaaatttttaaaatacaatacaaataaatccacttggaatcaacagacttttccttcattcctatccctttacatactacagggctcccttatcccctcaatacttgtgttcccacccataccttataagaccggggcatgctgggtagtacagtgcctccacagcagctgatgatctctcccatctgaggtggtggtggctggactcctggagtcacatggatctcatagccctaagagaaagaaaatggtagaggccacagatgtatgcactgagaggctatgaatagctggggaacctcaggagggagggttggagcatggggcacaagacagcctcctacctccagcaacctttgctcccgagcccggctcagggcatctcgaaggctgaagccaaagttcttctcctgctcaggatcagtcaccacatattcatccgggggcaaaaagcaaccagccttgtgggactaaggacagtagcagtcagcatcaaagctcagcccagctcaccacccagctcttctacctagcatttggagggaacttacaaaatgttttttgaattaagctttctgcttcactcacctcccttgtcttcctgggcccctccttcccctttctagggcaccctaagagtagttttctgccatggtacctcttctgtcatcttctagcctctcacctggtggagccaatccaaggagaggatgggaatcccccgccccagagcacacaggaacttgaccgtacggcggactcgatcagtcaccaagtgggaagcctctgccactgagctggccagactcccccccagggccagcactgcccgctcaccacgggcatccaccactcctgtgaagagaacctgcggagggagttagcctgagctggacacagcaacccatgccatcagcgcctgtttccaaacccgttggtatcctcccatcctcccacatctgcctcccaccaagccccatgccccttctctcctactttggggactgtggactcttggttaggtttggttcgtctaagactgcggcttgggattctcttgggctcctcctctgcttggtctctctttctcttgcctggtcctggaaccactacatcctgggattgagaaagatcttgctaggagtttcggagcctccaagccctttcctagcttcagtcaggccctgtcctcacctcctcctcccttggcctctccattggatcttcttcctcctccttgaggaacactgtctcctgggtgacttctcctctttggtgccgtttttgaggtgggggtgaatccacagtagccaaaggcctcttgtggctctgagaggccttaggtgggggccccagggtgaactccgatctgcctgctgcctccaacttgtggatctgggtagcatgagtgggggcttcaggaagctgggcaaaggccggcttgggaatggtcctgagggactcaactgttctcactgctctttgtctttggttccttgaggaccgagatttaggttcagggagtgcagagtagggctcacagataatgggagctataagggactcatggttcctagtggccctcagcctcctgctgcaattggcttgagagatgggctcagggggaataggctggtctgtggggacagaaggctggaattcaggagtggtaagaactggcacagcacttattgtagaagaccttagcatcttaccctgacttccctgaaccttgggggagaacagttgatctgtaggggtgacagattcaagatcaggggctgtgggttcaattggctggggcatcttgacaaaggacctatgtgtcctgccccgagtggcccgagatgtgggctcaggagtgacaggctgatctgtggagatggaaggctggggttcaggcactgtgggggcaactggttcaggggtctcgatagagaacctttgtgtcctaccccgagtggcctgaaatgcaagtttggggatgacaggctggtctgtgggggtacaagcctggagctcagggactgtggagacaactgatgtgttagtcttgctagaagacttaggtgtcctgccctgagatatacgtttgggggtgacaggctggcctttgtgggtggtaggctggagctcagtggctgtggggacagttggcttaggagtcttgagagaagacctgtgtgtcctgctgtgagtggctcctgatgtgggctcagtgatgacagactggtctttggaggtagacggctgaagttcaggagctgtggggacagttggttcaggggtcttgacagaggacctacgtgtcctgccccaagtgacctgagatgtgggctcaggggtgacaggctggtctctggggatagtaggctggaattcaggagctgttgggacaattggctcaggagtcttgacagaagacctacgtgtcctcctgtgagtgcccccagatgtgtgctcagtgatgacagactggtcttcagaggtggaaggctggagtgcaggggctgtggggacagttggttcagggatcttgacagaggacctacgtgtcctgccccaagtgacctgagatgtgggctcaggggtgacaggctggtctttggaagtagaaggctggagcgcaggggttgtggagatgtctactttgggagtcttgacagaagacctaagtgccctgctctgagtggctgtggagacaactggttcaggagccttgacagatttacgtgtcctgccttgagatatgggctcagcagtgacagactggtctttggaggtggaaggctggacttcagggacaaggagttcaggggtcttcagagaggacctacgtgtcctgccccgagtgacccgagatgtgggctcaggacagaggggctggtctgtggggatggttgagtgaggttcaagggctaaagaagaaattgcagagagtgtcttcctggaggaccctcggagcctgactttggattttgggtacagaggctccatctctgaggataaaggagtccctggaacttcctgattcccattttgcctggtcctgggaatgggctctaaagaagatggagaggaagaaaggaagggctgagacacaggatgtttttgactctgagagaggagggggttgtggtgtggggttgaagcttcaggcactgcagcaggcagatgagcatctgcggattcctgatcaccctgaggagaaatagaagtaagtgagggaggaagaggcagagagaagagagacagtacttggatactattcttgatacttgtttattgttagagtgtgttcctggcacttcacttgtctgtgacctcccttcatgagacttggaacttcctagggaggaagcagtcctcattcccacagacctatcctcatgccagtatagtgttccccagagatggatgatggtaataaaaggatggctggaaaaagatgggaaagacatgaaaaaaaaaaaaaaaggacattctaagtcaggcagagggagacagaccttgggaaacagatacagaaaatgataggtgtgaagggaaaggtacagagccaactaaggagtggtgacaatggaagacaattgggaagatggagaaaggaagagattaaagcaaggtcaggggaaggggcaacaatgaaatagagggaggtagaaaaagcagttctcaccacagaggccttctcagcaggtggcgccttgcaagtcaggtggcctagacagaaagtgaaaaaaagtgtatgtagctggggtctaagcactcagccacttaggggttgtttagcacaagtgctgtgtaccaccttaggttcccctctgccttcacttacctctctcctgcctgctggggctcatcggggctccacctgactggctcccagaagcttctgggactgaagcaagtccctgctgggcccccatccctgcactaggctctggtgttagactggaggcctgcccttcctggtcttggctccctttctctatctcccctctctgtgggcctctctccagttttacttctggtaccttcatgcctaatccacttggctcaccctctctctctactactggtttctctgcttctctttcaaatatttctcttgcaatagactgcttttctgtctctttctcttgtgcctccctgggtatctcaatttctatgtttaaactctccatgttcctttcagtacttgcacttttcaccttttggtcagactcttgtccctgattatctctagctaacacccgtatccctctagttaactcttctcctaacacatcttctctctctcctgctggcagcttcttggtttccctgtccaatgggcctctctcaggggccacctcctctggtgcttctcttggtgtacccatgtctttctccacagtctgcatccctctgccttgaatccccagtggctctgcatgaactgggctctctggatgttgggcttgtggtgctgtcctaggtgtagaggggcaagatccatgggcatcaatgtgggcagcaatgggctggggctcagaggcctcagactctcttggacagaatggctgtgttgccaagacttcccacggctcatccagggcacctggaagtagagtcagggagagagagacagagagagacagagagacagagagatagagacagagagacacacacacagagagagagagatgcagattgggaaagtaataaataggatgagaaaagattaagataaattcatgaataatagggatgcctgggtggttcagtaggttaagtgcctgccttcggctcaggtcatgatcttgggtcctgggattgagccccacgtggggctccctgctcagcagggagtctgtttctccctctccctccaccccttccccaaatcgtgcaggtgtgctctctttctctccctcaaataaagcaataaaatttttaaaataaaaaattcatgaataataaacctaataatcataatcataagctggtcattaaaggaaagttgggaagaggaccaaaaatataagatgcatacagaagttctcatagcagcctctttaaaaatgatggagatggagaaacgtcagtaaaaagtcaaagaatatgaaagaaacatgtaaagagaaaaagcaatgatgccaagttaggagcatgaaggatagagtttcttatacctgaggcctggaagctgtaataggaagggccagactcttggggtagagtagccaggaaggcctgagtggcttcatcctccatgctctggactgctgcagaagaaaagctggctcacgcctagctcttccacagaactctggggacccattcttggcctcctgccccacctacaccagctttcacaaccttcaaggaccaccagtctgggctcccagctcccacttgcaccaacatccatacaacacagatgccctcaccttctgggctctgattctctctctccacaaagcactgggtagcctgtaggtccaggtcttcagaatctgatgggggagcaatataagatagataagtcatatctcatgcttaactccttactctttctctaccattttctccccaaccccaagccctctacaatggactgaatgtttgtatcccacccaaaattcatatgttgaaacctaatccccaatgtgattttattaggaggtaaggtctttgggagatgattaggtcatgagggtagaacccactgaatgggattggtacccttataaaagagaccccacaattaacttgtgcccttctaccatatgaggacacagtgagacaacagctgcctatgaacaaggaagtaggtcttcatcagaacacaatcataccagaactttgttgtttttttttaagattttatttattcatagagacacagactgagagagagagagaggcagagacacaggcagagggagaagcaggctccatgcagggagcccgacgtgggactcgatcccaggtctccagcaggatcacaccccgggctgcagggggcgctaaaccgctgtgccactggggctgccccataccagaactttgatcttagacttctaagccttcacaactatgagaaagaatttctattgtttataaaccacccagcctatggtattctgttacagtaccccaagtggactaagatattctataagcgttctttcttttcggggtcaaggaagaaggccagcacttaccaccatggttgtctccacagttcttggtcctgtccacatgtggttctctcttcctttctgtgggggtctgggctccctctttctgtggttggatggtttctcctgaagtgcctgtgtccaccaccagatctataaggttctcctttgagacagggagaagatcttgctccacctgtgatacaagtgaaaccccctgggccctcgcctcaagaactctctcctgctcaagaactggtgcagccgattctgtcccagcatccccttctgctagaagctggtgctttccagtatctgccaccagtgaggctgctaaggatgtgtcctcctccacatctgtcccacagtcctcagatagaggaggctggggttcccctaggtgcatcacaggcagctttgcttggcccccttctacttccacatatgtttgatctgtccataccacaggcacctgatgcttctccacaagtataatagctggtcctggtaggactttctcttccacttgtgtgatgtctatggtggcagaggcttgatttctctccaggtggacctcaagtaagctcttatcttcatctacctctagatcactgtcttggagaggaaactgcctcttttctgagcatgccttgtctgtatgacacttgggcacagttcttctgttttccattgggagaccctcctcctccatgtctgtcttactatctctcccagcagaggtttggcttggctccagaagggccacaggttgggccctgtcctcttccacatctgtacctctgttccatgtatcagatccgctctctttcagacgtgccaaagtgagtgctgctaagacttcttcctcatcatctgtattgctgtcaatcaccatggaaatttggtttctctccagagggactgccagttggatctcactttcctccacatctgtatcattaccagctgggatctcctgtagatgtaccaaagcaggttcctgaagactctttgtactaactctgtggaagatttgcctcttcttcataggaactacagctggtgttgcagggatccgttcttcttccacatcagtatcactgtctatgaaatcagaaggttgggccctttctaaatggacttcagcaggccttactggaggcctgctctcatccacatctgtgtcactgtcttccccagcactttggtttctctccagaatccccccaagtgagaccaccccattccttgcatccctctcaacttttgtgttattgttcctctccttcactgaacactgatcctttccaagctgggttgcaggtgtcatagctttcagctgttctgtttctgcagtggagcctcttctggcagataaggaggcctctcccgctgctgaatgctgactttcttcctcatctgtgtcactgtccaggttgaaggcaaaaggtggcccagggccatctggggcaggagaaggcccctcttcatcactgtaaaagggaacagaagagaaagggttgatagcatctgtttcccaagaagaaatactccactcaactatgagcaccttaagggcagacacaaggcagtagctgtttgtttgtttgtttctttcttttctctccagcaattagttctcacttggcacatcagagatgctcaataaaagttcagctgagcaaaagagtatgtgcaattccccagccccactttcataacaatcatctcttgcagatagattctacagtccctggttcctcctccttttaaagatgtaagtgtctggccctttggcacttacctctctggaactactgctgccaaaggggaggtccttggttctttcaccacacacctttcagaaggagaatctaagagtaaaaaggaattaagttagttgactgttctatactcaccatccccatcttctcacccaccctcccaatatacaaacatacctacttcctcctccgagtcctcagccaacaggagcccctggggttgagttcctccctgtaccctgggtgtctcttctacagttagaggaccccgggaaacaaagggcagggggacattcaggcgatggtactggcagggcaagtcagcaaagagaatcaactcctggtccctcagccgatgactcacccctgggcttaggaccttaggaggccttaggacttgagtaccattgaggctgccacaatcttggaggacaggtgccttgtcccaggccaagatttcaatgactgcatgttgtttggagatggatgaaaagggcagggtcacagagcaatcaggcattcggcctaccatattcttcccaagatacaggggaaaatctaagaattagagagatagataggttaaggcctgagtcttggcctgctatcgggaaaatattcctgttaagtaagtaccccactactaactcaaagtccccacacacataagaaaaataaaagacggtaggacatataagtattgaagaatataagcaatacattattcattgtcaataccccatccatccacactggattttttctactgcagtaaaatatacataaaatttaccatttaaccatttttaagtgtacagtttagtagcattaagtacagtcacattgttgtgcaaccatcaccaccattcatttccagaccatgctggatttccatctgaatctcttcttcttctcctaccaaagtaaaattgagcccattgagtccagggtacttgccaggagcaatcaactcaatcagcccctcctctgcattcccagtgaaaaactcagatctcctcgaaacatataaaagatgcttacaaccgtccaactacctccccataaaaataagaggcctataccagtactttatcatccaagaaactgacctttttctggtccatgggcactactgaagatatgcaaccgccctacaggctctaagccacgccccaaggcttcactgggtctctctgtctcctcctcttcttcaatctcccagttgatagcctgggtgtcctccatgacctgggaagtaaacacattatcatctcaggtcctcgggcagtctcagagaggaggctgataactggagataaccctggagagttataggagattgacatgtctcctatcttttttttaagattttatttattgggacacctggatggctcagtggttgggtgcctgccttcggcccaggtggtgattctggggtcccaggatcccatcccacatcgggctccctgcaggcagcctgcttctccttctgcctctctctgtgtctctcatgaataaataaataaaatcccaaaataaaatgtgggactccatcccgggaccccaggatcacgacctgggtggaaggcaggggctcaactgcttagccacccaggtgtcccgacatgtctccttctgacaaccaacctgttattatccttctgaactatttaaaaaacatttgtgtctataataataaataaatattacgggggtgggaataaacagtatgagatcccaagtacacatactacaaatgcatgtgcttatgtataaagagacaaacattctgagaaaaaacaatgcttagccttatggtatatgatatactgatagttttcattttttttttttcccatccactattgtttaaatgctgatctgcaacctgctaaattgatttcaccatccacttactggtttggaacccacagcctgaaaaaaatattttagagagagctaaactttgccaagcatcaactatgtgctcagcattgtgttatgtgttaggcaccatggacatatgaggcaggcatttaaaaaagtaaggctaagggacacctgggtagctcagcaattgcgcgtctgccttcagctcagggcatgatcccagttcagggatcaagtcccacgtcggtctccttgaatggagcctacttctccctctgcctatgtctctgcctctctctgtctctcatgaataaataaataaaacctcaaaaattaaggctaaaacattaaatgacttgcttagggtaacatagcaggtaggtggaaaggataggaacaaatgtgcttctggaggcaaaccgcatgctttttatactttagcagaacatctcaatgtgatcaactaactgccgagaatcctaacaaccgaggtacatagaggcttgttctgtatgaagcattactctagtttatactgacactcacttaatcctcataaaaatgttttaaactattattattactctatcagactaagcaactgcaacatagacgggttaaggaacttgcccaaggtaaacaaggtattttctgtcctctgtttaatacttcatggctttccatgcccacaggatgaaataaaatctcaactctttagcaagatcctccatgatctgcacctcagggcctgcttccctctgccaaagcctatggttcagccacatggacctgctctccccaaactgaacacactgctcctgtggttccccatacctgcatgccttggtcagttccttggcccttagctcctagttttctggtccaactcctacccatgatttatggttcagtccaaatgtcgcctcctcagtaaggcctttcctggaggcgtccttgctttctgttcttggtgtccccacatgccccccgtggtcggagaacttttatttcccctaacacttctcaccatattgcaaccattactttccatttctgccttcgcaaactgtgtctcttcccctaggtcacatcatattcattcaagaatacctactgagcacctggaactgttcaaggagctcggaatacagtcacaaaacaaacaaaattaaccccaccgtcctgcgaaaggacaaatgaaaggtgatgaaaactcaaaacggtgagggtggaattcccttagagactaactgctgacagggaaagcaggcgtcgtccccggggagagctgactccgtcccgcaggcaggaactcaacgggagcccaggccccgcggctccatccggggcgccaccatctttcatctccaccccaggggcttcccgccgggccccacgtctccccatcttcatacctaacctcggggcggggcgtcaagtaaggctgaatactacaatccgagaaaccaaccggcaagtgccgtccgccccggcgcggcagggcacgcccctcccgccctacgggaggatcaagatggctcccgcgagcggtgggcgcggcccccagaactcacccactgcgagtccccgcgcgccgccagtaacggccgcgacccggcgcgcgggagctcgcgccgagagggcgccggccctttgattggcttctgctgctgtctctcacgaccgacgactgaggaagcgcccaaccggggggcgccgccaaggtcccgccccgccccgccccgccccgccccgccccgccccctcagcagctcaaaggggcaggtcttcctgggcgcctgaaatcggttaagtgaggcggtcacccgaggctgccgtgcgcgcactgaatggcgcgccgcgattgggcagctccaaggcacagcgcggcaccgccgcaccacgcaccgcccacttcccgcgcagatttccgaaccgcgaccacagagtctggctcccgtcggtggatagaggggccggccacagtcgtcgccgaggcgtcggccgcggccagagagccttcctcggtcctcccagacatggagtccgctgactcaggagaaatggaaatgagctgcgggttgcagtcgtggccggaggctgcaggttggagaactgcccgtaggcgtgccgcttgaagaatctccatcacagtgggaattcatttccttttgaattggcttttttagggcaagtcatgtccttccctttctgacactacgtcctgatggacctgtggaggtcattttcctaaggatccctaggcaaagacggagaactgtttgttaactgtcttaaaggttgaccgaggtctttcaagaggtggaggacggatgctaaaaccatcagtttcatgatctcacactaagagaggagaacagtgacaatactattaacgtgtgtacttgaggaagtcctttgcgttcattatctgtcctccaaccacaacaatcaaatagatttcagggagggaattgaagtctgcgaagttaagagacctgccgacgttcctacagctaatggaagggaaggacaacttgagacaagtcctctgattctagattctgaactttccccactagcacaaaatgactgctttcattaggatcatgccctgaaacatagaacattctcttttaagtgggtagagaaggtcttgcacaacttgctgtttattttttgtttaggtgagaagaaatgtgttgactggactgtgagtgaacaatgatgaccttgatagcacaagtcctatgtcctattacaatgtggtaacaccctccattgtttacacatttcccatcaaattgcagagactgaagacaggggaactaatttttactcactttgtatccctagcttctggcttggtggacacttagtatctatcaaacgaacccttaaggagcatgcccctctgacttgagcgcatccaattttctcccatcagaccccctcttttgtttcaatcctgaggcttttgagagattgcaatggccagctgcctagtcagtgaattcagcaaactgaaaaacacttccaccaaaatgtctggagaggcatcctggaagacactgaaattcaggcacctcacctcataattctctagacaaaagcagtgtcttcaatgctgccctaagagtccccccccccttttttaagaatttatttattcatgagagacccaggcagagagagagaggcagagacacaggcagagggagaagcaggctccatgtagggagcccgatgtgggactcgactccgtgtctccaggatcacgccctgcgaaggcgcgctaaaccgctgagccaccagggctgccctaagaaccccttttgatgggggaacagaggactggctgaggacaaagcacaagcccagggcagcacattgacaagcccttgaaacaggcagagggaccttcctctacggactcaactgcctcgatgttcatactttgctaaggagaaaaggcaatcttagcccaacccccaggatcctgtaagtctttttaacataaaaattcctttagaaagatcctttatctaaacccacaagatacatgttggcaatcatcccctaagcacatggcccacccacacacatctaaagggtctcacgaatcaggttttattagccggtaataagtgaccttttcccaacaatagctggtcccctcaaggtcctggaaaccttgcttccaaattccttagagagtacgctatcctcaaacccctcccaactcccaggtatataatcagccacccctcaccgggcagcagctcttcctgcccacgggtcctgtccccctgctttaataaaaccaccattttgcaccaaagatgtctcaagaatcctttcttggtcgtcggctccgaacctcaccttataattccaaaaacttcatcactttcatggatagacttctgacttcacagattctacataccagcttttctaaaccattcaatttatttgaacacaccctcaattacatctctactctgaaaacctattgctgcatttttgtttctctttctaaacattatcattagaaaatttccaaggaaataacaggagggccatcccgtttttcctatctgggggagcagcggcttcctggatttcatgccgtgggtcaccgaaggacccgctgtttgctaccagagcagggtgccgcatttctccccagttttagctgagctaagcagccctcttaccaagagctaccgcagcagggaacgttcagggcgtgcccacttcgccttccaactcctggcaccccagggttcccaatgcctgtatcccccccaaatgactcccttttagtacaaaaaactcaagtgtaggggaaagaaatttgcccaaggtcatttttcattaaaaaacaacaacaaggccaactctacccccccccccccaaccaaaaatccagtatccactcatccctcccttcattttccagcgtagacaacaatggaggactacgactcccagggaggccagcgttcatccacccgagcggagcccaatagacgagacctacgtgaccggcactgaccaatcggggcccactccagcgaggctttgtctgcctgccgcggcgcgggcgctctcccgcctgcagcctccgcgcacgcgcgccccgccctgcccgcctttccgccttcttcgccctccccgcttctttctacatctcaacgttcttgtcgctgcgctcggacctcgttgctccagcctctggacgcgtcccatccttccagcctgcgaattgcagtataggaaaaaaccccatctcactttctgccccgtacacacctttgagagaagcaaaaagaattaaaataaattttaacaatgagggaaatcgtgcacatccaggccggtcagtgtggtaaccagatcggtgccaaggtaagaattttaagccttttcttttaactattttttttttagaagaaaaacaaatccagctaaatgatgaagaatgtgggacatatttgcgttccatccattgtcccgctttgccctcaaaagttttccatatacaatacacggttgcagctagaatttacttttgaaaaatgggggaattgtacttggctggctaattttgggtgagcttttgaggacgtttcgggtttggagtcggaagactggctctttaaaattttacttgaaagtgttgtagtggtccgaggaacggggagagaggagatgcggaaacggtccgagatacagcgcggagaggctgtccccgtgtgcatcccctccgcggggaggggcccggctccacggaagggagggggacagggagcgcggctgggcggcggccgcggggtcctgggcccacggtggggaggggggcgcgacgcgccagggtgggctgcaccgcgcggtgcccgccccaaagatgagggcagtccgcgaggggcggtcccgtaggcccttgtggatggaagactggtccctgcagtattaatttcctttcatctccagtaaagagacccttttagggcgtgcaccgatatggagaaagagggcgggaggatccttttctttcaagggtccctcagggctaaacggtgggagaagggccgagaagccgtacttaaagccaggtataacaagctagccaaggaagaaaatcggaggctcaagcgggaggtgggggtagtttctttttctgcgcgcggttacagtgtggcgggggcagggcagggaggaagtcctgctgctacgttgtagcccggggcggggcggggcggggcggggctccaagcgccgggctggccggctgggggcgcgctagcggcacaggcccccgcccacgcgcgacgcctccctttgtcagcgccgacgggcgggcgccgcagtcacgtggaggggcgtccactgcggcggcttctgtccctcgccccggctcgtgcgcggggggagggacagaagccgccgcagtggacgcccctccacgtgactgcggcgcccgcccgtcggcgctgacaaagggaggcgtcgcgcgtgncgcaccgcgtccaccggtcgccgggcctccgcggctgcacccgagcagtggacgctgcagcccttagggggctgcgggtgtctggtggagggcgcggcaggcaagcagagcgcccggtaggcggcggaggtgcgctctccgtgtgcgtgtttgcacttgaaatgtgtcggtcgggtgggcatcactggctgggaccagagctgtgcaagtctccctgctcttcctcggcagttctgggaggtcatcagcgatgaacacggcatcgatcccaccggaacctaccacggtgacagcgacctgcagctggatcgcatctccgtgtattacaacgaagctacaggtgagggcgggaacggggaacgcggggctcccacttctccggggtctcctttccagccctggagaacccaccttgggatgggtctgatttttaaagaaggtcttacgctgatttgacttcacggtggggcaaaagatcagctctgctgccccctggtgtcctccagctcagctccatttggtcttctggtccaccaattcttattctttcttccatataggtggcaaatacgtacctcgtgctatcttggtggatctagaacctgggaccatggactctgttcgctctggtccttttgggcagatattcagaccagacaactttgtttttggtgagttatgcacatattagtagtgctattcagtgtatttgaaggaaggagactgcaagagctaagaagttatttttaatgctggagcgtttatctggggatatgttttgagatctctaacgcagggtgttgggaatgaccgccttagatggtagatactgaggcagggatgtatcacaggtgagtgagaaaaaaggcacattcgtgtatgttattttaaaagctgaagagtggaaatggtcctttatctttgatgctttgctaataaagagaattttgttcacctcattccagggcagtctggggctggcaacaactgggccaagggccactacacagagggggctgagctagtggactcagtcctggatgtggtgcggaaggaagctgagagctgtgactgcctgcagggcttccagctgacccactcactgggtgggggcacaggctctggcatgggcacgctgctcatcagcaagatccgagaagagtaccctgaccgcatcatgaacaccttcagtgtggtgccctcccccaaagtgtctgacacggtggttgagccctacaatgccaccctctctgtccatcagttggtagagaacacggatgagacctattgcattgacaatgaggccctgtacgacatctgcttccgcaccctcaagctgaccacgccaacctatggggacctcaaccaccttgtctcagccaccatgagtggtgtcaccacctgcctccgcttccctggtcagctcaatgctgacctccgcaagctggcagtcaacatggtgcccttcccacgtctccatttcttcatgcctggctttgcacctctgaccagccgtggaagccagcagtatcgggccctcactgtacctgaactcacccagcaggtctttgatgccaagaacatgatggctgcctgtgacccccgccatggccgttacctcactgtggctgctgtcttccgtgggcggatgtccatgaaggaggtagatgagcagatgctcaacgtgcaaaacaagaatagtagctactttgtggaatggatccccaacaatgtcaagaccgctgtctgcgatatcccgccccgtggcctcaagatggcagtcaccttcattggaaatagcacagccatccaggagcttttcaagcgcatctcagagcagttcacagccatgttccggcgcaaagccttcctccactggtacacaggtgaaggcatggacgagatggagttcaccgaagctgagagcaacatgaacgaccttgtctctgagtatcagcagtaccaggatgccaccgcagaagaagaagaggatttcggtgaggaggctgaagaggaggcttaaggcagagtaccatcaccttaggcttctccattccctcttcctcagctgcccctatcctctccctcagaatttgcattctctgcctcttatttttttttcccttttttttggggcgggggggtcctagaacagtgcctggcacgtaataggcgctcaataaatacttgttgtttgttgaatgtctcctctcttccactctgggaaacctagatttctgctgttctgggtcaccctgtgttttcttttggtgtccattttcccgtttgtgcagttgatatttccctttgttttttaaggtgattcactgagaagctgggtctcattagatcccatttagaacatgtgctgaaaacatcgccaccatcctaagcccatgtggtagcccaggggaaaggaaaccaagctacctcatagcagtagaggtacatatcgagaaggtagggttttctattctagagcagttttagagagggaaatccaggctcttgaagtccaaatccaggaatcttcctgctctcagcttcaggggagatgttgacagtattgtctatttttagtcttcttccaagctctgtcctgagctgtttcttttgaggggtctgtgccactttgttgagtgggatccttccctcctacataaactgcttcacgtgttcgatttcttccttttcccaggggaaagagggactggccttgatccctaaagtctggaaaggccccctcccactccccactttttcttaacaaaactccagctctactgtgtacatatagaaaagtgtgtattgccacctaaatcatttgagtcattcttccagaggggacaaggagaccctccaccttttggcaacacctcagctcttccttctgctattccctttccccacacacccttgatttttgtcctgtcctacatttcaaatttctactttgtgttgaacttgctttttttcatattgaaaagataccattgccccaaaagccaaaaataaaaaaactgaaaaaaagttgcgagatgtgtgctcatttagggaaagattgccattggacaacctgaggctcaagttcagctacgcttatactctgctcttaataaactgatgagaatatccttgtacttaaccttatcctggtagaactatttcaccatcctcactaccagtctcaataactaggataggcatagactcctacaggattgacagaaatgggaactgagatgaatgttgaatagtgcgtaagtggctcccagatgaatcgcctcttgggaacttgtgtagaaatgcagatcaccaggcctacccagatgtactgaaccagaaaccagctgactagtaatctgtttagcagtactccaggagaatcttgtgaatgcagagttgaacgctattattgcactactttcagtgcacagcacatccaggattcatttgagttatgggtcttgcttttttctcttacaccttggcaattttctcatttaactccagggaaagataaagataactagtgagggatgctactccatggtcctattctaaagtactgtttcaccaaataaatatacttttctaaggcacaaaataagtcagctaccctggaaatttaagtccatgtaattttccttccaattaataaagggaactagtgcagttctcccaatttcttccattttagcatgttttgcgtattaccaacttttgccaaagaaaattgtatgacgttaactacgtgttaacttgcttttctcccattctaaaaagtgttgaatgaagggaagatgctacgttccagtattaactttgaatcagttctgctttattaagttaattattaatcagtatcagtactttgtaacagcaactcatttgataaagttgagaacctccaggcgatccctcagttttggtcaggaaaattctagaccataaatgtatacagtccagttagaaagttaaattgcagggtgcggggtgagtaggataatcagaaggctggcatgaaacccgtgggggactgggtagtcttagcagtgtggggctcggaagaagagcaacccctcctctccaaggcaaggcacaagctatttggcaaggagatgaggggtggaaccccattgtcaagggtgtgctcagagaagccagttgtgcatgcagtatggggaccattctggcaaccatgaagcaaggcatcggcaaaggttgagggctcaagctgttcgcagaggcttgtggttaacctggtaaaaagaccacagtgatgacacgggaaccatgtaccctgttctcccagctccccatttggatgaaagctacagaaaggacacgtatttccaggaagcatctaagttttttctgccgccctaccttaacctcttgtcaagcagtcataaggagccatgtacagcaccaaatcactgcaaaggagtggagagggccaaagccctgctaaagtagactctccttggctcctaatctcattcagtgcattcagtgccagcctcaagaaggctccaaggaacccagcttgaaggtcactgctacagtctattgttttcacttaaatatctttctaagaacttctatatttgagagaatgtatgcaaggtgggggggggttgtgaggaaggaacagaaagggaagggagtaggacaagcagactgcactgagcactgggcccaatgcaggccaataccaggaccctgagatcatgtcctgagctgtaaccaagagccagatgacccacccaggtgcccctatgtaagatagacaggtagatatatatattttaagcactctcatgtatagtacttaactatgtgtcaggcactgtcctaaacactgccaattttactcatttaatccctgtaacaattcgacagtaaatcctattattaacctgattttaaggtgaggaaagagatacagagaagtagctaacttgtgtaaggtcacagctagcatgcactggggccaggattcacaccaaaacagtatgattccagagactgctctgacttttatcataatctataggtgaataaagaggcatcaagaaaagcagtgatgggcagccctggtggcgcagcggtttagcgcacctgcagcctggggcatggtcctggagacccgggatcgagtcccacatcaggctccctgcatggagcctgcttctccctctgcctctgcctctctctctccccctctccgtgtgtgtctcacattaataaataaataaaattaaaaaaaagaaagaaaagcagtgatatgccttggaattaactgttaataggctgcaaccagttctgtgtactagtgcaaccataggctctagaaggcagtcagcctgggtttgaagtctagctttaccagctgtatgtcaggggcaaaattccttaatatattggaagttgtttctctactttgtaaaatactatatacccaaaggatggtttgattaaaacaacaacaacataccattggtgtagaggcttagcatggcatctagcatatagaaagcaaaactatcagtggcccccccaaccctccttgctggcctagtgctggcctgctgcatcacatgcccaagaacccagaaattcacagaaaatccacaccacccaccctagagaccctcacctgggagatgctgacgcctgtgagtctctccacactctctggcaggcggctcaggatgtccagtacttctccggtcactttggccgcccccatggccccacctccactggacactagtgtgatcttattggctgaggtcaagggaccactgatctcctctgccacctggtaggtgaaagatacccactcaacacctgtagtctgaccacacccctcctaaattgctttacgctgggcttcaagatcattgatcatcttcactttgtaaggattatctttctttactttggtcactgggttctaattcctacccctcgtttatggtcccctagtctgttctccccaagcccctcatttccccccaccctacactccctggttctgttcctctcctggtgcccacacaacctccagacctggggcagcttctccagcagcatgtccagctgagcagcctcctggtacagctggaatgcttctgccttcttggccatctgctcggcctcggcccgggctcgagccccgatggcaaaggcctcagcctccccacgcatctgagaagggaaagggagactgtggtgctgatggctgtagttaaggacaagaaacccagctcaagcagcaacttccattccctctgcaagccagcaagagccacctcttcactcaccctcaccgactccgcttctgcctcagcctgcataattagctgggacctgtgcacagaaaggaagaggagggaggggctgaggaagggcaaaaggcaggccctgctggagagacagaggcttctgtaacctgagttccataggagttcaggtagtgagggcctccactcttcacctggggggagccagatgagaaaggagcaggatagggcctgggagcgggtgtttacttctctgcttcagcgaggcgctccagcttgtagcgctcagcttccgctggcttccgaactcgggcctccagctccttctctcgccgggcgatctcctgttcctgcactgccacctgctgggcccgctccaccacctgcacctgtacccgctgttcctcgatctgctgcttagttttggccacctgggaaggagcaatgctcaacctcagggctgaagagcaagttcccaggaaccacagagaaaagccagggcaagggctccagggtgagatataaaaacagagtaaggggcagcccgcgtggctcagcggtttagcgccgccttcagcccagggcctgatcctggggtcccgggatcgagtcccacgtcaggctctcagcatggagcctgcttctccctctgcctgtgtctctgcctctctctctctctctctctctctctgtgtgtgtgtgtatgtgttgtgtgtctcatgaataaataaataaaatcttaaaaaaaaaaaaaaaaacagagtaaggacatgaagtcagtccctggtgggttcagccagcccagtggagtccatttcccatatggatcccagttgtggcttgagggatggcctgatcctcctcagaggtatcttccaggcagcctgaccatcaaaagctggctagggctggaatccagtccctgttctccctcaggccaggctaagtgtccctcttgttgagctcccgtattagtctatttctccacagcgtccctctctagagtctgagaacctgcagggctctgatgtgcggtggcatcttccacctccagtcattcaaatccacccacttctctccatatgagctgctgtaaccgtcttgtaagccaccaccaaactcaccctccctgcaatagcttcctactggctttggtggtggtggggcatgtatatatctcttttatcttttgtatatgatacaaactcaaaaaaaatggacaatgagaatcaaggtttcctctacttatttcctcaaactaccttgttcctttccccagaggcaagcattgtgaccagcttcttgtgtcgtcttcttccagggagattctaagcatttacaagactgtacatataggattcctctttttaggcagatttcattttcttattcctgtacagagatcggaaggctcttgccaagattttggtgaggagaggcaccagtagaggaacatgcttctttcctgtcccactgctccagctcagccatgtaccatcatccctgtgggtcttatcaatagcagatatgatgcccctgcctttactgcactcatctgttcacccagaggaaaggtgcttctggatatggcaccctgtgctgtctttgaccctaaatttgcaaaccagttccaaactgagctacttgctctctaccccagtgtgcaggatctctctctatattggagcccctcctgcctttgtttaggcatcctttttgatgaaataacccccaggagcttccttggaagaagtatatgggcaatacattttttgagatcttgcttttctgagattgttattctacctttctacttgaatgacaatgagattgagtacaggttagaattaattttctatcagcatttttgaaggcactgctccatggtcttctagcttcttgagaaatctgaagtcattttgatgcttggccctgtgcaatctgttctctctctctggaagcttttatatcctttctctgttctccatgttctgaaatttcatagtgtagttgtttttcattcattgtattgtgcattgaaacagtccaatgtagaaagtatcaatctagaaagtcatacctttcagaacaaacattaaaaaaattttttccattgattttcctaccattttctttgttctgttcatactttatgattaataatctgtagactaggattaataaatttattaaagtcggaatttatttttttattttattttttattttttttaatttttatttatttatgatagtcacacagagagagggagagagaggcagagacacaggcagagggagaagcaggctccatgcaccgggagcccgacgtgggactcgatcccgggtctccaggatcgtgccctgggccaaaggcaggcgccaaaccgctgcgccacccagggatcccaaaatcggaatttattagaattagatgagtaaatctgtagattcattataatttctttcaatatgatttgcccctctcatttctgtcatcttactgatttctaagaactctttttttgttttctgttttatgctctgattttctggatgtgaattcttctgtcactgaggacatttaaaaaaattttaagctttcttctccctgcataacctccaaattgctttgctgtttgtggttccagtctcggactttaacattgcagtattccctcatatatcaggtaatcttcgatggcctgctcacagtgaaggaggtctaaaacactgaaacccagcatgtgggtgaggcttcattctagagtgatctggacaagtcatctgctgaagaacctatgattcaggatctttggattggttgtgttccccagcacagtcttctgatgacttctttggaagatggagggtcttgggcccaaatggggtaaaggagttaggggagactgtcagcatttagcattcaatggtcacattgtgcccgtcactgataaaatgattatggccttatcgattactggcttcgtcgattacaatggctttctggcttccaaaatgataccatgctttctgttcatcctgatgctattctctccatctgttttcgccttcttcctcttttctgaaaatcactctgtggtttcagtgaggttttagagagggagtgcaatgaactgtatttatttaatccatcatctttgaaaaagcttccaacttatcttcctgcatcctctcttgtcttctgaccatcaattctccacacaacagtcagactgatcctcgtaaaaatgtaaattagaccatggcacctccctgcttaaagttctccaatagcattccactgggctctgaattcccttctaagtctccaacaggggcacttgaaccctatgacctggccctgcctgccttgccatctcactcacagcataccagccccaccagatcagaatcctcctctctgttcttgggatacatcaacctctttcgtatctcagggcctttgcagacggtggtcctctgtctagccacatatggctatttatatttaaaattaattaaaataagtaaaatttaaaattctgttcctcacatttcactagccacagttccacaagccacatttcaagcactcaacatcaatgcacaaatttacagcatttccatcatcacagaaaattctatttgaatagcaatggcctagaatgctattggcccacaactctacattgctggctccttctcatcttccagtttatctcataaatcacttcctcactgaagctttcttagatcagccccaacctaatatagtatctctccactgttttttgcatcactctctatatttccttcacagcacttacacaagataattagaacctatgaaagttatttacttgctttattagttatttcctgtgttaaaatgtaagctccatgagggcaggaatcttttctgcttctttctttttttttttttttaagattttatttatttattcatagacacagagagagagaggcagagacacaggcagagggagaagcaggctccatgcagggagcccgatgtgggactcgatcctgggtctccaggatcacaccctaggctgcaggcggcgccaaaccgctgcgccaccagggctgcccatcttttctgtttcattcatgcttatatcctcacttctaaaacaatgcctgaatgggtgacgggcactgaggggggcacttgacgggatgagcactgggtgttattttgtatgttggcaaattgaacacaataaaaaataaattataaaaaaataaaaataaaacaatgcctggtacatagtaagcacttaatagctatttgttgaatgagtccttatttcccaagcaaccagcacaaagtctggcacaaaataaagaactggtataactggaacagagccaaaaccagcccaatcctttaatttgcagaggaggaaagccatatttaggttaaggaccacacaagctaatttctgctatgttaatgcttctcaaactccaatgtgtacatgaatcccctagagattttgttaaaatacagattctaagggcacctggctggctcagtcggtagagcacgcaactcttgatcttagggtcatgcattcaacccccatgttgggtgtggagcctactttaaaaaaaaaaatgcagactctgattaagttagtataactggagcttcagattttgtatctaacaagctccacaatgatgctgatgctgttggaaggcagaccacattgaggaaaaagtgctatgccacactcaatgacctgtcaaaccaccaggaatttaacatcataactagagatgctttgtacttcattatcctttcagcctataccaactcttggcaaaaacaaatctcacgctattgctatcctttgggtaaaagtcttaacgtatcgttgattctcattattcatggtggatctgctccataaagtagccacaaataccgcactaacaaacacttattctgttgttagggaaaatatacggttaggttcctatgtgcccctgttcacaacatttcgtcaacagatcagtattatgtccttgctttatatgtgtttctgattaaagataccttatgcaacatacatggttaattcattaacaatgaagtcattgccaacagtactgtaacccatgcctgaaagaagcatgtaatttctttataaggcatatcacagcctctttgcacttaggaacacttaatgctttagcgggatgcttgggggtcattttaaacagcaaaatcaccaacaaagtacaaaaatgcaaaaaaatgtagcagtcactatacggtgaaaatgacagtgtttacagtactgacactgtttacactacgagaactgcaacacgaaggcagaacatctcgttcaccttcaactgcacatcaggcaactcagatttttcaatgctctgtgcatgtccacaaatgatcacaaaggtgccacaagtactgtttctggggttaccagtaaattttagtgagtaggcaaattctcaaatacagaatctgtaaacaatgaggactgtccatgcctcctcgcaatatcaagggctgcccatatcttactttgcagggttcaaagcccaagtccccatttccaagtccccaaatggctgctgtgagctcatgggaaatcagaaaaaggtgccccttcccctaggtggatgcggcaccattcacctatgccggaatgcagagcatggtgaacagagcaccagctagaccttagctctgctttccccctcatccaggggcccttgcccagtctgcccaaacatacgatcccatcctactgaccatgtcccttcttggcctctgcttttcaaccgaaatgcttaggtctttcaaatcttcctcatatggagaagttgggtcagaaatgtagagccagaataaagggattagagttagaacctgggaaagtgtggagggctaaaatggagggcttgagaggaaataactgcccagtgtgagaggtctgacctgaagctgataggccaggtcagcctgggctcggcgggtgttgacctcgatgtcatatgcagccttctttagctcatagtctctctgcgccttggccatctcaatctcactcaggtactgagcagacaccttttcttgcttagctttggcttcctgtccacacagagatcagggaggaagttagagtagggagaggaaggccccaaggcagagagccaactcctcaccaggctcccctgcccatggcctcatctctttcctctgccaaccccgctctctgagtcctcactcagtcgtgccccttccatcccctctcccactgcatgcccaagaagcccatggtgaccaagtgagccctcaaatgggatccagctcacccggatcccagcgtctcttttggcttctgcttccccaatgcgagcatctttttggacttgagctgttctagctttccctaaggagtgcaaatagtcctgaggaagagaagcagcaatcagaatcctcaggagggcttaagagataggagcagggaactggagaggatcagccccacctaagtttacctgatcatcatgaatgtccttcagggtgtagctaaccacactgatgcccatgttgaccaggtctgaggaggccaccttgaaaacttgctctgagaacttctgcctgtccttatagatttcctagggtaacagaatggtaggaaggaggaactgaggctctcagtcttctggctactgtttcccacagactagctgggttcttcagggcatctctcccagatctttccctgccctcaagcccacctccacagtcatgtgggccatgatagccctctggtggccctccagagtctccagtgcaatgtgggcaatctcagcctccgttttccccaggaacatctggcaggcagctgccaacatctccttgttctgcccctggattttcacctgtaaccagagcagggatagggaaagtgtggtgaaggcctcctgaagccaagtagcaagcaggaagagaatggaagagttaagtgccttgggagtccctggagaaggtgaaacttagcagagaaatttctttgtggccagaggttggggaggccatggtcagaagattcttaatgtctggggacaaagaaggggatgaaggaatggactttgggggaaaaggctctgaaagcctcacctgggcaatgccagtgactgagatggggaccccatggcgagtgtaaaccttttcactcttgacattgagggtcagtgtgttgagagagatcctacgggaaaaagaaggagtggacagtgaggaaaacaggaaagagagaaaactggggttccccttcctggttcttttctacctacctctggatttgctggatgcagggcaggacaaagacacgtcctccggccaccatgactggggggcttcggcagaaacctgcaaggtgagggggtagcagactgcagtggcaggagtagggctaagaaaacggaagactgaaaacgtggggtgggggttgatcccaaaagggaaatctgggaatcgaagaggaggcagtccaggccttgttaggtagcgctgggaatcacaagtggggtggcttgcagccatggggaggtcgcgggagggtggtgtgtggacagaaggcctggacctgggagctggtggggagaagggtacggggcagaggccggaccacagggcttgggggcactggctgggaagagagcattacttaccagagaccaccatggcctcatttgggccacaggtgaaaaacatggctcaggctgaagctggaggaaaagggagagaaagcctttgcgggcggggtctgggggagagcaaattctctttccgtcagtctagccccatccgcagccgccagggcccggtcccttccgaacccatgggtccactaaggcatttcccggtgaagtcccaccgatcgccagggctctcccccgccggctcacggccacttcctgctttcggggaggacggtttctcgatcctcgggtaaagcgctcctgcgcctagaggccccagcccgtgcgccgccctccctggccctccgcagcccgattacctctcggcgccccacccgcctccccgcacgcaggccggggcgagcagcggccggggaacggcggggaacggcggggaacggcctccagccagcgcggaaggcgcccgcgcccctcccggccccaccctgcggcagccgcaggcccgcgcccaggcccgcgcccctcccccggcggccgccctccgccccgcccccttcccggcaggccgcgcccgccccggccccgccgccctcccccagccgggagctccgccccgggacgcgggacgtgacctccgcgggcccggcagccgggcccggaggttgcctcatttcgggtttgccccgcgggacctgggaggccgcccccgggtgcacccggccgcccggggcgcagcgcctgctggggacgcggcccccgcccctcccgctcgccgctggcgccgggaggcggggactagtggggagtcgccgcttgcaaaatacactcggaggactacggacaagaagtcgactttattggtgttcacggaacatactggacggccgcgcagccgccccctggccgcccgccgacctccgacaccccagccacccactgggggcaactttgagaagaccgaaggccaaggacctcaccccagtggtccgccgaagcctcacacggcagatccaaggggccgaaaccccggaggacgaacaccagcccctaagcccacgtgccagcggcgtcctcgactccgcctgggcgctccccggccctccgggtgcgcttcagccctgcgcgcccgcctccacctctcccacgaagctcagcaaataccgagagttctgcgcttacagcacgggggcacatcgcgctcccctgcataagttaaaataaatattacagacacccctccatcacctagggggacattcataaatacatataaatattaattaggatcagtgagaaataaattaatgacgctcttccgcaccgggcctggccccggagggccggtgctcggctcgtctccggcgcgggctggcgtctctgctgacgtgctctccgctcaagttgcctcgcaagtcccagtttgggatacgctctcgcgcaccaggtacacctggtgtctatttgggttttccggttctttcggggggaggtggggagctcgcgttagaaggcggccgggtgttgctgtaggaaagtgctaaggtccagagcgtagtccgagggcgcagaggtcaggttgaggggctcgaggaccgggggcgccggggagggcgcagggggtgcgccgctggggacgtccccccgggccaggggcgccggcacaccctcctcggccagcagaatctggcagaagatgacggcgagcaggaggaacaggagccttttggccgggttcggatcctcggccgggagcgggcgccggacctgggagacaagcaaggggacaggttggcgggaccccgcgtcggccgcccccgcccgccgccggctcccgcggtacccaccactcgcgggtagaggaccctacggctgcgcttccgatgcccgcgggacgcgccggggcgcgcggcaggggccaccgcaggctccgggagaggatcgaaggtgaagatctcgggaccagagccccgccggggcccggggctggtggacgagacggaggtcggagcccgcgggacggtcatggtggggagggagctgcgggagcgacacatcgcgcggcgagcggagcggaaggccggatgcggacccgcgccggtgccgagcgaattaagggcgcctcagacctgggcgggtcctcctcggctcctcccgccgccgggagggatggccagagcaagctggaaattccgacggttaagcaaagagagggggtggagacttggtctgtgcacccctaggcgcccaagtgtgtgtgtgttgggagtgtgggggttgggagtggggtgggtgagatcccgggctgcaggcacatgtcagggcatgtggcaactaggcagggaccaccggatagcttaggagatggctgggccaccggccccatctctggggaggcaggaggactgaccaatctggccacgctgggacgatagtcacccagcaaagtcaaggaattacagttacacacgcacatttatacacttgtaggtacacacagaaaacacacacacacacacacacctcaagaggaaagtagttacagaaatagccaagaagacagagaaatgaacacattagtacacgcagacaccatgctgctgacctcagcacacatgttgtaggggcaaaaagaacgtcccttctttccttctagcttctttggctggtctaataattaaattgatacaagatagagtaacaggagaaaagcaggtttaattacatacttcgggagcctgggaagccatgagattcaaaggcaataaggcaattggggttacatgctatcttgagctaaggaatggaacaggagcctggggcttcaaaggggaggagggcaattcacaggaagataagagaagatgctccgaggcagatgtttgttctgtcctgataaaaagttatctgtggtaatagctgtcttcatggttcaggtgcctatctaaattattattattgtttttttaagatttatttattcattcattcagagagagtgaagagagagggagagacacaggcagagggagaagcaggaagcccgatgtaggactggatcccaggtctccaggatcacaccccaggctaaaccactgtgccaccggggctgccccctatctaaattcttttaggcagttaagggagagaggtaaaaagctcttcttgtgtgctgggtgttgattgccgtcagcacattttggggtggcctggtctgttcccctttaacatgcacataacacatgtgcgtgcgggcacacacatacacagagcaaaggggcagagacttcacaggggcaacacaacagagctactacccacatagatgtatgcagaaatgctcacgtagggaaggtgctacaaaacaaaggcaagaggtaagcaaccacccagatttgtcccttgccatcagatttgtcccttgttattttttaacacaatttatatgaaaagaacattttaaactgtgagatgttatttaagtgtggtagtagtactaagagagaattgcatattttcataactgccttagagacagctcctcatggacacagtttaacatcctttactggagccaggcaccccgttaaaggtcctgttgaaagtactgaggttggtttgaaagtactgaggttggtttcagtgtatgggctggtgagtagggcaagccagattcagcaggcggctcaccgtatgcatgcagaggggacccggaccccggacctggagaactctctggaaggcctttaaaaaaaaaaagattttatttatttattcatgagagacacagaaagagagaggcagagacagaagcaggctccgtgcagggagcccgatgcaggactcgatcctggttctccaggatcacgccctgggctgaaggcagacgtgcttaaccagagacaccccaggcgtccctctctggagggtcttaagacaactgaacactaagtgcaaaaaaggaggagggacccaaaacaacgaatgttcacgtctgtctagtcaataaggcgagggttcatggaagagtggcatttgagatgactttgaacagtgggtgggataccacaaaatcagatgtggaagatgactgtgaggaagagaatgggatcagcaaaagccctgcactggaaaagtacaggatgtgtttggggaattgctagaaaaacaatcttacagtaagtttcctgtaaaggagtagtgggaagtaatgattctggaaaggagggcagagtgtggagagctgagctgcgaggccagactagatcctggattccgtggatcatgagagattataaaaggaaggcagttcaagctgggaactaaatcggatgacaagtatgccctgcatggggagacactgtaataggggatcagaggctactggaaatgttcaggtggatggtaacaagggctggagatgggccatggcagagggagccaagaggaggagtggcaggaagcaactttcctagcctaagaccacagggatttagtaatgagatgggaatcattagaatcagggagcatggggcagcctgggtggctcagcagtttagtgccgccttcagtccagggcgtgattctggagacctggaatttagtcccacgtcgggcttcctgcatggagcctgcttctccctctgactgtgtttctgcctctctctctctctctctctctctctctcataaataaataaaatacatacatacatacatacatacatacatacataaataaataaataaataaataaataaaatcttaaaaaaaagaatcagagagcatggagagtttggggtgctgactgtgagagcatgaaggcatcaaggctgactccagggatttgaaatgcatctggctcaggtctttactccagatcgtattatgtctggtgtacacagagtacacatatgatctcttccaccacaggctgtgtcacacatgtgtctgtgccctccataaagcccagcacactgccttacatgcagtagttgctccacagtcttgttaaaccaaggctgaaaatacagaactatacacacacatatagtattcaccccctggctgtgtcaccccaagctttgagacatggatatactctttcaaaccccacatacaaatttacagtatctttttaaaatttaatttacagtatattaagaacagctgtgacaattcttacacacacatcaaacaaggaacacctaatggcatttctcaaccaaggatgtgtgggatgcaaacagggacattcccacgattgggcttcaattgatacattattgctgtatatacaatcgcttcctgggcctctatgtcgcttgattttacacctattactactgtctaaactcatgtgttaccacacttcttcctgaccagcataaaacacacctccacagagacatgtcccttccctatacgtgccttccacacctgccatcattgtttttacacccaagcagtgagcctgcacctacttacacccttattccagggcaagctgtacactacacaatgattagcatgaatacatgaactacttacatgtactgatggcccacatacaggctcacacagatataaatcaggggtgagagagatggtgatgatgggagaagatggcttgggggggcacccaaggtcaggaatgcataacttgtttatgatggaaaatttctctagggcacttggcaggggaggggaaatgaagtgggatgtcaggatcttatttcaccactacctcccacatctggaatcagggcctccagctgggcctagttatcttcactgtcctcctggcacagagagacctttctttgtggcaagaccagaatgggacagagaagaaccagaaatcttagactgctcatcattccttctcaaccaatgtcatccctgttcctgctaccctcagagagccaaggctctgcattaccctctccttgccatgcaggaagctagggaaaagttgagagtgaatcattaagccaatgaaaggttgtggggggggggggagggtagagctggaggatgagttaaggccaggaaggaccagggctgagaccagcagctggaccagttctcactgccctaatcctggggagacaggcctttggcccctttccatttcactgctctcactgttcctcatttcctctccatcttccccaagattgccaatgctccttcctttccctcatttgacctgtgatcttgacctcccaccaacgtccttcttagccccttgttcatgttcttagaactcttgctacaatggggcatcattttatgtatttttatgtatgttgttgttttgtgtccccccactggaatataatctccataaataaacaggaccacatccactctttttctcatgatatcttggtagtatctccagtacttggcctttcacctagtaggggattaatgtgtatccttagaaacatcccctctgaggagctacccctcagccttggaagtgtctgtttacccagctgtgtcctttcagaggccccctcccgggttcaaatgcttcctcttcaaagatgggatgcgggatgctcaaccatggcacagaaggatcttccattaaattgagaataactgtgcaggtgatggatggcaaagcactggccctcactccttggcaaagaagtgaatcatgcctgatggcccacctagataactgctacattgcagaccaaagtctagaatgggggatgagggtaatgggaacaagacagatatttggaagtgagaacatttgaaaaggggaaacagaggtctggagtcagggtgctcaagaaatggaaactaaaacctcagctatacccggcatttggtagatactcagtaactttgttgacttgagatggatttgtgatagaaaggaggcatggtgtaacaaaaaaagcatgttaggatctggtggtgttagaggaaactggctttaaattccagctctggggatccctgggtggcgcagcggtttggtgcctgcctttggcccagggcgcaatcctggagacccgggatcgaatcccacatcgggctcccagtgcatggagcctgcttctccctctgcctgtgtctctgcctctctctctctctgtgactatcataaataaataaaaattaaaaaaaataaaaaaaaattctagctctgctactattaactacgtgatactgggccagctacttcgtctctgaaaatgtctcctctattgaaaagtgggcatattggctttaaggttattgtgaagattaaggataccaaggggactgctcctaggcacttccgtgagggccattattatgattatacgaagaggggctcctttggagatgaaatgggcagcagtgagctaacccaggagtaggtgaccaggatgacaaatagccttcaagtgctaagatcatcaggagatagactttctctttctgttttcatccctccttccttccctctccaactcaggcaggttttgtggcttttgcttttctccaaagaagcagagacttctgcattcctagttcttgttgagccaaagtgactgattttaaacacccttccctagaatgcgcacacattctagctggaacaattcttgccagaggcatgtagggtagggtggggtggtgagttcttggcagcaagttaatgaataaccatcaaagacacccattaggaccttaggagggtcaagatcagtccctggcagtttcccctgatgcaaaaggaaggcaagagtgcctggagcaccaacgcaaggtcacaagaaaacagtatcccctgccccaggatgtagtttggcccgtcctagctcagcccaactcaaccagaattccctggaggctgctgggagagatgggaagctgggaaaggatgcgatgtgcctgttttgccaacacaggcttcccagggcctggttttgtagctcctccctttggcctctcagtttcctaccagataataactccatgagagcaggattttatcggtcttgttcactgctctatattcagtgcctaaaactgtgcttatccatcactacaggctacttgaaaaggctagaaatgtagggccctttaattcattaatgttacagagctgttcatgtgggaagcagcttgtatctcactgtagaacgctcctacatcagcattagagggtatgattgtgatttaactcaaagcataatatggacggtaggggaggagcaagtgaaacaaataaagtatttccccctttgtcctgccttttcagacaccctgcatttactggatgagttgatctgtaaagtcaagtgcttagattaaaggctctttgatgtctttccctcctctgtaaccccatgattcagcaatgtctcccatgggttctcaaaagttaaactaagccttccttctacttccaacagtactgccttttctttgaaggttggaagaggcctctgggggcgggatgagtgttcctgaccagcctgtctccagctgctggcccatctccagctgctggcctgcctggtagtatcgcgtgttagcactaggcttgactggctgccagggggtgagccctggagtggttttctgggaagggtaggtgcctgtgtgactcagaaccaagttagggaaaaaacatgctcactcgatctctggcaccctcctgcctggcctggctttgatcatgagctcatgaaagaggaagctggaccaggcagacagtagccctgccttccctcatgttttctctctatggcctcacagattccctggagtgtctgggcctcatgttgtcatcatcctggctctggggcggccctgacccttctatgagagtctcccttcccagcctgatcaggtttttccccaggttggaaatcccacccagcacaaaaggggattgctcaccgggggaggctgaaaatgctgtgtcccttgggtctgttgatttgtaccgtgaaccatgactgtttaggtttgctcctgtaaccattgtatggtggttacaggtctgaaatagaccaagtggtgctaatcctgggagcctgaactaaggggttgcttgggagctagggtttcccagttcaggaagacatacagggtggtcccaaagtactgggaagctgagctaccctcagggctgctttatactgagacttatctaatacttttggcatgcagaacagtccactatcagagaggcacattttatttcagtgtattttatgacaaggatgggccacaaagaaccttcctaactcttctccccacaatccatcttctttgtcttccccagagctttcttgttaaaagataagcttgaccaagtcaatgtctgcctagcaacttctgtgcttccagcctttcatgggtctatactggcttcccaacctgaatccaggctttctctctcaactctcccagtgctttcctgctgtcctgagatacagcactacatctggttttgtgctttttctcacatgtgccaaactcttacgtattggacccttcacatatgtggtttcttcttctttttcctctccattctcctgagaaaacctcaagtttgaggccaaactcattttcctgagaaaatattagaaaactaatattacatgccctgactcctgcatgtaatattagtccatctactttgtacctcttgaggcatcaaacacagttgatcatttttattttttaatgtatttatttgagagagaaagatagcactagcgggagagggagaatctcaaacagattcccttgctgagctcagagcccaatgcaacacagtgcttgatttcacagccctgagatgatgacctgggctgaaatcaagaattggtcgtttaactgacaaagccacccaggtgtcctgtctgttgaactttctaattgcctggacctgccattgccctttttggtcgccatcaccagacattgtggtgcagccattttgatgccgggaacctttcgatgaggcaaaaaaaggttattaaattatcagcatttaggcgtgcctctgtggctcagtcggttaagcatctgccttcggctcgggtcacaatccggagtcccaggatggagccctgtgtcaggctccctgcttggtagggagtctgcttctccctctccctctgctcctcccccaacacacacacacacacacacacacacacacacacacacacactctatctctaataaataaataaaattttttaaagaaattgtcagcacttaaaatcagaaaaaaatgcataaaccagatattttcaacctattcctatgggttgtgatcatcctgtttctgactcccactctttcacagagaatttgctagtgcttagtgatattgtctttattaaaagccaggcacgttgaagtatagtttacgtatagtaaaatgcatcctttatagaagtacagtgtgatgagttttgacaaactcatacattgtacaaatgtcactacaatcatgatacagaatatttccattgcctcacaaaattccttatgcccctttgtggtcagtaccctctctctagtctcagcccctggcaaccactaatctgatattcatttctgtagttttgccttttctaaaatgtcatataaataaaactatgctaggcactcttttgtgtctgaattattttgctcagtataatatctctgtgattcacccatgttcttgcatgaatcaagatctttccttttgatttctgaattgtattccattgcataaatatactacatttggctactcattcactgttggtggacatttgtgtttttttcttctttctggctattatgactaaagctactatgaatattttatacaaatctttttgtggacatgtgttcttatttttcttgtgctcttatattttctctgtaagagtagtataattaggtatggatttaactttataagacattgccatgctgtttttcagagtggtttatcattttattctttgacaggactgtttaaggaagctacctcaaagcatctctgttgctggggcgctggttggctcagttggtagagcatccaactcttgatctcagggtggtgagttcaaaccctactctgggctaagtatagcttacttaaaaagcaaaacaaacaaaaaaatccctgtctaccaaatctgccaagtgaaaatgatttcttcatcagagaacaggatctcaggttacctcaggggacagggatgggctggaatgcaactaactccttggttagcaacctatcccttaaagaactggcatgttctcgggatgctgcagtagtttcccttggaactgcagcagctccaagaacacaccttgcctgccccccagaccacctgtggcttggtatctgtctgcctcgctccccactcagtttctgctatatggctctgcacaggtcgcatggccccatgtaaagtaacttgagctcatactgccattaggcactgttctttctgactactatacataaatcaattcattaagccttcacaaaccctattattattattttaaaatttatgtatttatttatttgaggtgggtgggaaggggcagagggagaatgagaatcctgagcagattcccctatgagcgtggagctggacacaggactcaatctcacagccctgagatcacgacctgagccgaaattaagagtccaatgcttaactgactgagccacccaggtgcatccctactattattatttataccctcattttacagatgaggaaaatgagaggttcagtgaagcagctcactttcccaagacggcataaccataaagtagtaagagttagattggaactctggtctacctcattctgaaggccaacaatatggcatattggtcagagactggagtctggagctagtctacttgggttcaatttcatgttcaagtttgtatttataagcctccgaaaggagggctattataacatctgttttataagtgaaaagaggcattacacagcaggagaccagcaaggctggaattgacatgcaggaagtttggctccagagacagagcaaccaacctctatgttttcctgtctctcaacaatcctcattatttatgttattatttgttttttttgtttaacaattattttgaactttttttttacgatttatttatttatttgtgagagagagagagagagagagagagaggcagagacataggcaggctccatgccaggagcctgacgcgggactcgatcctgggactccaggattgcgccctgggccaaaggcaggtgctaaaccgctgagccacccagggatcctatttatgttattatttggatcgctgccctggttcttagtgtctttgggattttatactgtcctgacatttgcgtccttgcttgtgtcttactttcaaactctgaatgtgttgtgtactcggtccccaggatagaataaccttggtgggcagccctcttggctatattgctggcctcttaccagcccttgagaactgcttctaggtcaagcaaggttccaatccagcaggtgaagtcagggaggtaagttatctgcagggtgacccatgtctaagaaatcttctccagcaacgtatctcaaaaggataaggacttaagatcacctcaaaggattatttgcttccctaaataaattttgagctgtttcagtggagacaatcaattgaacccactgtcagggcttactactgtgcccgacacgtattaggtactcaacaggttttgcttgaatgatgaatgaatgaatgaatgaatgaatgaatgaataaagagaccaacattcttagtttagctctgtgctgttccatagggtagcatgtgactatttaaattttaattaaagaaaatttaaaattccacttttcatttacatcaccacatttcaagtacacagtaaccacatgtgactagtggttatcctattggaaagagcagatatagcacagaaagttctattggaggggcagcccgggtggctcagcagtttagtgccgccttcggcccagggcctgatcctggagacccggggatcgagccccacattgggttccctgcatggagcctgcttctccctctgcctgtgtctctgcctctctctctgtgtgtctcatgaataaataaataaaatcttaaaaaaaaaaaaaaacaggaaagtcctactggacaacactgggttagacgatgaggtgagagaaggaaaaatggtgcatagggaaaacatttatcacaggctgatggctctaccttgctttcaacacttttaaaacagcctagatcagtcctctctcattagattttgcatactgcccattcagaggtctaggaatcacttcagaaatctgttattaagaaacatatctcgggcaccctgggtggctcagtggtttagcaccaccttcagcccaggacatgatcctggagaccagggatggagtcccacgtcgggctccctgcatgaagcctgcttctccctctgcctgtgtctctgtctctctgtctctgtctctcatgaataaataaataaaaatctttaaaaaatatatgccttaacaaaaaagaaagaaagaaagaagaaagaaagaaagaaagaaagaaagaaagaaagaaagaaagaaagaaagaaagaaagaaagaaagaaaaaagaaagaaagatatctctgatcatatccatgacccaaacttctgagaaaaagaagacaggagattgaaggaggaactaaaaccacaatgttctgtcattggccacagggaactcacccatgcaggatgctttgtgcccattatctcacctcgtcattccaacagcctgtaggacacagatgggcagtgaagataactggccgaaagtcatgtacttgtgaaatgttggaagtgagtccacactcaaaacatcagtagattgactgacaaatgtgttccaactaagagcagcagaaggcagaaagatggataaaatatgcttcaggaagcttataacccagtgaagggaaaataagagaaacacacaatgactacctaaccgtacacacacacacacacacacacacgtatttatatataaatacgtttgtacactaatatgtatatattatatacattacatgtatgtgtagacacatacacacatgtatatacatacatacacacataatacatactaactaagatttgtttggtatgttagaacttacaagtacttttcctaagcaagtcactgtgatgaatgtcaaatgaatggaatgttgatacagaaagcaagcgttctaggaatttagagcacagtgagatcactgcagggtggggtgaggggggcaagttttgattgaggcacagaactagaaagaattctggacagtcctgcaaacctgaatacaacttctggcttccatgctacaaaccttcagattcttcattgcttctagtttttaatgagatgattataaattcgtttttctttccagaggataaaatgctgatggagtacttagtggtctgtgctttctttctgatcctccatctaaatgatcaacatattaaaaacaacaacaggggtgcctggggtggctcagtcagttaagtgtctacctttggctcagatcatgatcctgaagtcctggaactgagctgcattgggctcccttctcactggggagtctgcttctccctttgcccctcacttcactcatgctcactcttactttctctctctctcaagtaaataaaatcttaaaaaaaaatgcgacagggatccctgggtggcgcagtggtttggcgcctgcctttggcccagggcgcgatcctggagaccccggatcgaatcccacgtcaggctcccggtgcatggagcctgcttctccctctgcctatgtctctgcctctctctctctctctctctctatgtgactatcataaataaataaaattaaaaaaaatttaaaaaaaaaaatgcgacagcaacaaacctcccacacattttatgcaattctagaaacagaataactttgatactctacatgtaaacagatttgagttgcctttacttaattaccttatgataagcatccaatggtttagctccaacaccttacttaatactcagcgttatgtaatgacagttctgcccataattcttgcggtgtagaatgcataaaactccagccctatattctgactgagcttgcctcagttcttacataatcatagccacctccctattggtggtgatttagaaatatctttccaaagttctgtgcaccttgcctcagctacctgtaatttttcctaaagcttctgtctttcttcctttggatttcttcagtttcaagtcatagaaactcattatggctaatttaaacagaaaacttgagtgttggagggtattagatagctcacagaatcaaaggaaggctagagaaccaaccaggcttaggggacacagcaatgaaggtagctctaggggattcaatggcaggaatcaagtcttgccttgccacctgctgaaacaaatgaataaaaatcagatttttccatctctcccattcatgttcatcattccaagccccagtagagaaacctggttagcctagtttaggcaggagctagatgaaaaaaggacacctaacctgacagtcattatgaccacacagaggtaattccccaatgaatccagtgactgctgtcagaggaagggagagtgtgtgctgaatgatcaagccttcatatcctccataccccattttctcttcctgacctcaatttcctaccttttaaatttttccacaattgggataacccacatatctgcctaaggttatagaaaagatattttttaaaaatccatttgtggaaaaaataaaaaataaaaaataaaaaataaataaaaatccatttgtggggatccctgggtggctcagtggtttaatgcctttgttcagcccagggcgtgatcctggagtcccaggatcaagtcccacatcaggctccctgcatggagcctgcttctccctctgcctgtgtctctgcctctctctgtctctgtatctttcatgaataaataaataaaattgaaaaaaaaatccatttgtattggaattttccccaaaaggtgttaatggttggagaagtctggccttgcccctcagaagtttggtaggaggcttaaagaaggtaatgtaagaaaaatgcctattacagtgcctagcctgtagcaagctctgttaaacgtcattgccataccagcccttccccagtagtttgcaggagctggcttataccagctcacaagagctaatcattctatttttgggatttttgtgagccaattgacataatattggtagtttgaagttgaccttaataagaatatatacgccatggacattggaaatgttgcaaatgagggcttgccccataccctaccctgaaagtagttattaatcattaaccaatacatcaatgcatctacttctttcttcgcaaaatgtgaatagaaccatgaaggactgagcgccagttaggattagattcagctgtgagtaaaaacagtggcttacaatatataaattcattccctagattgaggtaggtcatttgggtttggctcaccatctaatttgttgcctcaccatcctcaatacatggcttttacttcgtgatctaacatggctatggtagaggccaagggccagctgccccagtttggcatgaacattattttgagttaaaagcaatcaaaacacagccaattaggagaagctcttcaactctcccttgttgcctgcttataccagagagagctctcttgtatcaaagagagctatttaacagagattcctctttactgaagaaacttatctgcaaaatagagagatctttgttttccaaatatttttcaccttccggttaatggtctttcactcctttgtatccttaaacactagctctctctcatataaatgtcatgttgcctcattgtctttggaatttcatgtctgtgtggattccctgtatgtatactattaaatttggttttctcctgttaatctttctcatgtcactttgattctttgtccagctagaaggaccttgaaggacagaggaaattcttcttccctaacactgctcaagctccacactacagccagtagggaagagaaagggaaacacactctcctttctattaaggccactgacagaagtaatgtgcaacatttccacttctatgaaataggttgaggtgaagtcacttaaccacatctagctgaaagggtggctagagcatgtttcccagatggaaactggaaagaaagagtgaatggatattgggaggcaactggccattcctcttgtcaccagctagaacccaggacttgacctttactgactgctggcttatactcataaaactttgtcccacatttttccttaagctcttttttccagcttctttctctcttttaaagattgatttatttatttttagagagagagagcaaaagagagagcgtgcatgtgcatggggggaggggcaggggaagagggacagagagaaacccaagtagcaaggagctcaatgtggggctcggtctcatgaccctgagatcatgacccaagccaaaactaagagtgggatgctcagttgactgtgccacccaggcgcccctccagtttatcacttaacttgggcaaatggaaagcaaaaccaactttcaagcaatagcaactgtcccatcaggacctcccactggcccagactacccaaaccagtttgagtttagcttctgggtcacatctgcacagttggatgatggagtgacctctaaaattaccttcaattacctttacctcattataatactaaaacctccacccaaggaagagcctcagtctcactcatacaatatacaatgcatgtataggcatatttccttaaggctcatgcatgaccttatgcctgcctttacattaaatgacaaggcttccctatctaaatattcaccctaaccataaataaaggagcccgtcacccttgctcagggagtcatatctttggaggctataccccatgatctccctacttgctgcaaataaagttttctgtgtgggacaacctggtgcagtttctgattcaccaaggagtgaattcacattagttctggttatactctcactaatgggcaggacttaggaaagtataaatgagaggggaaagtcatgctggtatagtagaaatgtgtgtggtttctggaactttgaaggagctggctggaatagaaacctagaatactgaaaatgagattaaataaacaagatggaagccagatctcagtgagagtccaggaaagaagaccaaaggatcttgatctggtaccatgaaaaagaggaggcattaatgttttgggtagggaagctgtacaatcagaggcatttaaaaaattttaatctggcacttacatgctagacatgttgaaggagggtggaaaaacaggaagcatcaggcagggtggaggggagacagatttcacaatccagctgtgaagtagaagtacatctgaggcatttgctagacaatgtgttcagattgatgtctggcctgatagggagtttcagggtagggtggccaagacacggcatttatagagtaaacataacaaacctcccttggtaggagtttttgattgggtcacttaaaagcagaacctggtgcgggaccaggagaaggagaatgatggaaacgggacggccaaagggaagagggcgagtaaaggtgtgggctgagcccactgggaggcttttggcacaaatggcaaaagggtgggctccagttacagacaagtgggctggtgctttgtagccctacaccaggcagtcattgactcaggtctgtccagagtatgtgtaagggaggaagactcggttcccctttggttccagggtaattcattgaccaaaaaaggaggacagctatgtgtggttattagaccacatgcttgtgagtgatgagtggaccagctgctaaaaaggatctgagtgaggcccaggcagcatccattgcagtgggcccattttgagagtgttggatttaaggtttgatatatgactagggggaaatgggagctacaagagaggagttcacagagaagaatggggctagctatgcagatcctggagtaagggactctggcacacagatggtagtttcaacaagaggaaacgagctctttgagggccatggatagagagagagaggagcaagcccttggaaaggaagttggctataccctagagggaaggtgggtaggagaagaggaatcaatgaataaaacaaggggtggctcagtcagctgaccatctgcctttggcttgggtcatgatcctgtggtcctgggatcaaatcctacatcaggctccctggttgaggagagactgtttctctgtcccctccctgcttgtgtgctctctctcagtctctctctctcaaatgaataaataaaatattttattatttttttaagattttatttatttattcatgggagacacagagaaagaggcagagacacaggcagagggagaagcaggcttcctgcagggagctggatgcgggactcgatcccaggaccccgggatcacgacctgtcagaggcagacactcaaccactgagctacccaggcgtccctaaataaaacctttttaaaaaaaatttttttttaatgattaaaacaaggcatagatcagcagaaaggttgttagtgcggtagttgaacttatcactggaagtcaagagaagaagacgttgaggaagaatgagtatggaaaaaaagttgagttgttttttgttagttcagatgttgttggtggccattgaggggacaatttcacagcagaactgaattagaaactacgtggcgagagctagtaatgctttccatatttaatgccattccattctggttctaaattcctccagggcacttcctgctccagttgatatgtgctcattcttgcttgtcctaaggttactctatgttctggttacctaatgttgcctcacagattaccccaagacttagtagcatgagacactctttgttacgttcatgagttctgtgggttaggaatttggatggagcccaatggggatggcttgtctctgtttcctgtggggggctgcagctggaatactcaaaacccgcggaccagagtcatctgcaggatttttttttttaatttttatttatttattcacgatagacagagagagagagagagaggcagagacacaggcagagggagaagcaggctccacaccaggagcctgacgtgggactcgatcccaggactccaagatcgtgccctgggccaaaggcaggagccaaaccgctgaaccacccagggatccccatctgcaggattttttgctcacaaatgtgaccgtggatgctgtctattggctggggggcctcagtttcacnnnnnnnnnnnnnnnnnnnnnnnnnnnnnnnnnnnnnnnnnnnnnnnnnnnnnnnnnnnnnnnnnnnnnnnnnnnnnnnnnnnnnnnnnnnnnnnnnnnnnnnnnnnnnnnnnnnnnnnnnnnnnnnnnnnnnnnnnnnnnnnnnnnnnnnnnnnnnnnnnnnnnnnnnnnnnnnnnnnnnnnnnnnnnnnnnnnnnnnnnnnnnnnnnnnnnnnnnnnnnnnnnnnnnnnnnnnnnnnnnnnnnnnnnnnnnnnnnnnnnnnnnnnnnnnnnnnnnnnnnnnnnnnnnnnnnnnnnnnnnnnnnnnnnnnnnnnnnnnnnnnnnnnnnnnnnnnnnnnnnnnnnnnnnnnnnnnnnnnnnnnnnnnnnnnnnnnnnnnnnnnnnnnnnnnnnnnnnnnnnnnnnnnnnnnnnnnnnnnnnnnnnnnnnnnnnnnnnnnnnnnnnnnnnnnnnnnnnnnnnnnnnnnnnnnnnnnnnnnnnnnnnnnnnnnnnnnnnnnnnnnnnnnnnnnnnnnnnnnnnnnnnnnnnnnnnnnnnnnnnnnnnnnnnnnnnnnnnnnnnnnnnnnnnnnnnnnnnnnnnnnnnnnnnnnnnnnnnnnnnnnnnnnnnnnnnnnnnnnnnnnnnnnnnnnnnnnnnnnnnnnnnnnnnnnnnnnnnnnnnnnnnnnnnnnnnnnnnnnnnnnnnnnnnnnnnnnnnnnnnnnnnnnnnnnnnnnnnnnnnnnnnnnnnnnnnnnnnnnnnnnnnnnnnnnnnnnnnnnnnnnnnnnnnnnnnnnnnnnnnnnnnnnnnnnnnnnnnnnnnnnnnnnnnnnnnnnnnnnnnnnnnnnnnnnnnnnnnnnnnnnnnnnnnnnnnnnnnnnnnnnnnnnnnnnnnnnnnnnnnnnnnnnnnnnnnnnnnnnnnnnnnnnnnnnnnnnnnnnnnnnnnnnnnnnnnnnnnnnnnnnnnnnnnnnnnnnnnnnnnnnnnnnnnnnnnnnnnnnnnnnnnnnnnnnnnnnnnnnnnnnnnnnnnnnnnnnnnnnnnnnnnnnnnnnnnnnnnnnnnnnnnnnnnnnnnnnnnnnnnnnnnnnnnnnnnnnnnnnnnnnnnnnnnnnnnnnnnnnnnnnnnnnnnccctgcttcctcatccctcacagcagctcagggtcaccacagagctatgaacagacacctcagccacttaccgactgactggtcttgcatttgacacacccatttaatgtgatgatttaatgtaattttgtatctctcttctcaggagagcaaagtccctcatgctgcgttcaacttcctggctggaagaccaggataaagttgcttttcatccctctgctagcaagagcaaggcagcacccatgtcaggagtgtgaggtgagtgggagagaccaaggagcatcaggtggagcaattagatggtgatctgatgtaactgggtggggagagcaggagggctagaagggaagtggctgaggcaattcctgtgggtctagctcagagaggggaggacagccaatttccgcccccttccccaactcacatcccaaccctaaacagcttcatagcctggaggtgggaggggggaactctggcaaaggatccagtgtgggtggcaggggtgcttatcatgatcaggagtgggtggggacagatcttaggacttgcatcaggtttcaattttccagaccctgtctatggcctgccacccttccacccaaactaatctttgactttatctctttagaaatgtcctcaggctagcagtttctcagagattgcaaatcgggaaggatattcggaaaccacagtttccactctgctgtaggggcagaaagcatggggcagcccagcccctcagtgcctgggaagtaagaagtaagaggatcagagttgtttctgttaaaggacaactacccttcctaggtgccccctgacctgccccagccctgcagggcctggtgggaaggggaggggtgtctttttgcctctggtttctctccatccagcttgcctctgctagaaggtatatttttcctgttcaagtcccttgaaagtagctcactatcacttttttttttttttttaacattttacttatttattcatagagacacaggcaaagggagaagcaggctctttgcagggagactcgatccgatcctgtgtctctgggatcacgccctaggctggaggcgcgctaaacccgctgagccaccagggctgcccagctcactatcacttctcatctcacccccaacaccttggcctcaccttcatggactttggtggactggcttcaagtgtatcatttgtaagccacacatgctgctttgttccagccccaccaatgtgcttattgctctctcccacataggaattactcattgcttatgtcactagtccctctggaatgtaccctcttctccatgacatccattctctctgcatcatttattaattgtttaaactagcattgttgttttcccccctttgataattaaaataatacatgttagtgtaggaaatctgtaaaatgaaaaatgtatangcccagagcgcagatcctgagtcctgggatgagtcccacagggctcccgcaggggagccgccttctccctctgcctcagtctctgcctctctctggctctctgtgtctctcatgaataaataaataaaatcttaaattaaaaaaaaaagtacccataattctgcagcctgaatataattaacattaccattttggtgggcttccttctagtattctcaccagaactcctttgctgcctcaggccttcatgcatgcttattattccttctacctaaaagtctctctccctttcccctcttcctgatcccccctcttctctcttccctcctttgttttgtgagtaaatcaactcatgtgtctaatcataaaggtcattctttcagagaaaccctttctctacccccatgttatgtctgttacacattcacagtacccaatacttttccttgtagcacttaccacaaccagaaataaaccatcatttttgtcctcatgtgtttaatgtctgtctaagctacttgacttgacgtaaggtccatgacttgcttgcttgtttattctgttgaccctagcatctaccacagtgccccatatacagaaaacacatcacaccaaaataacttcctagaataatcatatatctgtcctcttagcactttaaaataatcatcttaacaaatataatgaatcaatcactgtatgagacctggttccaggtacaggatacttggttcttaacccaagggatcctgtcttttgagggagacagacaagtacgtggagaattctgatatgtccttgatgatcaattataagtatatatgatcaatagtgttaagtaaagcatagagaaggggttcctaaactagccttgagggggatgatactattgcttaaatttgtcctcattaatgcatttacttcatatgagtcatttgttggtggcagatctgtgattaaagcctcaaacttgagaatctcagcccagtaatctttctagctgtgttttaggggcctttggaatctgccctctcctctttccattctgttaatccccatgtcctgctgatttgaccttgtaaaggtttctccagcctgtctgcttttcctcccgtcccctccaccatgctccaagcctttattacttccagcctgaatgtctacactcatctcctaccttgcctctctgcttctagtcttgtcctgctcagattccttctctactttgcagccagagtgagccttcccaggcttaagtgtaaacatatatatccccagcttaaggtctcattgaggggtgcctgaggggcacagagtgtgaagtgtcagactcttggttttggctcaggtcgtgatctcatgggtcatgagactgagcactgagtcagcttggccgtgtggcgtctgctttggattctctctctctctccctctccttctgtcccttctgctcatgctctctctcaactagtcttaaaaagtctcattaagctttcagttcaaaattcttaatatggtgtcattttcttgggctaccataacaaaataccacagactgggtggcttaaacagcagaaatttatttctcacagttctgaaggctggaagtccaaactcaaggtgccagcaagtaggcttaattctaaggcctcttcttttttccatatcaggcagataatgtgccaaggttgtaataaggtttgagaaaggtacatgtcacacaatcccatgagcacccaatcatcactctcgtgaactacaaaagaatcagaggtctctttttttgacttgtaggtggccaccatcctccttgtgctcatatggccctttctctgtgtgtatatgagaagaaagaactctcttgtgtttcctcctccttttttaagaatacaattctcatcaaattagggccccacccttaggactcccacccttaattacctaccagagaccctatctccaaatctccagtcacattggagtttagggcttcaacagatgaatcctgggatccctgggtggcacagcggtttggcgcctgcctttggcccagggcgcgatcctggagacccgggatcgaatcccacgtcaggctcccggtgcatggagcctgcttctccctctgcctgtgtctctgcctctctctctctctctctgtgactgtcataaataaatacaaaaaaaaaaaaaaaaacaaaaaaaaaacagatgaatcctggggacacacagtcccatccatagtacacggtctaccaagcctttcttaatctagcctactttgccagctttgtctactctccaccaccctctttgcctccatgcttctttatcttgaagctctcttggttccttgaacttgctcagttctctgcagctctgatccctccatcaccttccgttctttctctgcctgttctacttctatttagtcttcgtaaggaaaaatatatctagccttggagcaaatgtgtatgattttgtccacattggctctgagtccctcaagacatcacaggacctgtcttggatctctttgagagctgcttgcttttttgagaactgagacccgaagagggcccattacaaattagtgtatagcccccacagtgagccagactcaaactcagtcctactttattggtttcctccttttggacctatttctgaccctttcaatttctgcctggggagactgctgaacttttatttcttgggagacatggctgtcctttgcctaggaaacagtaaatcagcttccctctgtcagctctgttatctttggattttggttacttttaagtctcagtttaaatatcagtttccaggagaggccctccctgataccccatcttttgtttagtcctctggctctccattcctggggtagcttatgctcccccttttgtaagaatcaccacttattcctgtatgtttcatgtctgttcttctgagctcctagggcaggatttatctctgcttggttgcagtatcctcaggttagtgtagtgcctggctcctagcgggctattagaaactgttaggtttttttagtagatgctccataaatattcattggcttgagttgttctgaaatagtttctcagatagtatatgcattttgttgtctaaattagactaaaattgctcatgaccctgtcttttcttttttttttaattttttaaaaataatttatttatgatagtcacacagagagagagagagagaggcagagacacaggcagagggagaagcaggctccatgcaccgggagcccgacgtgggattcgatcccgggtctccaggatcgcgccctgggccaaaggcaggcgctaaaccgctgcgccacccagggatcccaatcctgtcttttcctttctttaaatctcctggggtagggggcaggggcccctgagtggctcagttagttaagggtctgccttccttccattcaggtaaggattctgggtcctggatccagccccaaatggggctcactgctcagcagagagcctgcttctccctttccctctattctccccacccccttgtgctcactctctcactctctgtctctctctcaaataaataaataaaagcttaatcaatcaattaaccaatcaatctatctccctcatatgctcactatgggcttcttcatccaagaaacatttcataaatgattcattttttgtcttaaagcttttatttatttatttatttatttatttatttatttatttatttatgtatgtatttatttgagagagagacagagagaggcagactccctgctgagcctgagcaaggagctcagtggggcagggggctcaatctcaggactttgagatcatgacctgagctgaaggcagacgcttaactgactgagccacccaggtgccccttcataaatgatttttttttaaatttttttatttatgatagtcacagagagagagaaagagaggcagagacacaggcagagggagaagcaggctccatgcaccgggagcccgacatgggatttgatcccgggtctccaggatcgcgccctgggccaaaggcaggcgccaaaccgctgcgccacccagggatcccccataaatgatttttaactgatttcccagagtaactttacccaaaggcatcatattctaagaaaggatcaaattaaaaagaatatgtatgtagcaggataatttatcatgaaattatggtaacaatctattaaggatgaaaaaagaatgatgatgttctcctttccctcttctgcatagccatgactttgtttccttgaagttatgggtttcctgaccccttgaagaatttggtgttttttgagtgtgtgtatttatttatttgtttgtttatttatttagatttaatttatttattcataggagacacagagtgaggcagagacataggcagagggagaagcaggctccctgtggggagcccagtgtggaactggatcccaggaccctgggatcacaacctgagccaaagacagaggctaaaccactgagccgcccaggcatcccttgagtgtgtttgtttattttttttgttattttattttatttatttatttttcatcatgataaacgtactccttaatccccatcacccatttcacccatcctcccacctacctcccttctggtaatcatcagtctgtcctctataattaagagtctgtttcttggtttgtccctctctttctctttttttcttcctttgcttatttgttttgatttttacattccacatatgagtcagatcataagatatttgtatttttcagactgacttctttctttaaaaaaatattttatttagttagagagagagagagagaacatggggaggggcagaaggagagggagaagcagactcctcaatgagcagtgaggctgacacggagctctatctgaggaccctgggatcatgacctgagctgaaggaaaatgctttacaaaagagtcatccagacgcccccagactgacttatttcacttggtataatactctctagctctatccatgtcattgcaaatagtgagaatttgttctctgttatctgaataatattccattgtgtatatatatacacacacaccacctcttctttatccattgatcaattgatggacatctgggctgcttccatagtttggctattataaataatgcttcgataaacaggagtgcatgtatccctttgaattcatgcttttgtattttggggtaaatatccagtagtgtgatactgggtcacagggtaattctattttatcttttcgaggaaactccatactattttccacagtggctgcaccagtttgcattcttactaacagtgcaagggggtcctttttgctccacatccttgctaacacttgtttcttgtgttttttattttagccattctaatgggtgagaggtattatctcattgtagtttggatttgcatttccctgatgatgagtgatgttgagcatcttttcacgtatctgttaatctggatgtccactttggaaacatgtcttttcatgtcctgtccctacttttatttttttttaaatttttttttttaatttttatttatttatgatagtcacacagagagagagagagagagagagaggcagagacacaggcagaggaagaagcaggctccatgcaccaggagcccgacgtgggattcgatcctgggtctccaggatcgcgccctgggccaaaggcaggcgctaaaccgctgcgccacccagggatcccctgtccctacttttaattgaattatttgttttttggtgttgagtagtatcagttctttatatattttgggtactaatctttatccggtacgtcatttgccttttaggttttttttttttttttaagattttatttatttattcatgagacacacagagagaggcagagacacaggcagaggaagaagcaggctctatgcagggagcctgacatgggactcgatcccaggtctctaggatcacaccctgggctgaaggcggcgctaaaccggtgagccacctgggctgccctgccttttagttttattgattgtttcttttgctgtgcagagactttttattttaatgtagtcccaatagttgctatggccaatgtcagagaaattactgcctctctaggattttgatggttaggaaatcaaatgtctcacatttacgtctttaattcattttgaatttatttttgtgtgtggtgaaagaaagtagtccagtttcattcttttgcacataggtatccagttttcccaacacccatttgttgaagagactttttcccattggctattcatttctcttttgttgaagattaattgaccatataattgtgggtttatttctgggttttctattctattccattgatctatgtgtttatttttatgccaggaccatactgttttaattacttccactttgtaataacacttgaaatctggaattgtgatacctttagttttgtttttctttttcaagatttatttggctattcaaggtcttttgtggttcaatacaaattttacgactgtttcttccatttctgtgaaaaatgctgttggtattttgataagggttgcattaaatctgtaggtcacttaggatagtatagacatgttttaaaaatattttattttatttatttgagagaaatagaaagtgagagagcaggaaaggggcagagaaaaaggggcagagggagaaggagaaaggagagaagcaggctccttgttgagcagagagcccaactcaggactcaacatggagcttcatctcatgacactgagattatgacttgaactgaaattaagaatcagatgctgggtggtcccgggtggctcagaggtttagcgtcgccttcagcccggggcgcgatcctggagacctgggatcgaatcccatatagggctccctgcatggagcctgcttttccctctgcctgtgtctttgcctctctctctctctctctatcataaataaatctttaaaaataaataaataaatgtttggtagaattttacctgtgaaagtatctgacactggacttttgtggagtttttaaaattatttattcaatttttttaaagatttaaaaaatttatttattcatgagagacagagaaagagagagagagaggcagagacataggcagagggagaagcaggctctatgcaggaagcctgatgtgggactcgatcccgggtctccaggatcacgccctggaccgaagtcaggcactaaactgctgagccacccagggatccccctatttattcaattttattgctggtaatttgttcaaaatttctatttcttcctgctttagttgtttttttgtttgtaaaaatattttatttatttatgagagacacatagagagagagagaggcagagagagaagcaggttccatgcagggagcctgacgtgggactccatcctgggtctccaggatcacaccctgggctgaagtgggcactaaaccgctgagccacctgggcttccctcttcctgttttagttgtggtagattatatgcttctaggaatttattcatttcttctaagttgtcaaattttttgacacaggttttcataatattctgttaaaatttttcgtgtttctgtggcgttggttgttatttctcctatttcaatagtggttttctttatttgggttctttctctctctctctctcttttcctttcttttcctttttctgttttgggtgagtctggctagaggtttaccaattttgttcatcatttcaaagaatcagctcctggtttcatttgtctgtcctattgtttttgctttttttagtttctatatcatttatttctgctctaatctttattatttccttccttttcctgggtttggttttgtttgttcttcttttttaggattgttgtgcattttagaaggaaaggaaagaatcagactgagtgagactctaaaggaaatatacccctaagtaggctatagttttgcaaggtactagatgtctaatctgagaggggaggatgtggagacagtagcctaccccttggttaactcttggacctctgggaactcagaaagaagataggggatacaacttctccaggatgtgtggaggtctaggcccatcctaagatgggattagctgccaaggtccatcggagctgggctggggtgctttggatagggcattttcagagcttcagcaaatgtcctcagcccccagggaaggtcagatcaagactgtagagaagcactaaatatgttacagtggcccccatatacttaaaaataaaagagctatatgaaaccaaaagcaactttaaggatgtactacagatttgtgatttttcctagtatgtgactgctttcgtgctctctttctctctctccatctgcttctcctgctcctcttcctcttcttctcaaatatgaaattacttccaaagttgttttttcccctctcttggctttgtgggtgtcatgtgtaggggattaggacctgcccaagcttgactgagtggcttgacttctaatggcccccacaggcctgagtaaggaataaggcagttctgaccaccatggtcagagcaggagactctcctgtttcctcaggactgcatgagcctaggcttccttgtatgacccaagggggcagtctgaaaactgttagactctagaattctagtcagtgatggtcagggctaaagccagacttgatataagtgagtccataaagacataagtaattacctgtgccccaagagctgtggatcagttcattcatacctgttatgtgtatatgcatacacatataaatgtttctagagagaagaaactagtaacagttatggcttctcagaagtaggacagaatctattattttttgactgagtttttaaaaaacattgaacagatgttatttttataataaaagtgtacatcaaaaattaaaatgacagcaacaataaactcatgagattcctaatatctttagatttcaaatgacaggccagatgggagattctgctttccaagaaggataagcttatgacccaggcttgggctatgagaggagaccagtgatgccttccagctatggtctatccagtgcagctggagaggaggctaaatatagataagctgtgcagtataccaagatgaatcaggctagtgttaggactctgtcggtgagcactcactttatacctaagttctaggcaggaggatgtagaagtaaacaaagcaggggagtgcctggctggctcagtcagtagagcatgtgaccccagatctcagggtggtaagttcaagccccacattggatgtggagcctactttaaaacaaacaaacaaacaacaacaatgaaaagaagtaagcataaagcacaggaaaatcccaatgtcaagtatggggttagagtggaggaaagtggtgtgccttttccagggcacttagttcttgagtacctgtcctcagggccccttctgtattgtttgaggggctagaaggggctaggaagtatttgtttatttatttgtttacatggggcttgaactcatgaccctaaggtcaagagtcacataccctcactgactgagccagccaggcacccctagaaggtttctttttaatttaaaaaatattttaaatattgtaatttaatttaattaataaatattattatttaaataataattagcatatagtaaaatgtacttttaaaagtgtatactccctatgaactttaaaaaaagattttatctattttttaaaaagattatgtattcatttatttcagagacagcaagagaaagcgcatgagcaggaggagaaagcagagggaggagaaggagaagactccactccctgctgagcacagagggttgaggcagggcttgatcacagaaccctgggatcaatccctaggtgaaggcagatgcttaatggactaagccacccaggcaccccttaaaagattttatttattttagagagagagagaaagagagagagcatgaacgagcagggggaggagcagagggagagggagagagaaactgaggcagactctggactcagcacagagccccacatggggctcaattctggaaaaccaagatcatgacctgaggcttaactgactgagatacgaaatacacccaggcgccccacttctatgaatctaaatacatgtaaaaattcatgtcatcaacaccacaatcaagatatagaacaaggacaggccaggtggctcagcgatttagtgccgccttcagtccagggcctgatcctggggacctgggatggagtcccacatcgggctccctgcatggagcctgcttctccctctgcctgtgtctctgcctctctctctctctctctgtgtgtgtgtgtctctcatgaataaataaataaaatcttaaaaaaaaaaaaagatatagaacagctactgccccccccaaaaatccattatgctattcctttgtagtcacatcctccctcccatcccccacaaacctcttgttagtttgagctattctccatgactattgttttgtctttccaaaaatgtcatataaacggaacaatacagcatgtaacccttttcaaaagattttgcttgtttatttatttaagattttatttatttgagagtgagagagagcaggagctgaggggcagagagagagggagaagtagactccccactgagcagggagcccatctcaggactctgggataatgacctgagctgaagtaagatgcttaactgactgagccatctaggcatccctaaagattttatttttaagtaatctgtatacccatcatgggactcaaccccacaaccttgaggtcaagaatcacatgccccaccaactgagccagccagatgccccagcatgagatcagatttgttcagcataatgcctttgagagtcatccaaattttgcatgtatcaataattgtttttgtttctgcatactcttccacagtatgtatatgccaagttatgcatttacccattttaatctggttttgggtaattacaaataaagctgctaagaacatatttttctctcaggtaaatacataagggattgttgaactgtatggtaagtgtatcgaatttataagaaattgccaagctatgttccagagtagactttgttttttttttttttcaagattttatttatttattcatgaaagaaacagagagaggcagagacacaggcagagggagaagcaaactccctgcaaggagcctgatgcaggactcgatcccgggactccaggatcattccctaagctgaaggcagatgctcaaccactgagccacccaggcgtcccccagagtagactttgaattccactagtaatgaaatagaattgctctgcattcttgttaacacctgatgatgctgtcagcattttttactgtatctattctaatagaactccaatggtaattcatcatggtttcaatctgcaaaattgatggccaaatgtcaagcttatttgccttccttatattcccttagtgaagtgtctattcaagtcttttgcctatttttaaatagggcatctgttttcttgctgttgagttttgagagtttatatattctggatacatgtctttgttgggtatgtgatttggaaatattttctttcactcaaaatcttgttttttttttttcattttcttaacagaatctttggcacaatacatttttttaacttgatgaaaatattctttatcacttgtttttattgagacataaccgctattcagcaacatgtactaatcttaagtgtacagcttgattactttttaagtatgtattcattcactcttttaaccacaatcccctccaacatagaatcactccattttcccagaaggtttctttaagcccctatctagtcagtatgtagcattctctcttataccttcctttgaaataactgctactctgacttctgtcaccatagattagttttgcctagaaggtttcaaatgactgtgctccaagttttgtgacctacttggttttgtcttggaaaatggaactcttcaaaaacctcactttggagagagatgccgatgccctctccagatgtgatgtggaggttggtgagcaaagctgggtttcttatcatcctgcttctgacatgctatgctggcaagccatgcttcacatcatggtccaaaacctaggtagaaaatggcagaaaaggtctatgctcacaaaaaatccactgaaatgggaaaagcagagtctcaggaatcaaaggcatgagttcagcccccctctctgacacttcctgaatgtctttgaacagaccaaataaacttctggagcctcagacacttcatctataaagtgggaacagtaatatccactgtgcttctcaatcttgttcaaagatagatgaacctctttctccttccaggttcctaggaagactgtatttgccaccctatttaacccttactgattagcctaggtatggctatgtaacttacattgactaattaagatgtgtcccttctatgtggaagtttttacaagatttaattttaagtgatctctacatgcagggtaggactcaaatttcaaccctgagatcaagagtcacatgctctttcagccgagccagccaggtgcccctcatcgaatgtggcagttttagaaagccaatgtgtgcttttccacattctctcctcctacttgtggcaactgacaatgttccggatcgtggctgccctgtcagcctgggtcctggagttaggaccagtgcagcctcagccaacctacactgcaggagcagtaaatacatttttgttgcataaagtcattgagattttggggatgtttattacagaatcataacctagcttctttgggggatgtaccatattatggatatcaccaaaaataagtgaaataaaatatatggaacttctggggacatactaaggtttgattttcttccttttaaaatctttccttctttctgaagagttattgggatattcttaccagcccagaaccttggatgagctgtcagagaacagatatccatgcagtcacaaaagaaagaagaggaaaggatataaagcaacacagagtaacaaatatgacacaaagcaaagaggagaaacaaagtgaaaaaagtgagacaaagtataagaatgggggaagagacatacagaagatgcctgagacacagacagaggcaattctataacagctgaggaggcaaatgcaaactgtatctgtttgagactcagcccaaccccaggcaagcaatgtcatctgttttggtagctgaacaaacaagcttaattagttcttggtcatccattcatcagtgctggcactcaatgtttaccgagcacccactgtgtgcctggtactggtgctgagtttagggagataagtccaacccagtgccggcttctgctttcaagaatcccttgatctgttgtgagtcacctgaaggggtaggataaaatctgccctgtgccatggtggaaatgccttcaaggacttaagggaggagtggggaaccaagccctgtacaggagagtgaagaagaattttctggaaggcatgaaactaaaggtcttgaagaataaccaggagttagcaaagaccgggaggtgagggcatgctgggccaaggtgcaacagagctggatggtggaggtgagaagctgaaggtagtttggggttgctagaactgtgatgagaggcggtgggcatcaggagatgaggctggagaggaattcaagggcctgtctcaggggctggatatcttcactgggttcgctagggcagattggggtggttacacagagaagtgacaaggtcagattttagctgaattgctctgcctgctgtgtgaaccatggattgggggcagaatctctctttgtgaggtctcttgggattagcccgaatgcgcagcctagagcctggaagtgcacaagatggcgtctgggacaatcaccttagccgagacttcgtgagtgccgccacgactgggcagtgtcctctgcgcccgtgtgccctacgtggagtaagtgcttcaccctcctgacagccccatggtgaaggtattcttgtcatccccattttgaccaccaggaaactgggtgcagagaagataattatgaatccttgccctagagctagtaaagctgcacaccagcattccagtgcaggcggctggctctgatctgcctgtaaccactctccctctggtctccttggggtctgctgctgtcaggaaggccttcctagaagcatggtttgattttggcatcctgcttcaagtttatgaaatcttccacacagatgacctcacttaagtcttgcaacaataacttctgtgagataggtagtgttattcatagctaagaaaactgaccaaggaaactgaacgatttgtcaaaggtcagaagttagggggcagagtgccgttggtgacttagacttgtgtcttcgaagcctcagtccagtgtcagctctcacgttcttttgtcagtcaaggcttcatgttgtgtggctcaaagttcggagcacgtccactccaactgctttctgtccaagaaaatgcttttttgaattaagagagggagtcacagagaaatgtgttgttggcatcaacttcctatggttgggcaatggcttccgccatccggaccaggtgacgtcagtggtctggatttctgccagtgttctctgcccaggaaacagacttccggccagggctcccagctgtctctgggcttcctggagcagcagacctctcaatttgcagccagacactgaagatcagatctcagggaatgcttcactatggggaaggaggtaaaaatggggaagaggagttgagaagacactgtctacagatgaacatggaggcacgctgcctgcagtctggggtttctcttcctgcatgagagcaggtccagtgattagactaggaggtttaagactgtgactaagagagttaagtaagctgggggtggaggggaagaaaagcaagcaaagctaaggaaatctggaaaaaattacacatagagatataaacacagaaggtcaaacataagccaagaatagaatgttgatcccaatcctcatgcacttttctgtggatattaaatcttgaacaaatcagtaatgcaggaatgtaaacagccctgatttctttttttttaattatgaaactataccagttataaaaaatctgaaaaatagatacatgaattagagtagaaaattaaagtgtccctccaccaccctgaacctcactctccaagcctggttcataaatgttatgaactttagccattacaaatggctaaagttacacactttagccattccttcagccaatattgatctcatcagtcctcacaacaaccctatgaggtaagaactactactatgccgttattattattattgatagagagagtgtatgggcttgtgtggggataggaagagcagagggagaggagagagagaatcacatgcagggctcaatcccacaactctgagattatgactggagctaaaatcaagagtcggatgcttagcaggctgaatcattcaggcactctgcttttattattattttttaaaaaatattttatttacttatttgacagagagagagagaaagagagagagcataagcagggggagcagcagagggatagagagaagcagaatccccactgagcagggagcctgatgcaagactggatcccaggatcttaggatcatggcttgagtcgaaggcagatgctcaaccaactgagccacccaggtgccactgttattatttttaattgtagtaaagtatacacaacataaattgaccttattagggagtcctggtagccactgaaggcaagtggccatcatggcctcttggagctttgtgagtgggtgctgtgctactacaagttgtagcacattcacagggacaagtactggtcctttgcttgtttggcatgaaccagtttgaagaatataagagtgaaaaggatttggggaaggctgcccagatgctaagggaagtagaggaagaattctggcacagtcggcttccaccaccagtccctaaccctcctgtgggcctgccctctgagagctatgagtgttacagagttcctcaaggcacataggtgactggcatccttctcagaaagcaatgtactgatttctttgccaaggaagagcagtggaagaaagtgtgaagggaaagctgggcctaagaggctaagcagctgcagaagatcctacctggtggtcctaagatttaagctttgccccttgcctgaaaagaaggtgagttgtcccactgtggtggcacattgtgaccacgcccaagggcagtccatgtaaagaaagagagagaaggactcctccccgttcatgcttgtgaggaaataagttacagaacatacacactcttgccctaataaaaataatagacatggaaagaaatgtaccactttaaccatttttaaggatacagctcatggcattaagtataatcacatgttgtgcaaccaacaccactattcatctctagagcttttacatcttccccaaatgaaactctgtacacagtgtcttcccattccccacctgttgcccctgataaccactattctactttctatctctatgaatttaactatagtaggtatcccatataagtgagaccatatatttgtccttttgtgactgactcttatttcatttagcataacgtatttgatgttcattcatgttgtagcatgtaacagaattttcttcctttttaaggccaagtaatattccattgtatgtatatactacattttgtttatctattcatccatcagggctgtatccaccttttggctcttgtgaataatgctgtatgaatgtggatatacacatatatatttgagttatgcctttactttttttttttatttatgatagtcacacagagagagagagagaggcagagacacaggcagagggagaagcaggctctatgtaccgggagcccgacctaggattcgatcccgggtcttcaggatcacgccctgggccaaaggcaggcgccaaactgctgcaccacccagggatcccttgcctttactttttaataattaaaaaagtttttaaaatattttacttattatttgagagagagagaaagagaggagagagcacaagtcaaggggaggggcagagggagaagcagactccttgctgaatagggagcctaatgtgggactcgattccaagaccctgagatcatgacctgagcagaaggcagacccttaaccaactgagaaacccaggcatcccaagttatgcctttacttttaataacaactgtattgagatataattcacatagcacataatttattcttttattttttttattttttaaacatttatttatttataagagacacagagacagagagagacagagacacaggcagagagagaaagaagcaggctccctggggggaacctaatgtgggactcaatcccaggaccctgggatcaccacctgagccaaaggcagacagctcaaccactgagccactcaggcgcccctgatttatccttttaaagcgtacaattgaaatgcttttagtgttctcacagaattgtgcaatcaacagcacagtaaattttagaacattttcatcacccccaaaagaaaccccatgcctgttaatagtcccaatttcccctcagatgtctcctcacttgagccctcggcaaccactgacctactttttgtctcaatagactggtctattctggatatttcacataaatgtcatcatacaatatgtagtctttgtgtctggcttctttaatttagcacaatgtttttgaagtttatttacattacagcatatatcagttctctctctttcttctttattttgtggttttgttcttctcagagtttgttttcctcagagtttgttctcctcagagattgattggttgattattgaagtctagttgacacagaatattaccttactttcaagtgtacaatatactgattcaacaagtctgtaggttatgccatgctcactacaggtgtagctgccatttgtcaccataagatgctattatagtatcattggctatattccctattctgtaccttttatccctgtgacttatttattctgtaactggaaacctatatctctcactcttctttacccatattacccatccccttaagcttcctcccctctgttctttgtatttatgggtctgtttctatttttggtttgtttgtttatttattcatttccttttttagattccatatataagtgaaattaaatggtatttgtctttctcagacttacttaacttagcataataccttttatgtctatttatgatgttgcaaatgacaagatctcatcccttttatggctgagtaatattcctttgtatatcttctttacccattcaccaatcaatggacacttgcatccatctattggctgttgtaaataatgctacaatagatacaggagtgcatatatctttttgaattagtgttttcattttctttgggtaaatactcagtagtggaatgactgaatgatgtagtatttttatttttaattttttgaggaaactccatactgttttccacagtagctgcactaatttaccctcctcccaattgtgcatgaagattcctttctcccaacatcctccctaacacttgttatttcttgtctttttgattctagccattctgataggtgtgaggtgatttgtcactgtggttttgagtttcatttccctaatgatgagtgatgttgagcatcttttcatgtgtctgtcatctatatgtcttctttggaaaaatgtctatttagatcctctgcccatttttatttattttttaaagggatttatttatttatttatttgtttatttatttatttatttatttatttatttatttatttatttatgagagacagagagagagaaaggcagagacacaggcagagggagaagcagactccatgcagggagcctgatgtgggactggatcctggatcccaggatcacactctgagcccaaggcagatactcaaacagtgaggtgccccatcttttcattttcttgatagtgtcctttgaggcacagaagttttaaattttgataaattctaatttatgtgttcttttcttttgttacttgtacaaccggtgtcatatctacgaagccattacctaattcatggtcacaaagatttatacttatgttttatgtctgtgttttcttttaagagtttaatagttttatatttagatatttatatttagacacatttatttatttatttatttatttatttatttatttatttatttaagacacagagagagaagggcagagacaagggcagaaggagaagcaggctccattcagggagcccgacgtgggactcgatcccgggtctccaggactaggccctgggctgaaggccgcgctaaacggctgagccacccgggctgccctttagatatattttgaattaattttctttttttcttttcttttttttcttaaactttcttcttttttttaaagatttttttaaaatatatttattcataaagacacacggggggaggggtgcagagacacaggcagagggagaagcaggctccatgcaggaagcccgatgtggggactcgatccccgagtctccaggatcacaccctgggctgcaggcggcgataaaccgctgcgccactggggctgccctgaattaattttcatatatggtgtgaggtgggaacccaacttcattcttttgcacgtgggtatctagttgtcccagcattagtatgctttttacagatgaatacattgtaaatgccacgaaaaaaaaggacagtacttagttttactcacctttgtctcctcaggattcatttagcccctgactcatacaagatgcttaataaatataggtggagtgaatgaatagatgagtgactgagacttagaggggttgaataacttgcatgggttagtcagctagaaagtgaccatacatggttcaaatccaaggtttcccattcattaagagtttttgtgcttccaagtttccaaaactgtctcaggttatcaaaagctctttatcacaagaaatcagatttcctcaaaattttgtttgatgcccctctctgtgtcattccgataattccaatgtttgtgaacagccacacttctcaaaaatagtgagcctcatgttccttccacctcccttcctctctccacccttcccagccacaaagactccaatccttctatagtggttttatagttagaaagctcttctagatgtctgaccacagcctcctgatgcacattttttactatgagagttaggtgtaaccacttattatgggacttggtttggtgtgggaagcattttggctgtgcagaaagctttatgtgctctgcactgtgtaaagtacagttttggtgaagcttgccgcccttgctctggtcctgacgtggtgctcccttcatggaccatggtttctcattaggagtatagcctgccatctcggaggagaatgaaggcgagtggcataaatcccattctaaaatattttgatggactcatttcttttaggatgaggacaagggagagcctgaaagagtaaaagctttgctcctcaaagcttccccagttaaaaccaagactggtgagagagttgggctgaattaccagccctccaccctgacagtgttgagtttgggctccccctgttggaccctttggaaaataatcatgtgaactacaggaaaaattaagaccagggtgggtgcaaaacaaagaacattatggagagcttgctatatattaggcattttatttaggcatctcatttcattctttttttttaaatttttatttatttatgatagtcacagagagagagagagaggcagagggagaagcaggctccatgcaccgggagcccgacttgggactcgatccctggtctccaggatcacgccccagggccaaaggcaggcgccaaaccgctgggccacccagggatccctcattctttttttaaaagattttatttatttattcatgatggatacagagagagaggcagagacacaggcagagggagaagcaggctccatgcagggagcccaacatgggactcgatcccaggtctccaggatcaggccctgggctgaaggcagtgctaaaccgctgggccattggggctgccctcattttattcttttttttttttaatttttatttatttatgatagtgacacagagagagagagaggcagagacacaggcagagggagaagcaggctccatgcaccgggagcccgacgtgggattcgatcccgggtcttcaggatcgtgccctgggccaaaggcaggcgctaaaccgctgcgccacccagggatcccctcattttattcttaaagtaatcccacaggtaggttttatcaatcctcttttgcagagttggaagctaaagcttgcccaagttacacaaggatttgaacccagagctttggctccctaaagtccatactctttccagtactctgagccaagaaagccagcaggtgaaaatggcacatgaggggtcattccttccttcacttccactgaatctattgctcattttgttgagacattttagggacccaagaatgttctggagctcccctagaacaagtgatgtgcttcagccacctcagaccaactggtgagagaaattattaaattgttacaagctggtcgttaaaccattgttagttggaaagtggtcatggtgggtgggggtatttacatcatggaaattggtaacctttgcaaatcagggattttacctcctggtagtgaaaccactcatgctggtttatcagcacagcattgtaagtgaactctcctctgaggtcacaaatgccctaaaagagtattaacttttgagttaattaatgagccttgagtaagagctgaggatgatgggacctgccctgtcacaaaccttcaattgcaggctgaggaaagatagacatacatattagttggaaaaatgagaaagtatgtacatgtgggagagagaaaagaaggctatcggtaattcacatgtaaacaaaatatcaacatttttaataatggggatttgggagggaagggttgtgactcatcattcagagtttttttctttcagagcaatgggagagagagagagatccaatcttgtgggaactagataagtgccctggaacggggcgggggggggggggagggctgtgcacaacacagaagaggggagatcttatttgtgaaatgaaaggtagctttgagccttgaggtcttgaggtgagaagcggtgggtagaccacattcctgactctgagaacacagatgggatccttttaccttctaggtggtgactttcttccatcaaggcctccagattacccaaagcaactctaagcatcaggagaacaaatctccagagccaacttggggtgctttggggtcatctccatttgaggactggagtcaggggccttcctcagctggtctagatgctgcaaagaaacagccatgtcccataataaagtaagaggaacatcctaggggatgcagttggagggagcatccctatggggagaaggggacttcccagctctgccatgccccagaagtttccctgtccctttatggttgcgggcaaccacagttgaagccatcagcaatgcagaatctcaataatcaaataataattccctaaagatctagagttaagaaaaggaaatcagggcaccctgggtggctcagcggtttagcaccaccttcggcccagggcatgatcctggagtcctgggatcgagtcccacaccgggctccctgtgtggagcctgcttctccctctgcctatgtctctgcctctctctctgtttctctcatgaatacataaataaaatcttaaaaaaaaaaaaaaaaaagaaaaggaaatcaaagaattgagtagcaggcaaccagttaatctgattcacaggacagagctgatttatcttcagcccacagggaattgcacgattgctcctccttcactcctagcctgctgcctccaactcaaagaagctccccgagtctaaggggagaaagatagacccctgcacattcccacttatgtctgttcaaagctcccattctgagttccaggtccctgcctgaggacccacctgacctatgcctacctgatgccagaatgtggacctctaagagatccactgacaggcaagtgaccttagcctacagggcacagcaggaaagccagtctccaggtaatccccctacagtgaggggtagaatggaggtattgtcctttttccaggtgttgtgactctcttgaggttcaacctaaggctagagattgcgaccaaagagacaccagattggacaggtcagagctatgacactgatgtggcttttaggattaattagcctttttggcagggcaggtttccacccactggtatagctcccaggctaagcagacaacagaatgtgtttgcaacaggagggaggcttgaactcagaggctattggtttctgttaggcagagattaacatcctgtggcatcatcagctaactactggctggtacaacaccttctctaacctttgagagagcctgctcccactgcttattcacatccattcattcaacaaatataaaatttctcttaggtgccaggtgttacacaagatactggatatagcagtgaacaggatagccatcttgcccccatggaggtcacaggacaatgggatgaaagacactgaacaaataattaaagggtgatgagttcttttttttttttttttaaagattttatttatttattcatgagagacacagaatgagagagagagagagagagagagagaggcagagacacaggcagagagagaagtaggctccatgcaggaagcccgacgtgggactcaatcccgggtctccaggatcacgcactgagctgaaggcaggcactagtggatcgctgagccactcagggatccctagtaagcagtttttataaaactgttgatgctgtctaatttgtgatgggtaagagagtggtagtaacgagatgtgccccattagaggcagcttactatagaacaagccctgaaacagattccttcccacttgcgtttgaaccctgaatctaccacatactatgagaatcttttttttttttaagattttatttatttatttctgagaatacacagagaggagagagagaagcagagacacaggcagagggagaagcaggctccatgcagagagcctgacgcgggactccctcccgggtctccaggatcaggccctgggcggaaggcggcgctaaaccgctgaaccccccgggctgcccccatactatgagaatctgagcaaattacatttcctgtgccatgtttctgtagattctatctcccagcattgtaaggataaaagacaatgtatataaactggaatgtgatagtgtattgtaacattcatactataactattactgcaataaaactatatctatcttaaatagtatagtattatatatagtgtaactatagcttatattataactattaatataattaatagctataatacttggtagttactcttattattcatgtacatcaagcttatatccaaaaggacttcggtagttaaaagaaaagacataaacaccataaatctggatttgatagatgagagtagactaataaatgaagtagaaagggaggagagggtgtgtacacagtgataatatctatgtagagagaggatgagcctttggaaggtgaatcagaagcctttccttttggggaggggcctatatacttggcgtgctggcagctttttaccaaccttctttccctctagacaatcttattctagggaggtcagaaatttttaaccttcaaaagtggtttgtagcaagttctggatgagggctactaaaattaaagggggattgatgtgccatcacccagtgccatgtttgcagaaaggacagcagatccttttgacctttacaagaggcaccagaatctttgcatatctctaaattatatgatacataaatacttatccagatttttccagacctttcttaattacatttctgttgagaggttgctgtttcctgtttatactctcttactaggaattaactgctgttcctactttcacttaagttttgtatcttgctctgtaagaaacttttgagctgcctgaaaatatttcctgaaatttctcaagtctcttttcaaatatctggatttattgaggactaataaagctgaactgccaccaagatcaaaatgcctgtctttacttcaatatacaattcctaaaaaccattattttcttggaactcttcacatttttatacttcaattaccagtgtcaatgactggctttctttctgggcaatttttacaaagaaataaagttaaaaacattttttcccttccatagatctctggctactggactatctgctgagaaacacaaaactgcttcctgaagctgagtggtcagctctcctcacccaaccagacccaactgggcagcaccattcttgctatgcctcagtagggtcttcacagacaattgaagcaacccaaatgtaaaatttatagatgtcatctgtactgagtatccatatcaagaagacacaaacagtaatgaagccgtgtaccccatcaccggttcattgttccactgcagtaattcttgatatgattagttgtagctacagagttaagccccatggttgattatttttgtgttttgggggggctaaagtaatggacatatagttcaaatgttgttcttttcctggggtcagacagatctcacatgacatagtttgcttctttgcctcatgtgtcaattcctcctccttttctgtcattatcattaggccattattgaatttccgaggcatgactcttgttaggaaatgatggaaaaaatacagttgctctataatcaccaattacattgtgacttcttacaagtaaatgcactcaactttcaccattactcattcattataaaattgtaagaggtccaacatgcctttgtttagagatgtggtcatgctttgcttgctctacttcctggacaaggatccaaaatcataatggccagatgagacactgtgaaggaataatggccggtcatgggtcatatcacacacatagccctgagtagagaagcatggcatcttctaggcatcttttgtaaagatgacaggtttctttagatgggtctctgctcaaacgttaggtggaagatgttttgttgactgtgttatggaggtctttggccctccaatgactatagacctcccacaggtctaggcatatctgctataaataatatgaaaacttcagatattatgtataactgctaggtatttaaaataggaaataggtaagagatgcattcttgagaagagggagagaagttgcctttgagaaaagattgagggcattacttaataggttgctgagagtatcaaatgggatgatgcatgaaaaggacctagcccattacctggcaggtaataggagctcaataaatgtgaaattattattaatattgttttctgggcagcctgggtggctcagcggtttagtgccaccttcagcccagggcctgatccgggatcgagtcccatgtcaggctccctgcatggagcctgcttctccctctgcctgtgtctctgcctctctcactctctttgtgtctctcatgaataaataaataaaatctttaaaataataataataatattgttttctgcctagcagcttcagctcccttggcttcatgtgctggcaacacttcctgacttgttcatttcttgcccttccttgggttcttttatcttaaattcttctctatcatgaaataatcatatctcagatctatggttgaagagctaagagcagtgagtagatgtagaaatagatgggaataatggctaattcccaggtttctgacttaagaatattcaggccctaggggcaggtttttacctttttttgagatggaatcctatattccatagtttatagttattccagtccgtggggttgctggtagaggtattgatggagtatgccaactacctccctttctaaattaggctcatatgtgatcagggataacagctccctcacacaatcagaccttgttcatctgggacatcctgaatgatgccataacttgtggtccagatgggcaagaaactgaatgagagccacctcaagaaaacctcctgctggatcctcatgctgaaagttgaatgtttttatgtgggaggaagggagaatggggggtgaaagggaatgagagaggtggtcttgctatttagactcttcctctgatagtacagagccatttagaaggagctgttccaactctagttctgggctctcaagtggtctttgcttacaacagcagcaatgcctaggctcagaccagtgggaaaacagcctagaactccttagaggctccttagagcctcaaagttttttcttccagactcccccaaatgtcctatttttaaaatgagtttatgtttcttgaatcagaattgaaataaagtccatacattatggttggtatttttatgttttttttttaatgtataagttctcttaccgattccattttcccccttgaaatatatttgttgaagaaactgtgttgttgttgtttctttctttgtttgttttgttttgtttttgtcctgtagaatttccctcagtctatgtttggcttatcttataggactcctcggagaatgtgaacttccaacagaaggtgcataatgtcagcttgtctctcttttggttatgaggcattgactaatgcatgattttcttaggggatgcaaaatggtgatattggaattctatcattctgttcttcatttactagctggactacttctgtaagagaaatttcctcatcaaccatgtagtcaggtatggttcctgtaggaaaggcaggaaattttcatttctttttatgaccagttttcaaattagtgagttggctacctacaactctctaaatgtgagcaactaaaaaaatcattatgaagtcataggtttgaatatatttgatatagctcagtttattacagctcattgcaattattattcttatgaatgcttgaattgtcccatctttggcaagtgggagtctcctcacctccctttgatatattcctaagatactttgatagcttcctgagttttttgttatgacgagacatccaagtacatcttgtacatttccttctccagtctcagaaccaagcatttctttccattgatgggaaattgcaattagagatcacagtcagggtaatagggatattcattgctttaggttgatcttttttttatagggccttctggtggataggaaatacacacatacatgttttcacttaaagtcattctttgtttctactaacactttaaaaaaaaagattttgtttatttattcacgagagacacacagagagagaggcagtgggcagagacacaggcagagggagaagcaggctccatgcaaggagcctgatgtgggactcaattctgggactccaggatcacaccctgggccaaaggcaggtgctaaaccactgagccacccagggattctctctactaacacttttaattcaaatagacactcccactattttacatgacttcatcttacataagctcttcctcccaaccaaatatctcagttcccaannnnnnnnnnnnnnnnnnnnnnnnnnnnnnnnnnnnnnnnnnnnnnnnnnnnnnnnnnnnnnnnnnnnnnnnnnnnnnnnnnnnnnnnnnnnnnnnnnnnnnnnnnnnnnnnnnnnnnnnnnnnnnnnnnnnnnnnnnnnnnnnnnnnnnnnnnnnnnnnnnnnnnnnnnnnnnnnnnnnnnnnnnnnnnnnnnnnnnnnnnnnnnnnnnnnnnnnnnnnnnnnnnnnnnnnnnnnnnnnnnnnnnnnnnnnnnnnnnnnnnnnnnnnnnnnnnnnnnnnnnnnnnnnnnnnnnnnnnnnnnnnnnnnnnnnnnnnnnnnnnnnnnnnnnnnnnnnnnnnnnnnnnnnnnnnnnnnnnnnnnnnnnnnnnnnnnnnnnnnnnnnnnnnnnnnnnnnnnnnnnnnnnnnnnnnnnnnnnnnnnnnnnnnnnnnnnnnnnnnnnnnnnnnnnnnnnnnnnnnnnnnnnnnnnnnnnnnnnnnnnnnnnnnnnnnnnnnnnnnnnnnnnnnnnnnnnnnnnnnnnnnnnnnnnnnnnnnnnnnnnnnnnnnnnnnnnnnnnnnnnnnnnnnnnnnnnnnnnnnnnnnnnnnnnnnnnnnnnnnnnnnnnnnnnnnnnnnnnnnnnnnnnnnnnnnnnnnnnnnnnnnnnnnnnnnnnnnnnnnnnnnnnnnnnnnnnnnnnnnnnnnnnnnnnnnnnnnnnnnnnnnnnnnnnnnnnnnnnnnnnnnnnnnnnnnnnnnnnnnnnnnnnnnnnnnnnnnnnnnnnnnnnnnnnnnnnnnnnnnnnnnnnnnnnnnnnnnnnnnnnnnnnnnnnnnnnnnnnnnnnnnnnnnnnnnnnnnnnnnnnnnnnnnnnnnnnnnnnnnnnnnnnnnnnnnnnnnnnnnnnnnnnnnnnnnnnnnnnnnnnnnnnnnnnnnnnnnnnnnnnnnnnnnnnnnnnnnnnnnnnnnnnnnnnnnnnnnnnnnnnnnnnnnnnnnnnnnnnnnnnnnnnnnnnnnnnnnnnnnnnnnnnnnnnnnnnnnnnnnnnnnnnnnnnnnnnnnnnnnnnnnnnnnnnnnnnnnnnnnnnnnnnnnnnnnnnnnnnnnnnnnnnnnnnnnnnnnnnnnnnnnnnnnnnnnnnnnnnnnnnnnnnnnnnnnnnnnnnnnnnnnnnnnnnnnnnnnnnnnnnnnnnnnnnnnnnnnnnnnnnnnnnnnnnnnnnnnnnnnnnnnnnnnnnnnnnnnnnnnnnnnnnnnnnnnnnnnnnnnnnnnnnnnnnnnnnnnnnnnnnnnnnnnnnnnnnnnnnnnnnnnnnnnnnnnnnnnnnnnnnnnnnnnnnnnnnnnnnnnnnnnnnnnnnnnnnnnnnnnnnnnnnnnnnnnnnnnnnnnnnnnnnnnnnnnnnnnnnnnnnnnnnnnnnnnnnnnnnnnnnnnnnnnnnnnnnnnnnnnnnnnnnnnnnnnnnnnnnnnnnnnnnnnnnnnnnnnnnnnnnnnnnnnnnnnnnnnnnnnnnnnnnnnnnnnnnnnnnnnnnnnnnnnnnnnnnnnnnnnnnnnnnnnnnnnnnnnnnnnnnnnnnnnnnnnnnnnnnnnnnnnnnnnnnnnnnnnnnnnnnnnnnnnnnnnnnnnnnnnnnnnnnnnnnnnnnnnnnnnnnnnnnnnnnnnnnnnnnnnnnnnnnnnnnnnnnnnnnnnnnnnnnnnnnnnnnnnnnnnnnnnnnnnnnnnnnnnnnnnnnnnnnnnnnnnnnnnnnnnnnntcccgggtctccaggatcacgccccagccgaaggcggcactaaaccgctcggccaccagggctgccctgttcttgtaatttttaaattgagtttgtagtttgccaattaaattgagtttggcggtctattaattaatttgacatagattaaagaagaaaaacaaaagtttttttttttttaatttttatctatttatgatagtcacagacagagagagagaggcagagacacaggcagagggagaagcaggctccatgcaccgggagcccgacgtgggactcgatcccaggtctccaggatcgcgccctgggccaaaggcaggtgccaaaccgctgcgccactcagggatgcccaaaagttttttttttaaaggttttatttattcatgagagagacacacacacacacacagaggcagagacataggcagagggagaaacaggctcttcacagggaacccgatgtgggactcgatccctgaacccaggatgatgccctgagccaaaggcaaacgacaaccgctgagccacccaggggtcccgaaaaacgaattttgtacacacaagagccccataaaaacatgatacttcaagataggcaactgaagcttacacgttggcctaagctaaggaattagttggggacctagggcttcaaagggaagggggcaattcataggaagataaaaagagcggatattttgtagtcatgtgtttgccctaccaagcagttaaaatttcaagataaaaagtttcaggatacctggctggctcagtaagtagagcacatgattctcnnnnnnnnnnnnnnnnnnnnnnnnnnnnnnnnnnnnnnnnnnnnnnnnnnnnnnnnnnnnnnnnnnnnnnnnnnnnnnnnnnnnnnnnnnnnnnnnnnnnnnnnnnnnnnnnnnnnnnnnnnnnnnnnnnnnnnnnnnnnnnnnnnnnnnnnnnnnnnnnnnnnnnnnnnnnnnnnnnnnnnnnnnnnnnnnnnnnnnnnnnnnnnnnnnnnnnnnnnnnnnnnnnnnnnnnnnnnnnnnnnnnnnntaaatctgagaatcattgtgttagtgatgaggcccacattttcataggaaaataggcatggcattcaagcagacgatgtatttgtgcccggtgggtcaggcagttacctgagtcacgagtattagttttctctgcaaatccgcaaagttttcctcttaaacagagtggataggtttctgagaaggcgcaggggtttagcacttcctgcagcccagggcgtgatcatggagaccccgggatcgggatcgagacccacctcgggctccctgcatggagcctgcttccccctctgcctgtgtctgtctctgcctctctgtgtgtgtgtctgtatgaataaataaaataaaaaatcttaaaaaaaaaaagtgcttgcttttaaattcttatgtagttaaatttatcaatcttcttcaattgaaggtggatttttagctatagttatgaaagtcttttctactctcaagttatacagaaattctgccatttttttcctttggtacttttatagggttttttttaaagacttttttaaagagatttttttaagattaaaaaaacaagatttatttatttatttgagagagagagagtgcgaacagtggggaggggcagagggaaagggtgaggggaagcagactccccactgagggggagctcttaccaccctaaaatcatgaccttagctgaaaccaagattcggaccttgaccaactgagccaccagatgccccactatagtttcaattaaaaaaaaaaaatcctatgtagaagttatccttttgtatgatatgataaatagatcaaattattatttttttatagagtctcaaatttgatattattagctctcttcccaacctcccttcagcttgccttctcctggacattgtattcttttccaggtttgccagaactggacatggatcaaaataaacacctattcaactctctgcacttgttccgttttgttgcctgtttttctttcctggactctttgtgatttctgtgcagtgtttatccagcagctcaagggagttatggcctttcaggctttaggaagagtggcctaaagagagtgattcaagctggagcaggtcctgcagaggcagctctgcttggggctgagggtaggggtgggtagaaagtggctttctgggggcagggtgagggtgctcactcagagcactggggagctcagttgttgttaatgattcatgtttcctgttcccacatacctcctgctcttgttttctatattaggaagtgccaggtttctgactgcggaagattggtgacagagggaagagaagtgggcaggcagcaaaagggagggatggaatacagaagctggaacctttcttcctctgtgctcacatatccagggcagctccgcatcattaataccagtttccccttgctattgtctacagccaattgccaggtactctgctaaatggggtaaatcatcaatcttgacctgttagttggcttaggttgttactgccagaagggaaaagaggctcagagttaaggtcacacagttggtaagtaataggattttgatctgtatgacattgaattccaggctcaacgctcctatgtctgtggcctccatgattagtttcataatgccctatagttctatttccttttcaaactgaggactaacctcatctccctttactgctcagatccactgagctcagatgtggggagtgtggttggctctagacctgtaggcctcatgttgggctgtaaggctctgtggttgggagggcccccatggtggccatcttttattctgtggccaccacagtgtctggcacattgcagatattcattacatatctgctggatgattgaatagatgaaaaaggagggggaaaaggaatatgtattggagaagaaggggcaggagtagaggaggtaagatggtagggcctgagggtgctggtggctgggagaggcccatgttgctgttgtttaggagcacagaaaaaaatatcaattgcatggcaagcaggatttcaattttttacgagcttgatcatgaggaaatgacctggactgggaccaggagtgaacagagctctcctctgtgcagcagaatatggacctcttcttccatccttcaaattttgaacatttttattccatattcaaacatcctcaactgtcgtttcaactgggaaacaaaacacacaaacacaaaccctgactattctacaaagaagctaaggtgaaaaaggtatgcagctccttgaggtctcaaagaacagagaaacacccaagttaccttcagggaggtattttctctgagactacacagatgagtaaggaaaataggatatggctcttttccatattgcaagatggtgggtaaaaaagtggaggagctggatactaaaaagaaacctgaagtcaagaaggctgatgctggtggcaaggttaagaagggtgacctcaaggctaaaatgacaaagaaggggaagccctactgtagctgataccctgttctagtcagaggaattggcaggtattccccatcgagtgagtattccagaagggctatgtacaagaggaagtattcagcagctaaatccagggttgaaaggaaaaaggagaaggttcttgctactgccaaaaaaccagttagtggtgacaagaatggtggtacccaaatggttaaactttgcaaaatgctatgtattatcctactgaagatgtgcctcaaaagctgttgagcttctccctctgcctgtgtctctgccccccccctcatgaataaataaataaaatctttaaagggggggaggggcagcccgggtggctgggtggtttagcgtccgccttaggctcagggcttaaccccggctccctgcagggagcctgcttctctctctgcctgtgtctctgcctctctctgtgtgtctctcgtgaataaataaataaaatctttaaaaaacaaaacaaaacaaaacaaagcactgttgagcttcagcaaaaaagaaaacctgggcagcccgggtggctcagcagtttagtgccgccttccgcccagggcctgatcctggagacctgggatccagtcccacgtctggctccctgtgtggagcctgcttctccctctgcctgtgtctctgcctctctctctcattctgtgcctctcatgaataaaaataaaaaataaatcttaaaaaagaaaaaaagaaaacctttcagtcagcttgtgaaaaacctgccagctaatgtcactcctggaacccttttatcatcctcagtgggcaccacagaggcaagagggtggttttcctgaagcagctgagcagtggcttgctacttgtgaccaggcttctggccctcaatcctctgcgtagaacacaccagaaatttgccattgccacctccaccaaaacatctcatggatgcttgcttcaagaagaataagcagtatgaatccagacgctaggaaggcgagttcttcacagaaaaagagaaatatgaaattagaacagcacaagactgatcagaaagccatggacaatgaattctgccaaaaatcatagctgtttctcagcttcacagctctctctgctctgtttcctcttataaatggagtttatcctcacaaattgctgttctaaatttcttacaaagaacctaattaaataatagatccattaaaacaaaaaaagaggggtacctgggtggcacagttggttgagcatccgactcctggtttcagctcaggtggggatctcaggatcatgagatcgagccctacatcaggctctgggctcagctcaaagtatgcttgggattctttctccctttctctctgcccctcctgctcatgctacctgcacatgctctctctcaaataaataaatctttaaaaaaaagaaaaaaaagaaagaaatgttctggggcacctaggtggctcagtggttgagtgtctgccttctgctcagggcgtgatcctggggtcccgggatcaggtcccacgttgggctccctgcatggagcctgcttctccctctgcctgcctctctgcctctctctctctgtgtctcatgaataaataaacaaaaccttgaacaaacaaacaaagaaatgatctgtataggccttgaggagagctggagtgctaatgggacattgtcgcctggcagacaggaggaaactgctctttccttgaggatgatgacagtaacttgcccgattcacagcccttctagggcctgaccagcagccctacctccatatcagctccaaacccgctctgccttctctgcctctctcttctgtctcttctttctgctctagtactgcaacttctaccagcgggctattcttcttttcctttcctttttcttttaattttttttgatttttttttttttttgtaatttatgataggcacacagtgagagagagagagaggcagagacacaggcagagggagaagcaggctccatgtaccgggagtccgatgtgggattcgatcctgggtctccaggatcgcgccctgggccaaaggcaggcgccaaaccgctgcgccacccagggatccctcctttcctttttcttttcctagcgtccgcccttcttttcctccctcccatcttccttccttccttccttccttccttccttccttccttccttcgtcttcctccctcccttccttccttcttcctgtccttccttcattcgttattgctttagggtatgatggaatcatttatttgggggatgttgcttttttgtaagacaaaactctgtaatgtatcctttaatttcatgaaattaaggcagagtttgaactgagaggctaatcaaagaggtgttccattgctgagcacaatgaaaagaaagggtgtcttccttgagcagagaggtaagaaatgtccagaatgggtcccctgagtcagaaatcattttaggaacagtcacctttgatacagagttctactgtgtccctgttctgggctgtaaccaccccccacacacacctttttccccctttttttgagagagagagtatttgcataaagggtggtgagaaggggaagagagggagagaatcttaagcagactccatactgagtgtggagcctgatacttgatcccatgaccctgagatcatgacctgagccaaaattaaaactcccaggtgcccctgtaattccccttctttaaaaatttttttttttaatttatttacttgagagaacaagtggggcgggaggcagagggaggagcagactcctcactgagcagggagcccctgcttgatcccaggactccaggatcattacctgagctgaagacagatgcttaaccaactgaaccacccaggtgtcctgtaatcaatcttccttctttttttttttttttttaaggttttatttatttatttatttattcattcatgagagacccacagagagaggcagagacacaagcagagggagaagcaggctccctgcagggagcccgatgtgggattcgatcccagatctgggatcacgccctgagccaaagacaggggcttaactgttgggaccaggcgggaagggaaactcctcaagatggcggatactccaaaatggctgaggttcctgtcaccacctccacttgggacgccaatgggccaatgacctactgacagcttgagcagacccttacacctcccctttggacttccccaaccgaacccaatgcccttcaaaccccagaggagttagtcacctttggctggtcgaattgcaatccttcctttgcatagtgagggtcactctgaccggttggattgcaagccttcctttgtatatgagccgaccaataggaaaccgttctgccttacaacgttatgtaaacccccgaccaccttgtcctggtgcgacttcccagactcactctctttcccccgtgagtcgtggaacctcgcccgagggtgcctgcaataaaatctgttcttggaccctcgcttgccttggcggtctcatttccatttagttactaaaaaacctaacattaaccactgagccacccaggcgtcccatcaatcttccttcttaactggcccatccgtggttcaagcctctgctgaagctgagctgactcttagcccagtgttagtttataaaggaaatgaggggctgaagaggctggatgcctacaggaagtgatgagtgatgagaggaagaggccagaggtgatattgaccttgggtattaactgggggtattgactgacccaggtagcacttcctgggccagggtcctaaactttctacagctgtagaaaagtgggggtctgagttattttgtaactggggtcatgggtgcaagagcacctagttccgaggatcccaaacagacaaggttcagctgcttgccactgacaaaatccaaaggcagagacctgagtggtggtgaaacaagagaggaattcgttgccgtgaggccagcatctgaaggcagtagagtgattaacatcgaaaagattgtttccaaggtgctgaaaaaggctctaggtttatacagggaaaacacggagcgaaggttggtaggtatgggcaggcaggcagcacaggtcaggggccccattgccttagggccaatcacatggggtcttgctggctcagagcagcgctgcagcttgaggaggtagttccaatccacagcttttccctggaggtctgccgtctgagttaagagagacactggaaaggagaacttaagtctgaagtcaaaatgaagtagttgaagtcctctttcaatttgactatcaaaagaaagtgatggccagaggctgggaaactgggcttccctttcaccttgtccttctccctgtggtgtgggcatattcctttgtctctgtggagagattccaaacccccacccctgcctatagcagcccccctaatctcctcccctttcacacattcttctcccacctttggtaccttctttctcccttcctcacttcctcccagtctcttcttgctctcatttttcaacatttttttctttctacctatgtttttttatctttccatcccaccatctttggtcttttcttccattttgcccttctttcccatcccctcaccatacctgctatcagctccttgcctttctcccactttccattgcaactgctttttagcccatccattcagcattttggagggcacaaactcacaacctgatgcctgataactgcagaaacataatttgctaacagaattttaccaaaatgtgtcccaaaaatattgaattcattcccaacattaaaaagtagaagatttcaccccaaaaatacagacttccagcttttaaaaattgagactatttattgctgataacaattgatggaactgggtggtaactggccatgtcaggtcaccagtctacttggtgtcccctgacctcctggacgctgagggaaaatatcaactagcaatgtcattagcttgagcagctttttctcctttagcagaaaaatttcagttccttaccacatcttaaaagtgagagaacaaagagacagcaagagccttgttttttcctcacccctgagtgctttatcacttgcatttcctgctttgctctgcaggctgtgaaatctgcaacctctgctttaaacactcatgcttcccttccccatttctctccttcactccctttttttccgtagtatatcctccttccaccttttgttcacatgaacattagtatttaatgcaacacagaaaggttaagtaacttcaggaccacgactgaaactttcaatatacagaaaaattctgggaaaaatcattgtatttttgaagcagtgttttgtttatgttcatagatgggagtagttatcttgttggcagtctattatttgtcttggtatttgtgtgtcatctggctaacaaccttttcatatggacaagagctgaggaattgttactgagcaggcccaagacagtcttcttttaggatcgttatcagctggggggtggcattcagctgtagtaacaaaacctgaaaaatactgacataaacaattttgaggtttaatttttctgcatttaagagacacctgggtggctcagtggttgaatgcctgccttcagcccagggcatgatcccagagtcccaggagagtcctacatcgggctcctgcatggggcctgcttctccctctgcctgtgtctctgcctctctctcactctctctgtgtctctcatgaataaataaataaaatctttaaaaagataatttttctgcatttaaaatcaaccttggggcacctgggtggctcagtcggtgggattagggctcctaatagtgcagcaggaacctggctccctcttctctaggactggtttgtctctcttcatttattttcctccttaatccttatcacattctgacatactctctagcagtttgtttatgatctgtctcttcccactagactgtaaactcattgagggaagggacagacaaaaatctgttttcttcatgcagagttcccagcactgaagtgctgttgagatgactgctagagctccggccagcatgctgatgcatcaggcatggagaagtgggaggataaatggcaaaggtgactgaagcctgtagagtcagttccagaaaaggatttttctgcaagtcccatttagtgacttacaagtgacgaagttttggaatataggtaaggtctggagccgacgaccaagaaagaattcttgagacattttgggtgcaaaatggtgattttattaaagcactgggacaggacctgtgggcaggaagagctgctgccccagggcctgtgaggggtggctgattatatacctgggagttgggaggtggttagggattaggtaagtctctaaggaatttggaagcagggtttccaggaccttggggggaccagctattgttgggaaaaagtcacttattaccggctaataaaacctgagtcacgagacccttcagatgtgtatgggtgggccatgtgcttgggggatgtttgccaacatgtatcatgggggtttagagataaaggaactttctaaatgattttttacatgttaaagtagacttgcaaggtcctgggggtggggctaagattgccttttacccttagcaaagtatgaacatcgaggcagttgagcctgtagaggaaggtccctctgcctgtttcaaggacttgtcagtgtgctttgtcctcagctagtcctctgttcctccatcatttccctttgaacaattttgacccttaaatctttaaggttgaaggtggaaggtctcatctgtaacttcttcctgctgagtaggggcgtagagatgtccctacctgtgggtcaatattattcagttggggaacatatcggggagttataaaaaggagaaggcagctgaatccaatgaggacaacacatgaatctccttgagcagaaaggatcatctgtcagctggaagttatggcagtgaaggagtcttcgcagtagtcacggagatggcagaaataacaaaattaaggttaacattataatgagaaattaaagacctttgacagttgacctttgatagttttcctctagtccaggagtttaaagcaatcacttaaggaaagagattatttaaagcacaaatctgagtatttatgttagatagaaacccagaaatatttttgtggtcatctggaatatatacacagcattgcttttataatagcacaagttttatcttgtgtaacagttaaaacatctaatgtcattctattttgtaaaactgcttcacgcatttgtgttactttagtatttaatagagaagttttacattgagtgttatttagggctttgtccatgtacttattaagaggttccatgatccaaacaacatcctctggtctcaaagagagaacaaagatggatgctagttggtcacaacaatgaaacataaaaacacatcactgtttttaaaaactccagagtacagtggcctatccagacatggcctattgaagccatggccatgaattagagtggcatagtcattgggtcacattagaagacagtcatataattttgggcatcccattaatgtatcatccaatccaatcataaagtagggtcatccattatctccataagtccatagttaatgccatagtggggtatgtctggctttcagggaactgattgtcatcccagccacagagaattggttagagtgctagctgggttatgcaattgttgggggaatcaatcccccctttttaaagctgtttaattatattcccatggggccttgttatccccacagaataacaaaaagattgtctatacatgagctattgtggcaatttgtctgaggtttacctaaagttgtctaggttaagtaaacacgacaatcagaactagaactacattcacaaaagtgtgttattgaaacagtgtctgtctaaaataaccctcatttcttttttttaaaagattttatttatttatttatgagagacacagagagagagagagggagagacacaggcagagggagaagcaggctccatgcagggagcacaacgtgggactctgggactcgatccagggactccaggatcacgccctgggctgaaggcaggagctaaactgctgagtcacccgggcctgcccacagccctcatttcttaatcagagatttgattgacctgtctgcaaaacaagtccagttttaacaaacttggcctaattattatttaaaaaaaaaaaaaaatttattggagttcaatttgccgacacatagcataacatccagtgccaagtgccccactcagtgcccatcacccagtcaccccaaccccccgcccaccttcccttccactaccccttgttcattttccagagttaggagtctctcagtgatattttcactcattttctctcctttccctttattccctttcactaatttttatattccccaaatgatgagaccatataatgtttgtccttttccgattgatttatttcactcagcttaaaaccctccaggtccctccacttcgaagcaaatggtgggtatttgtcgtttctaatggctgaggaatattccattgtatacatatactacatcttctttatcaacttggcctaattatttacataagctcagcaagaataatgatcccatatatctttttagaatctgctttgctggaaccttttttttttttttttttaagattttatttatttattcatgagagatacagagagagagagagagagaagcaggctccatgcagggagcctgatgtgggactcgatcctaggacttcaggattatgctgtgggccgaaggcgggtgctaaaactgctgagccacccagggattcccactggaaccttttataaggaatctctaggttgaacttttagtagcctctccaggtcagaggccaagccaagtatttgccattagacgtgcctgcaatacctgtagatttggtcagatgcctcttcacaaggtccccaaagtatcctgagtttcctgcacctgccagggagtgacattctttacttacctggtgaggctgctgggaactccataagcaaggtatcaggccaacatttccaaagggttttattgcttcagatttcataaagccaaccttagttccttaaagctttttggtcatatctgagtctattcatgtgtcccaaatatgacattccagtcaaagccttggtaaaataaccaatattccaatggtgtccttttacaaaaacagattcttattgaacttatgcaaatgaatatgattgccatggagataacgtaaatttcagagggttcaagtagagagaaaagttaatgctttaatttgtttacaaatgaatactctatcacatttctgtgaatcagatatcttaagagaaagttttaacctgagagagcaaatagaaccagtagtagttcaaacaaggagtcacaaaactatcccatgttactattcttgtttaatttgtttattcgtgagagacacagagagcgagagaggcagagacacaggcagagggagaagcaggctccaggcagggagcccgacgtgggactggatcccgagtctccaggatcatgccctgggctgcaggcggcgctaaaccactgcaccaccggggctgccctaaaccaatgaacttaatttagcttgaatattgagtatgtttcacccgggctcactcttaaaagtcattttgttccccattgccaatttttacctgagacactggtggggaaatctggagtgggcagtgttaattccagggagtgctctttgctccttgacagagagggtaggagccaatggtgccagaggcaccagggaaggtatagaagccagttactaggctgcgcccaaggtggtgcagaaacaggaggagggggaggggagatagaagaggcaaagtgcagtcagaaagcagagaaagggttcctggttctagagcttgtccccttggatagatgagtaaatgtcatgttttttttttgtttttttttaagattttatttatttattcatgagagacaggagagagaggctgagacacaggcagagagagaagtagactccctgtagggagcctgatgggggactcgaacccaggactccaggatcatgccctgagccgaaggcaggcactcaaccgctgagccacccaggggtcccacgtcatgtttttccaccaacaagtagaatgaggcagtccatattaggccggacaagacagggaatccccgaaacaaagagactttcggcagctacttgggaatcttccttgaagtccccatcctgaggtagactaaccacagttggccccaattatttccattaacccaggaaatgagtgagggagaaaccccccacatctattaggaggaacagtgagagtaagagtcagagttccctttgtctgggatggcctgtgtttcctccaacatcctgggtttacttggaagaggcctatttagatcattatccaacattgggagggagtttacgagccgacatgtttgggccatttgccctatttcctgcagaggagatctaatggatagatcccactgaagccatgcagtgtcagagttcagtcctttcctaaattttgcaatctgaattgtctccagtggttaaaagacaccccaagggagagtccttggggactgaaagagaagctcccatgctccaagagaagagtaaagaaggtccattaccaaagaaaaccccccttgactcctgggtggcgtcccacgcgcaggatatgtcagaggttcctagtgtcaaagtgacccaaggcatccccctgaacagaatcgcaatgatcactccagccgcagccgtcaaaggccccgtaggagggaggcctgtctcctcctgcttccccatcgcatcctaggctaaggatgggttcagtgtatggatgggtgccagcatatggaccgaaatactgtgccttggaggttatgtagtgagggtcacgccttattttgccttgccttgaggcaaaacccgctggttttaacccatggagaacactagaaaagttttacaaggggaaattacccaattttgtagcttaagtagttggtagaggacaacgacagaaaacagtaaagatagaaatccatcttggtctaagcgacgttccaacacatggagtcttttttttttttaatttttattttatttatgatagtcacacagagagagagagagagagaggcagaacacaggcagagggagaagcaggctccatgcaggcagcctgacgaatnnnngggcgccagatggcgctaaagtgcggggccgggggggccaccctttcttgggggtttagagataaaggaactttcttgggcagcccgggtggctcagcggtttagtgccgcatttggcccaggatgtgatcctggagaccctggatcaaatcccacgtcaggctctctgtatggagcctgcttctccctctgcctgtgtctctgcctctctcaccctctctgtctctcctgaatgaataaattaagaaaaaaaaaaaaaaaagagagaaataaaggaactttctaaaggaatttttatcttaaagaagacttacaggatcctgggggtcatcctgggggtcaagctaagattgccttttgcccttagcaaagtatgaacatcgaggcggttgagtctgtagaggaaggtccctctgcctgtttcaagggcttgtcaatgtgctgccctgggcttgtgctttgtcctcagccagtcctctgttcccccatcatttaccatggccctatgccctatggctcctacttcatttactcttgtgagtaacatcagcttccttgaacttcactacattgtgattccttaattccatatttaccatttacttgttgggtttctaaaatgtaattgcatataaacccaagaactatgaatagtaaaataacccctacctttagtccaccaactattctatcttaggtatcactgttctttctgaaacattcagtggcttaagctctacccaacagacctttgactttgtgtgtccttacatgtgtgcatgtgcaagtgtgtatttatgtgttcacatgggcacagacctgtgtccacatatgatacaaaagaggaagagaaaagaagtttctccatgcctcttccttctcccttctaaggcagatgttgtctggagctgacaaagttttgatgtgtagaatgcagggttgtggaccccaacagatgtcctgaggcacagggagaactgggtaacttaggccctgcctatgaactcacaaaggtggtgagtgtgcctgaattccagcctatgctcagctcccttggcctcatgctcagcaaggcatagattgcctacccaaaggaaagggccttttttttttttttaaagtttatttatttattcatgagagacacacacacacagaggcagagacacgggcagagggaggagcaggctccctgtggggagctcagtgaggatggatccgggatcccaggatcacgatgtgagctgaagacaagcagtcaactgctgagccacccaggggcccctggaaggggtctttttttctaatttgcacaaaaggtgccccttgttgctgagcttgtatgcctatgggctgcctgtacctatttaattcaccctgaggaggagtcttttaaaactgcacacggtctccctataggcaggctgcagccagctcttctgtgtggaggtcagaagatttctctcctactggatctgaaagccagatatctgcgtgtgagtcatcactggaacccctactctttctcttccttctttcttccatccagtcaatgtgtgactattgaatgaaaataagctaaaggggattcctgggtagttcagtggtttagcgcctgccttcggcccagggcatgatcctggggtcctgagatcgagtcccacgtcgggctccctgcatggagcctgcttctccctctgcctgtgtctttgcttctctctctctctgtgtctctcatgaataaataaataaaaatcttaaaaaagaaaagaagctaaagacagacacattccattcttcaattcagaccaacaccttcctctaggactctctgtccccaggcatgctgctccagccaagcttgcagggctaaggatctggctgagtggagggggaggtggctgagtgggtgatggaagaattcacgcaaggcaggacaaaggagatagaagtttactgaatacactgcaagggagcagtgggcaggacaacagagagagactctctgccaggatccagtgtggggtgggggggtggggaggtggttggggggactactcttaagtgggggagtgggcaggaatggggaaggatgcaatttcccatcgtggtacctgtacccagttgtaagtgaccctttggtcagctgactatttccagggggggtcacctcgtgggcctgtttgcactcacctggtggtcactgtgggccctcctttcttactcaaattccagtgcctgctgcctgaaagcagcctctacaagctcacagggggtacggcccatactgtactccactcagggacacttggggctatcctggctccctccggattgcctctacaggtttctgaccccctcctccctaattttaacttcattttagagagtgctattttctgatgctggcaccaaataggtatgaactgtttctggagccccttgtgcactggcctcacttttgaactcagaggacctatgaatgtatggaataattaaatctacctttaaatttttttgaattaatttatttgacaaagagagatatcgagagagcacaagcagggggaacagcagagggagagggagaagcagactccccacagaacagggagcctgatgtggggcttcatcccagcaccttgggatcatgacttgagccaaaggcaggcgcttaactgactgagccacccaggcaccactcccagcctttttaaagtaggctccatgcccagtgtggagggtaatgcagggcttgaactcacgaccctgagatcaagacctgagttgagatcaagacctgaactaagatcaaaagtcagacacttaactgactgagctacccaggtgtcccataattagatctgtcttaaaatgttcaccaaataatgagtgtacacaacagttatatggcagaatggtttttaaaataatggttcagtctttttaaaaaatattttatttatttactcatgagagatacagagaggcagagacacaggcagagggagaatcaggctccctgcaaggagcccgaggcgggactcgatcctggatcccggaatcatgccctgagccaaaggcagatgctcaactgctgagccacccaggtgtcccatagcctttttattacattaaatttcatagagaaggaagctcactaaataagacaaactcagaggtgaaacttctctgggtgaagaggaccaaggagttgagccctacccactgtgtatccaacctgatacttaccagatcctctagagacctctcagtggacctcttgaacatggtttgcaaatgtatagggtggtgaaaagaacccagcctccaagttgggaaatggtgtgcatccctgctttgtggttaactatcttagtgacctggggcaaatgaaacaatccactccctctctatcggcctcatgctcacaccaacaggcacaggaggccaagctatgcaggtgcctgaacctctgatggagaattactcagatatcccctccccctcatccactcagaatgccctttctcagcagcctcctctatcttgtcatttggctatttattggatggctatgtatctctgatatcattgcagctgattgctgcttcaaattccatcatcctcatcatcctcttcaatggaatctcagtcttgtctgggtgacaatattctacttaagaacacttaagttccccatactcctttgcatctaggggtggccacatgactatatggctaatgagtcatcaacagaagtctgcctggtgtggctttcagcaattcaagtgctttcctgattaaaaaggaaaagctagattctgttgcaacatgtcttttgctccttcctcttcctttctgcctgaaatgtggatgtgatacctgtaagtggctgtaagaacagccacttagcacccatgaggcagaaggatggactagtataggtgggaggtagccactcaggcaactttggggacattttaccaaactagaaaaattgggtcaatgcggcatcaacgtctttcttagtgagcactgtccttgtagtgatggatagaggcggggtcttggagcctttaacacccatcctgcctgtgatggtaagaaaggaaaatccaaagaggttgggtgtcagctgaggcctatgaagggctaataggacactgatcttgcctgtcctacccaacgtcttttaataatatcatactaataatctttctcccatgaccttgtctctgtttcccaggctatttctatagtctcagtatttggccatagctttgagaaaattctcttaccattattctttgtttattttgcagttctttgaagatattcttcagatggattttttgtcatttgtcttttttttttctctattccttgtgtgtcatcattatttctcgcttatttcgtcacatgctcactccctgaaatttgatctactcttcaaggtccgtctcagatgcttttatgaagccaccctcgatggagacatttcctttctctggaaccccacagcacttattttctgtggcttctgtgatcatcagcaaactggcacgtgcttgattagacattcttttactaccctgtagctccttaaggcaaggattgtcttgtactgagccctgcccttggaacactgtacttgcttgataagtattcattgagtccaaatggaaattccaatttgggaagagaggacagacacactaagcatgatgcatttaaataaaatggagatcattttcctggagaaatgcctcctatacatgtctttgctacccagatataggactaggaaaaaaagggagggcatggctgaaaacaacctgctcagagaactcttcttcaggagaaacgcaagctataaaagaaatcactgtcacctttcatcacctgtaataaggaaattctgaataactctttcctggggacccactgagtcagaggttcacatctaattaggtaagcagcagatgtgatcagggaagaagtgatgaatattctttcggcttcatcacccagcatcagctatttatatggcagtgatgcaggtttccatacgtagagtccttgctgttgttcagagtgctttcacatgcccaaacaggacagagcaagggtagctgcctagaaaaggaacttgctggaggaggttcaaaggatccctcaactgttgaaccagaagaagagccttcttcagagtgggaacatgacaggaaagggaaagcagcacttctctttctggacagttttaacattggcatgtctggcaaccaattaaatgtgagaactggaagctcaggagggagggagtgggctgaagagtagatctcagagtcactggcatgtatgtggggattaaaacatacatgacagtgggcaaggtcactctgggagggtatggagaaaggggagggtggagtcccaatacttagttggtgagtagaggacaagacccctgagaaggccaggaagggaggttaaaactaggtaagagagcaagttatcatggaaattaagagttaagacttctgagacaagagagagagagacagagagagaccgagagagagaatgaatcagcaccaatgaatgcaacagagtttctgggaaaggaaactttcctgtggggcacaggcaggggatgcatgggaaaaagtggagacagaaggtagatttccaatgtatcagaaagaaaggcaaagcaaggagaatatagtagacacagaatatagtagacacagaattagggtgaccgtcaccagctgtcagctccttcagggtccttctttttctgagcagctccatggtgactgagcagggctggggctggaaaggcctagctgattcattccaatttggtttgctctgtgaagttctccatagctatctgagactctacaggcctccctttgccctgccctgcctgcttcctccccttactgttacagaggttgactcctagtcaacatcttgcatcccaaatcccatataagtatctgcttccagagaacccagtctctgacagagtggcagaaacaagtcttttgaagagtttattggggaaggagaaaagaagggtttctaaaattgtttctttttgtttaagagtaggaaagagaggaaggaacctgaaagggggcacttgaagatactggaaagaggatggctaataggtgagccctgggaagaagatagaaggtggactttaaggccaggaagattgattggcctggaataagagggatcttttgtccagtctctgtgattgaggctgagggcatattgatcaggttaatttagattgtttttgaggtagtcaaggaagtaaggaacactctgctcagtgacttcagtgaccaattgctagagagatgaaaggaggaatccttgaggttaaggtggataagatgctttcacccacagtaaggatttgggggaagcagggcaagttttagctgagctataaacagaggaggaactttgggcaaaaccataaaacaagagaatgggatctgggatggagaaaagaaagatccatttctttctgttagaatctgtttggtctccaataaaaagtaaatttattataaaaaaaaataaaaatggaaaaagaaaaaaaagaatctgtttggtctgactagatggatttggggtagattctggaatctaatggattttctttttttttttttttaatttttatttatttatgatagtcacagagagagagagagagagaggcagagacacaggcagagggagaagcaggctccatgcaccgggagcccgatgtgggattcgatcccgggtctccaggatcacgccctgggccaaaggcaggcgccaaaccgctgcgccacccagggatccctctaatggattttctatccttcaaactctgtaccatcttcatatttgccaaatgtatcctatatacaacacataagacatgatacaaatactgagcaggcaggagtgaggtgagaactcctcagcaccttggaattctgtcatttaaccagcttcagatttctccatttgttccggaaggatataatttaagatgtcatgaaatgccttaatcacatgcagaccctgggtctgttatagtgcctctttctatcagtcttaacgggggacaagagaacatgaatgaggacagtctggcactgcgtttgcttctcctgtcttcacaagacacctttttgtatcttatttgaggctttttgcctacggtcattgtcaaggccactgatttgtaattttcaacattcaccttttgtccatctttggaagtcaaagccatctctggtcttctaacacctgtctgcctttcatgatggcgactttggtgtaccacgagtatcaccattttttgggtgctctgacatgtgatcttttcatagtaggaagtttaaacacgtttagtgctgctacagtttttcttactttctttttttaggtgttgggttctaatctctgtttaccaatagtcatcctacccttcccactcaaaagtcatgcttcccattgagaagctggaagcgctcaaagtcttctgctctttgtctctcatctggaaacactgtgtgaatggccatgagtgaaggacgtatccctttgtcctttttccttttgttatagccagttgcacataatcccaagactaaacttgcttatctttttcctgtaggagtccggataccctcaatgcccgggctctcctaatgcagcgactcacagattctcatggggaaatgggggtgggaattaaaaagcaagggcaataactctaatgggacccgctcacacattctgcgacgacaaaggccctgctcaagccggctacttgcacgtgtccaatttatttggccaccaggtggcatgacttgagcgcgtttacttaagaagaaaagaggaagtcgtcggttctaaaccccacaacggccagcagatgaaggtgccccccgcttgtggcccgtgtgaattgtgccgtttcacttttacaaaaggcctgcatcagtacctgctttccctaaccaaaagaaatctgagaagtttttctccagtggaaaaaaagtgagagcagcggggagccctgacgtcccgaaagcctttctccggacgcagcaggcaccaccagccggggcagtggcgccaccacgcgctgagcgggggaactgcactcggcatctcagcgtctccgcagtgaactggtctgtgagcatctgcgctttatctggatttgctttgtacatccatatgtcctgagggatcagaacagcttaaaaggttattttttggatctcggggtgctaaaatttttttcccataaaattaatattaattatttcttcaattttatgccatttcggcttccagaagttttcataggaatgctctatttttggggatccctgggtggcgcagcggtttggcgcctgcctttggcccagggcgcgatcctggagacccgggatcgaatcccacgtcgggctcccggtgcatggagcctgcttctccctctgcctgtgtctctgccgcgctctctctctctctgtgactatcataaataaaaaaaaaaaaaaaaaaaaggaatgctctatttttggaaaggaagggaaacctgtaatcaatgctgaaaatacaagaaagcatatttcacgtgtctgttctaagtgacacttgttattttgatgtgtttttcttgccatcaaagtacagacaaattcctttcttaaccttaaaatgataaatatgggcctcctgagcctgttcagtctggattttcctctcctgcattttttttttaatttttatttatttatgatagtcacacagagagagaggagagaggcagagacacaggcagagggagaagcaggctccatgcaccgggagcccgatgtgggattcgatcccgggtctccaggatcacgccctgggccaaaggcaggcaccaaaccactgcgccccccagggatccctcctctcctgcattgtgtgtagaaagccacctgggagtaagaactggatgcaggcttatctttatctgcaacatgcactgcccttggctatagactccttgacacagagtggaagacgttaggcaggaattattgctaatattagcattattggactaaaacatgcatcccattttgcgaagtgctaactatcctgcggtgtctgaagatgagtacagttggcccctgcatatcagcctgtctcttttggttacatccagattggatttggcacttgtgagatctagagtccaaggtaaggagtgcctgagagtccaccgcaggtggtcgcagctgagaaggtgggagcaggaggcacaaggcaagagggagctgagaaaagtaaaggcattcaggggtgacttttgtgcttctatacattttgacgctggagaattttaaaggactatttctaatatttattttagatggatggattcattcaataaatctaccaggcctgctgtaggagctggggttaaaaggtaaataaggcaaggttctaggcttcagggcactttatagttttggtcattagtcccacaggggcaagatggagatcctaggagaggctcttcccctgaggccccaggacagtcccaatgcccagatgtgtggatggagacagagctcccagtgaaaacaaaattcctttaaaactttgttgagggcagccctggtggctcagcggtttagcgccgccttcagcccagggcgtgatcctggagtcctgggatcgagtcccactcgggctccctgcatggagcctgcttctccctctgcctatgtctctgcctctctctgtgtgtgtctctcatgaataaataaataaaatcttaaaacaaaacaaaacaaaactttgttgattgtggggcagccccagtggcctagcagtttagcgccaccttcagtctggggtgtggtcccggagacccgcatggagtcccacgtcgggctccctgcatggagcctgcnnnnnnnnnnnnnnnnnnnnnnnnnnnnnnnnnnnnnnnnnnnnnnnnnnnnnnnnnnnnnnnnnnnnnnnnnnnnnnnnnnnnnnnnnnnnnnnnnnnnnnnnnnnnnnnnnnnnnnnnnnnnnnnnnnnnnnnnnnnnnnnnnnnnnnattttctttttttttttttaaactttttttttttctaacagccccacagagagagagagatagagaggcagagacataggcagagggagaagcaggctccatgcaccgggagcccgacgtgggattcgatcccgggtctccaggatcgcgccctgggccaaaggcaggcgccaaaccgctgcgccacccagggatccctgctcatttcttatataagggaagatactgagggtttcctgaagaaggaaagagagagcagcataataagagccatgttgcaatagtgtaaattgctccctgatcattgccgggatcttgatgatctgataaaatggctggtgtataaagcagagcaaacatactcttgttatactgaaagcctgaaatttcacctacagggaagggagagaaaggtgcatagcaacaggccgtgtaggagtggattggagaagtccagaccgatgtcaggaaaaatagtttggaggctattgaacctgtttcaatgggtgatgaaagtttgaattaagacaatcaccaaagggcaggcggggacagaagggagacagatttcagggtaggaagggcagatcgaaggctgagggagaggaagaatgactggagagaacatcactgccaggggcctgaccccaaggcctgtgttcttttctgaggttgcccatgttgccctgtcaacaaggacctcactttagtccagttctttcattttatagcaaaaggaggaaattaaaacccaggaaatggaaacccttgtctatggctgaactgcaagatggtggaagactgtgttagaagccaagtctcttcccagatccaacctccttccacaggttcacattagaacttgcgtggtagaagcacctgaggagcatttccaaacacttgggcctgggcccaggcccagccaactggaatccccgcgctggtaccactggctcattccaggctggtgcacaagcttctcttcctgccatggtcttccatagcacattctgcctaaaccccactccttccttccttccttccttcattacattacataagcatatcctcaacagctaattgcctagagtgaccttattttaaatgctcttactgagggcacctgggtgactcggagttgagcatctacgtcttggctttggctcagatcatgattttggggtcgtaggctgaacccctcatcaggctcctcactcagcacgncggctaaccccatccttgctcttccttcttcttcctccttcttccttcttcctacttcctacattctactttctttcttcattctctctctccttcttccctccttcctttcttcctttccttctttctttctttcttttcctttcctttcctctttcctttcctttctttttttaaaggattttatttattcaggaaagacagagagagaaagaggcagagacacaggcagagggagaagcaggctccatgcagggagcccagtgtgggactcagtgctgggactccaggatcacgccctgagccaaaggcaggtgctcaactgctgagccacccaggcgtcccaccactttcttttcttttcttttcttttcttttcttttcttttctttttttttcttttcttttcttttttctttttttctttctttctttctttttctttctttctttctttctttctttcttttttctttctcttcctttttcttcctttctttctttctttctctttctttctttctttctttctttctttttttctttctttctttcttctttctttctttctttcttttgattttatttatttatctgagacaaagagtgagcaagcgaggacaagcagagggagcagcaggacagggagaagcagacttcccactgagcagggagcctgctgcgggtctcgatcccaggaccctgagatcatgacctgagacaaagtcataacccataatcatgactctgatccactgagccacccaggtgtccctgaaccacactttcttttttctgtttcatacttgcatcacataagtgcaatacattacatagtcccactgatcattggaaagatgctgagtgtttagatggagaactacatgtgagcaaacaccaaaatcctttgccataggtccattagtgattaaaacaacaacaacaacaacaaacaaacctagaactaacttgcaaacatcttattgaaactacacgagaagggagtcttctcctgtagaaggaagggagggaagattaatggataatcattgttcgacaagcacttaataatttgttttgtaaaactgatcatttctttataagttttagtaaaaataaggaatattttttaaatgtaacaaccaagatcttaaacactaaaaaattgtggtaaatgggactcttgggtggctcagttggttaagcatctgccttcagctcaggtcatgatctcagagtcctgggatcgagccccgaggtgggctccctgctcagtggggagcctgcttctccctctccctctacacaggcctatttgtgctctctctctcctctcaaataaataaataaaaatcttcaacaaaattgtggtaataaaatttaccatctcaatcatttttaaatgtacaattcagtggtgctaagtacattcgcattgttttgcagctaatcaccaggacgcttttcatcttgcatgactgaaactctgtacccattaaataattgccattgtgccttcctcctaggccctggcaatcaccattctaatttctgtctctgtgaatctgactacctcatataagtgggttcttacagtatttgtcattatggttggttcatccatgtgatggcatatattggaatttcctttctctttaaggaggaataatattccaatgtgtgtggagtatatatatatatatatatatgtacatatatgtacatactccattggtatatgcatgtgtgtgtatatatatacatacacacacacatcatattttgtttattcattcatctattgatggatatttgggtggcttccaccttttggctattgtgaataatgctgctatgtgcacaggtgtataaatatatattgagactctactttcaattctttggggaatagtgggacttctggatcatacagtaattctatttaacatttcttgaggaacggccatgctgttttccatagtggcttggtaattttataatcgtaccaacagctacaagggttctcatttctctacacccttgtcaacacttgctacttttctcttgtgatgtagacatcctgatgggtgtgcggtggcataatgtcttccagaacatagattgactgaagattgtgacctaccctaaactttgcataaagtcctaaattctttaatcatagtgctttcatccaagccgatttttaggatggttgtagaaggaatactctattgtcattttaacaatctttatcaactgggatgcctgggtggctcagtggttgagtgtttgcctttgactcagggcgtgatcctggggtcctgggatggagtcttacattgggctcccctcagggagcctgcttctcctttgtctctctctgtgtgtctctcatgaataaataaataaaatctttaaaaaaaaaacataatctttatcaactaaaacagtaaaaattaattattattttgattttttttattggtgaagttgaattttctactgtgatttttaattagttatggcttctctgctgtaaactgtttgtgtttgaatttctcacacaatacaataaaaaataaaaatagtgttttctatgtgctagttactgttctaagagctttacatgtagtaagtcagttaatcctgacccaccaggaggcaggtgcaatgattagttagtctcagtgtatagaggacacagagacatgaagaaatcaagtatcttgccccaggtcatacccaggaagtctggattcaaagcctgtgcaaactacaaaatagccaatatttatctgatttatttgtttgcctttttttccctattaactataatcattaaatttttatggttagggaatgcctgggtggcctagtcaattgtgtttgcctttggctcaggtcatgatcccggggtcctaggactgagccccacattgggctccttgctcagtggggagcctgcttctccctcttctccatgcttgtgctctctctctcactctctctttcaaataaaaaaataaaatctttttaaaaatttaaaaaaatttatgattaaatctatcagcctactccctttcttttattgccccccgtccctttgttttcagtcagtttagaacatcctcttctcttcagagattagaaaatatttggattttttttagcatgatatatattttttcccaaaaaaatcaattatttctcccaaatcatttattaaagacatttttgtttctgttgctttataatggaaactttctgctgagtattatttcataattgcttgtttttatttttatttatttatttatttacgatagtcacagagagagagagaggcagagacacaggcagagggagaagcaggcttcatgccgggagcccgacgtgggactcgatcccaggactccaggatcgcgccctgggccaaaggcaggcgccaaaccgctgcaccacccagggatcccaattgcttgtttttaatgtccagtcagcaatttgaggatactgaagtctccttctggttgctcttttggcttcatttggtgtgaatctatctttagcgtgctgatactctggctgcctttctctttttttttttttttatgataggcacacagtgagagagagaggcagagacacaggcagagggagaagcaggctccatgcaccgggagcccgacgtgggattcgatcccgggtctccaggatagcgccctgggccaaaggcaggcgccaaaccgctgcgctacccatggatccctctggctgcctttctcgtgtgagtttttgtgtagttcagaacacagccaacaagttcatttcttgttgttttttttttttttttttttttctttttttttctctctgtctcccttctctgctcctcagcccttcctgtccagtgactgagtggttgccctccctggggcctgtccagagtgaggtcttacaggcagtctgggctcctgccccagtatgaacttaggcatgaccccctccaggcaggagggagctgtgttaggtccacatgcagatccattttggtatccagggacttcactatccatctattttctttctttttttttttttttaatccatctattttcttgaagaggatggagagaggccagtggcagctcctggagtgttttttgtttgtttgtttgtttgtttgtttttttaactcttttttatttatttattttttgtatattttttattggagttcgatttgccaacatatagcataacatccagtgctcatcccgtcaagtgcccccctctgtgcccatcacccagtcaccccatccccccgcccacttccctttctaccaccccttgtttgtttcccagagttaggagtctctcgtgttctctcatcctcactaatatttcccactcattttctctcctttcccctttattccctttcactattttttatattccccaaatgaatgagaccatatgatgtttgtccttctccgattgacttacttcactcagcataataccctccagttccatccacatcgaagcaaatggtgggtatttctcgtttctaatggctgaggaatattccagtgtatacatagaccacatcttcttcatccattcatctttcgatggacaccggggctccttccacagtttggctatcgtggccattgctgctataaacatcggggtgcaggtgtcccggtgtgtcactgcatctgaatctttggggtaaatccccagcagtgcaattgctgggctgtagggcaggtctatttttaactctttgaggaacctccacccagtttccagagtggctgcaccagttcacattcccaccaacagtgcaagagggttcccctttctccacatcctctccaacatttgtggtttcctgtcttgttaattttccccgttctcactggtgtgaggtgggatctcattgtggttttgatttgtatttccctgatggcaagtgatgcagagcattttctcatgtgcgtgttggccatgtctatgtcttcctctgtgagatttctgttcatgtcttttgcccatttcatgattggattgtttgtttctttgctgttgagtttaagaagttctttatagatcttggaaactagccctttatctgataagtcgtttgcaaatatcttctcccattctgtaggttgtctttgagttgtgttgactgtatcctttgctgtgcagaaactttttatcttgatgacgtcccaacagttcatttctgcttttgtttcccttgccttcatggatgtatcttgcaagaagttgctatggccaagttcaaaaagggtgttgcctgcgttctcctctaggattttgatggaatcttgtctcacatttagatctttcatccattttgagtttatctttgtgtcttgtgtaagagagtggtctagtttcattcttctgcacgtggctatccagttttcccagcaccatttattaaagagactgtccttttccagtggatagtctttcctgctttgtcgaatagtagtcaaccacagagttgagggcccatttctggattctctattctgttccattgatttatgtgtctgtttttgtgccagcaccacactgtcttcatgatcgcagctttgaagtacaacttgggatctggcattgtgatgcccccagctttggttttctttttcaatattcccctggctattcagtcttttctgattccacacaaatcttaagatgatttgttccaactctctgaagaaagtccatggtattttgatagggattgcattgaatgtgtaaattgtcctgggtaacattgacattttcacaacattaattcttccaatccatgagcatggaatatttttccatctctttgtgttttcctcaatttctttcagaagtgttctgtagtttttagggtatagatcctttccctctttggttaggtttagtcctaggtatcttatgcttttgggtgcaattgtaaatgggattgactccttaatttctctttcttcagactcattgttagtgtatagaaatgccactgacttctgggcattgattttgtatcctgccacgctgctgaattgctgtatgagttctagcaatcttggggtggagactttgggttttctatgtacagtatcatgttatctgcaaagaaggagagtttgacttcttctttgccaatttgtgtttttttttttttctttgccaatttgaatgccttttacttctttttgttgtctgattgctgaggctaggacttccagtactatgttgaatagcagtggtgagagtggacatccctgtcttgttcctgatcgcagaggtaagggtctcagtgtttccccattgagaatgatatttgctgtgctcctggagttttgatcagtgagcatgactctggtcccccacctcaagtgggcagttgaattctttctcatcacttgacaggccttggattcctagttgcccttggctgtacctagactcagagcccaacaggccactgcttcagccctattaattttttgcattgatattccatttctgagaatatctatggggatatcccccgttgttgaacatggagtttttattttctccaatattttctccatcattgttctgcatcaaaaactctgggttatctgttctgtttcactcacgtgtctgtgtcttttgtacaagtacgaactgtagctttgtgctacatggtagggggctattctaacaagttcctccaatcatattctgctaactttctcaaagctggatcaggtaggcggggctatagcagtcacctgagatgaggctgggggaagcggtactgtcccccacccaacacaaggatgcatgaaaggagcccagggatagcagctttaggataggaggaaggtttctgtatgggttccatgacaacatttcatcaggggtctcaagtcaggctggacccagcaccagggagcatatgagaacaaacactggaggctggagatggtgcctggatggacaaccagaagtgtcatatgtcatgggtgtatatgatagcaggatgcatctagagcattacttagccgtgtccttgggacccagtgagcaaatcatccaatattccaaatctgtcctggtctgggtgaggaggggattctcagttcttttcacatggaggcagggctcatgcctggctctagtttctttcccttctcctgctgcaccagtattctccatggcatcgcaaggtgatctcaacatagaactgcatcagccacggggcacctgggtggctcagtgattgagcgtctgcctttggctcaggtcatgttccaggggtccttggatcgagtcccacattgggctttctgtggggaacctgcttctccctttgcctatgtcgctgcctctctctctgcatgtctcatgagtaagtaaataaaatcttaaaaaaaaaaaaaaaaagaattgcatcagcctcctttgcaatataaagagaaccaggctcctgcatgtgtcccctcttggctgtgaatttaaggacagtaaggagcagcctctgtcccaccagaagccctggctcctcttgccaccagccttctggctcagtggggctgaggagcagacatgggctggtttaccaccagacacactggactacctgcttggccagactgagcaccagtgcaagtttgtcccagaggccaattcttcccggaattgtcatttcaggacagaagatgccaggagccatgacttggcccttcggcccatgaacgtcttccagtcctgcctgagatggcagattgcatagctagggccgtgggcctgagctgggatggcaggtgcgtggggaactgcgggaagcctgccaggggcgccctggccacatcttgtggcggtgggtcctcccagagtacatgcgtgggtgcgcgcccatttagtttttctgcgatacagcactgacccatggctccacgtcctactcacgtattcagctggacctactgccgccgctcaggatctgtggtgcttcagaccagagtggctacgactgcagcactgcaggcacacgtggcacagtggggtgagagggagaggacagtgctgtgtcctcactccccaaatgctgctttgtccaccctgcctggtaaccgaggcctggagaatgtcctgaggcttcagaggctcaggcagtgggaggagaggggtgaaggagctgatcagcgcagccggtcccagacagactccacggctccacggcaggcatccccactagatagagagccccggcttccagcaattgtccttgcctgctcttgccctgtgctctagagaccacgggtgggcgggaggcacacacagttcaaggactgctcagggaagacactgcctggaccaggagcctgcagctatgtttgaggaaggagggtggctaactgggccttaggggtgcaggagaggagttgggggcagagaacggggtgagggcagagaggctgagcaggacaaggcaggggcaaccttcccagcttttctttctttctttcttttaagattttatccattttttcatgagagacagagagagagagagagagaaagagagagagacagagacacaggcagagggaaaagcaggctccatgcagggaggctgacgtgggactcgaccctgggtctctaggatcactccctgggctaaaggtggcgctaaaccgctgagccaccggggctgcccccttcccagctttaatcgcaaaaataccagtgtactctggctcctctgtaaagcaccacgagctcccctgcctgggtcagaatactagagggttgtactgttagacgcagccaagttagtcggggggtggggggtcatggggcttgtaattctctggttcaggctgagaagatgccaagctctcccaggaaaaaaactatgttcttttgttgcctgtaagaaaccggaggaaggagggatctaaatggagaaaaagcagggagatagggtctgcttatccttctgtggctcctgagttttaaatactagacctttgagggaaatgaaaggattcacagcaaaagcccaggatttaggagaaggggagtctaagagcaacatgcccaccttggactgcaggggcagaggggacatgatgaggctagggacatttgtgggccctagaggaaggggtccttgggctaagccccgggaaggtggtacaagtgccaagaaggtttgtgggacaggagggagggcctctgtcttgcttcgttgagtctggggcaggctggagcccttgggaaggaagtactctgtggtgctgccagctgcgccaggtgtcaaatgcctcagattggtgccctatgcctcagtggggcgctgtgtctcagcagggtcctgtgtctcaggggggcttggccctcagcgggaggcaagaggagcacagctggttccaacagagttatgcccactagggagcatgctacagcctaaaccagaaactgcccaaatatccttccacaagagaatgagaagaaaaaagaaaaattgtagcagtttcatgcaaagagatgcttctcagcgatgaaaatgaatcatctcgcagctccttgcgatggcccaggtgaatctgcagacatagtctagtaaaagaagctgactatccaagggcacatactgtcaggttccatttatccagacatgaatgtagaagccaggagaatggttaccctttggggaagggtagtgactaaaaggggacatgagggcggcccctggcattctgggaatgttttattccttaatctaggcgctggttgcatgatatgctcagtgcgtggaggttcattgtgctgtacacttaacaatttgtgtccttttctgtatttatattatattaatgaaaatcatttttttaaaaatattttttaatattttatttatttatttaggatagtcacagagagagagagagagaggcagagacacaggcagagggagaagcaggctccatgcaccgggagcccgacgtgggattcgatccggggtctccaggatcgcgccctgggccaaaggcaggcgccaaaccgctgcgccacccagggatccctgaaaatcattttttaaaaggatttaagtattagaaatgaatctgcagaatggagtgaggaaaatgggaatggttttttgtcatctcaatctcaccggcttcggtggcttcctcataggatcttcactcttgtctcatcaagaggaggggtgggtgcttgctttggcagcacatatactaaaaccagaggaggggtggtgggggagaatttaaatcgtgaaggacttttctgcttgtccttttaatggcttcctgaattgatctcatgcatttttcagctcttgtaaagactttaatgagctagatgggcttgtgttattgagagctccttcatcaaatatcagcgggaccaatatgagcatcagcatccgtaaatccagcagtgaggcctgtgtggtggtcacagtagccaggcagaccctgctgatcaggtttgaggccttcctggtatcttctccagggccatcaaggttcacaggcgctgttgctaaagtaggactcagctcacctggaatcacccagaaggaggggtctacttttatctagtgcgggagattaaagacggtcacaaatcctttgctgtttgtcccattaaggggggggggggtgggtgttcccttgaacctgggcaggttctatggctttttgatcaataagaattggtaaagggatactgggccattttccagagctaggcaacttccacttccctctcttggaacactctgggaaccctgacctgccgtacaaggagtccaaattccccaagactgcatgtgcagtactctcgtcaactaccagtggagtccagctgtctccaccaaggagacagaaatgtgaggcaagccgtcttggacactctagaccaagcccatctgcatctgatggtgccaggtgatttcagccaacataaagagtagaagaggggtgcctggctgctcagtcggtaaggcatgtgtctcgatcttggggtcatgagttcaaatcccatgttaggggcagggcttacttaaaaatagataaataagtaaataaactgtaactcttatatttaaaaaaaaagaatagaagaattgccaaactgacagacaaaatcatgagatatgaggcagtgttgtttgttttaagctattaagtttggcatagttgttttccagcaataggtcaatggaaaagttgaatctttccttagaccagagcctttatgcccatgatgagcagctccttggctctgtaagaattcatctccttaactcacttggccaaactctggctaaaaatttaactaactctttattccattagaatctatctaagctgccaggctcatggcaggataatttattgtagatattgtagaattatttttcctgttgctctatgcacattttccgacaaaaagttatgaagtttttgttctctattttttgttctctattctgaatttctttttgtgtatgaaggtgtgggtggttgttggcatctggattgtgtgctaacacctaggtggacagagacagacgtgagctgtgggtgtgtgctgagctgaggctgggattcttcatgatctggagatttggggctttctctcctatgagtggtggatacccaggctactaattttgcccagagcattcctagactaagggatcactggagaaggcctagagagcctgggcacagtttctcccaatagaagcaccgaggccagggtcccccagagagaccctattgtcagtgacatggatgcatgggaaggccaggactgcagggcttgacaacagtctctgaaagcagagggagtgacagaaacggccactgctacagtggactgcatgtgtgtgccactgaaaattcctgagttgaagccttcatccccagtgctttgtaacaagagttcccccctctctctctgccatgtgaggataccgtgagaagccagccatctgcaggccaggaaaagagctctcatcggacactgagcctgccagcacctccatcttagacttcctggcctacagaactgtgagggaaacgtcgtggtctaagccacccagtctgtagtatttcattgtagcagcctgagctaagacagttaccactaagggcctgggcttgctttagatttttctggtatagcataagcccctgatattttatagccttgtggagggaggacagagccccactgatgactaagattgaatttattcccagcctggcaggttggggtacagagtggattccatttggttgagaaaaaataaggaatatgacatttggtgtacattttataataaaaattgataaacaacataattctcaagtcattggaacattttatggccttctctcttttttaaaaaaagattctatttatttattcatgagagacagagagagagagagagagagaggcagagacacaggcagagggagaagcaggctccacgcagggagcccgacgtgggactggaccccaggtctctaagatcatgacctggaccagaggtggcgctaaaccactgagccaccagggctgcccagccttctcttttttaccctgcggctcctctgtccattgaattctaggctttttccttggcaggtttttcctgaaacctctccaggcttggaatttttattttattttattttttacaaaaagaaaggcatgaaaacagaagagagactttcttagaaaaataaaacctgagtattttttatgtacatctatttcttgcttactgaatattcgctttctatatttttttaatctttatttatttttaaagattttatctatttattcatgagagacacagagagagaggcagagacacaggcagagggagaagcaggctcaatgcagggagcccgccgtgggactcgatcccgggactccaggaccacaccctgggcggaaggcaggtactaaaccagtgagccatctagggatcctctatttctttaatctttaaaaatcgttagagagttttaaaaattctaatctttttctcctaacaaatatttcctgggcttttcattcttttttctatgtttctgtttggaaactagtctgtcttccagttcaccaagcatattttctgctatttctaaccgttttctgctatttctaatcaattgagttcttaatgtcagatgtaattttttattccagaatttccatttgcttattttctagatttcagttttgtggtgaaagtctccattttaacatagtttctccatcttttcctctctttctgtgaacctattaaccatagttcttttaaagcccttgcttgttaaagcaatattgggatcactttgtgtctctttttatttttttattattattatttttaaaagatttttatttatttattcatgacagagagagagagagagaagcagagacacaggcagagggagaagcaggctccatgcacctgacgtgggactcgatcccgggtctccaggatcacgccctgggccgaaggcggagctaaaccactgagcccccccgggttgccctgtgtctctttattgcctgttttcctcttggttttcatttttgtgcaagtgtctctttcatggaaatgtctctttcatttttatggcagtgtcccttgccactgattttgatttgatatcaaacattgtttataaaaactgtggcttatcgagatgatgaagtcttctactacagagtattcactttttttctgctaggtatacagagtggaagctgagtacttcaatgcaattggtgacctagcagtgctaaggctgaattgcagttatctatttagttagtgtttaaggctgtagtccaccttttattattattttttttaagatttacgtatttatttactcatgagagacatagagagagagagaggcagaaacacaggtagagggagaagcagcctccattcagggagccaacgtgggactcaatccggggactccggaatcatgccctgagccaaaggcagatgctcaaccgctgagccacccaggcgtccctgtagtccactttttatttgttcttgttcctatagtatagttctcaaggctttgaatgaagagctgatgtattaactgggaatccttccactggaggacccttaactctaatctgtagtgtttaaaacttttggaagacattcatttcagaggtttctgcctgttgcctcatgtgccttcaaaattttccaaatgtcttgaagggatacagtggttttgagacctctccggtctccagttttgtgaccctaactccatggcatgctgcctgagccaagctcagattcttagccttttgcctgagcccagggttagaaaatgcctctgggaaaaaagcagcttcagatcagaagctcactttcttaggttctccctttagaacgttaactaaattagttccatagtatgagttgcttcctcagatctctggtgattataaacattgtttcatttggtttttctagttgttgtttttaagtaatctctataccaaacatggggcttgaactcatggcccaaagatcaagagtcacaggctctactgactgaaccagccaggcatctaagtatgttttgtggccactttagtttgccacaaattactgtaacctatccaatattgaaagttttcttgtttaggtttttaacaatcttttgaagaaacattgtgttttaaaatttattttaaaaaattatttattttactgatatataactgacatatagcattatattagttttaaggtcttttaaaacattcatttatttatttttatttttttttattttttatttttttaaagattttatttatttattcatgatagtcacagagagagagagagagaggcagagacacaggcagagggagaagcaggctccatgcaccgggagcctatgtgggacttgattccgggtctccaggatcatgccctgggccgaaggcaagcactaaactgctgagccacccagggatccctataacaaagcatatttaactctttctcataccttggtcccttttgatagctgtatagtattccattggttgatatagcagttatatgttcaaccagtcacctattgctggacacttcgactatattacaatatagtaagttgttattataaataatgctacaatgactaaccttacacctcagcaagtttccacttatgtgggcaaatctataggatagatacccagaagggagatttctggatgaaagggtaaatgcatttataattttggcatgtaccataggttctgctcctcaggattgtgccatttgcactactgccagcaatgtatgtgacagttggtttcctcagcatcactcatgcactgtgatatcacacttttgaatttctgctaacaacaacaaaaaaatgaatttctgctaaccagtgaaagatttgtataagtttaacatggatacacttaggctaattctccctctggcagttacctaacagtatactcagacttttctttcatgtcagataccttatagttctgagacaggaaaactaaaaggaccccattaaaaaagccattttcctccttttttcatttctgggttctattcttgctaggatttgcgtccccaccccactctacgtaagccttgtgatgcaaatagcatatctattccttgtaaaggacaaatagataatgatatctttggaaacttccagcctaatagataacatctaaggagtgaccaggaggggttgtcgtaaatgttctctaggaccactgactccagggatccctgggtggctcagcggtttagcacctgccttcggctcagggcgtgatcctggagacccaggatcaagtcccacatcaggctccttacatggagcctgcttctccctctgcctctctctctctctctgtgtctctcatgaataaataaaatcttaaaaaaaacaaaaaacaaaaaaaccccactgactctgaatgccttgatgccaagacctctgacttcaggtaatgaatgacttatgaaggacacctggactctgtccttgttctgaccagttcgtggatgcctaagaggacacatgcaccagatcacagttgccagtaaaaatcccagaccccaagcaaaaatgagactctttctttctttctttctttctttctttctttctttctttctttctttctttctttctttctttctttctttcttttttttttgctttcttcctttcttgatctgctttctcccggaccttgaactatatttctttctatagatacagtaagcttcaataagcttcaataagcttcaataagctctgctttcacctcttgctggctcctgtctcatttccatccatcttgatgcctaaagaccttcttggttagtcctgcaggacccctctgggtccttggacccagcctgctgccatcagcttcatccacctaagagtgaattttaaaccaatcaattcggaatgttctgatctacactggtgaggtaatctgtatggtaaaaccccctgccttccattaagaccatgtagtcttgcctgaaataatccactcttttgacttcctgtcccattctcttgcctataaaaatcttccattttgtagaaaatcttcagagctcccttctgtttgttagatgaggtgctgcctgactcacgaatcactgagtaaaaccaattagatctttaaatttactcagttgaatttttaaaacagtatctattttttactggttctgtactgtttattatatatataatacacaattatggagatctaaaaatcccaaccttctctgctgtctgcagctggagaaccagaaaaactggtggtcattcagtatgagtctgaaggctcaagaaccagggatgtgacctctgagggcaggaggagacagatgctccaactcaagcaaagagcttccttctcctttttgttccattcaggccctcacagatcagatgatgcctacccaccagggggagagcagtctactttactgagtccactgattcaaatgctaatctttcccagaaacaccctcacaaacagaagcactgaaaaataatgttttagcagtttagttaagagttaatgactcttaactagtcaagttgacacatcaaatgaaccatcacaaggagtaatagccaaggtataaaaaccccaacagtgtggaggactcaggtgagactgtgtcagcctttcttgctgacacaatgagacctagggtcctacttaggtgtaatttttactgccttagaattaacaactattttgaaaacttcttacatttaagacagcattttcattttggtctgattttcaacattttggggatgaattggtaagtgtgggaggtaacaagttggctgagaccacactgaacaccaggcaatagaagaaatactggaggcatggagctgttgatgaagccatatgccaacgactagggtacctggtgttagcatactatcttttgccatcttaggagagaggcattacccagcaaatttccaccacgggaatctcctcaaagtgaggttctagactataaacagattgtttttccttttctgtgcatggccttccggttcagctcaaggacatagatcaaatgtggctcctcttcatgaaagttcccataaaattaaatgaagtagctaaaaccctcctccaagagctagaggtagtgattgctttgcttttggagaagctaaaataaaattggaaatgtggttgataaatgcgccattgcgccaccctggcaggcaggagacaaattaacacgatctctctggtcccagaagccagcagtccatgaaagccactatgaaaatcaggtaaaggaaatctgtgaggtttttgcacgaacgcctggctagaggttgagccgcttgtacaatgttggaaatgaacgagctgtccgagttgtgtgaagagagcaaaggcctgcagatggatgtgatgcgcggcgggggtgaccttctgcagacggaggtaggaggcggggccgggagccaccccgaaccccgcccgccgcccgccgcccgccaggcggcccagccccacggggccgcggggggccgaggccttgctcacccgcccagccctgggcagcagcccccgcgcgggccctgacttcgagcgaggacgcggctgagggtttgaggactgggaggacgcccgcgcttacccgggggaggagcacctgagtggtgccggcgactgggcgtccgcggcccggaaggagcccactagatgtttctgagaaccccagagcgagggagcagccccggggggcgggtccaaacgcgttatgagaagaccccgtttgatcagttggcttttagcgaagagcttttttcgcttatggctgtcaacggtcctacttaggactgggcctgatgaggttattgacggtgattaaatgctgttaaaagaggaggaagctacttgaggagagacccaacatcccactgtctttgggctcgttccggatagatagtaacggtgccaaggaaaaaagttgatcttcaaaagaattttgtggtggtggtggtgcaggacagaatagggcagtgactgcgcagttatgaaaaagaactgttaaagaaggagaaacgtatcaggactgtggaaattcgttttcaagaatgttcctgaaacacctgtggactttgttactgatgcagatcattttccttgcattgaggaaaatttcatatttcactataaggattggttttgcaagaataagttatgaccaagacaaactgccagtacaagaccccccactgatactaattacatgagaaaaaatagtaacatccaatttaggacacaagatgtccgaatcatttggactgaaagcctactgagagaactctgaaggttctactttgtggtctatccaagccagtgttcaaaggctaaatttttagtgtaaaataaattgggggggatccctgggtggcgcagcggtctggcgcctgcctttggcccagggcgcgatcctggagacccgggatcgaatcccacgtcgggctcccggtgcatggagcctgcttctccctctgcctatgtctctgcctctctctctctctctctctgtgtgactatcataaataaataaaaaataaaataaaataaaataagttgggtattcttcagtatcccaaaaagataagcaaacccaagaagaaatatataccatgtgtgatatatctcaaaatgtgttttctttttttttttttttaaagaaaactggtttccaactcaattttttttaaattttttttttttaatttttttatttatttatgacagtcacagagagaaaaagagaggcagagacacaggcagagagaagcaggctccatgcaccgggagcccgacgtgggaatcgatcctggatctccaggatcgcaccctaggccaaaggcaggcgccaaaccgctgcgccacccagggatccctcaaaatgtgttttcaagagtatctgaaattttgtttgtacatgtaccttgatcatttataaagctactacgatctataattcaagaaaatttgtcttaccatttttaaaactcaaaacttaagacatccataatttcaaagttagacattaaaatgtatgtgaaagaacaaactatttctaatactcttacatcctagagaaattgttttacttgctctctgtttttcatttaactttacaggtgaaggattttggttgaacttcataatataagaactgttaaagtgaaaatgtcaagtaaaaggaaagccctacatgtaaaaaaaagactgaacaattatgccctcaacctttaaaggttttaaaacctgcccagaaatccacctgagtatctggtttccctctgtctcctcctctgattaagtttgttattattattatttttttttttattaagcttgttaatggttatgcaccagcatttgagataataaaatttcttgttctgtgggaaaaaaaaaaaaaaaaaaaagaggaaatctatgaggtgagaaaggaggccacactgagaaaggaaatatctcagtctgtgaccattgctgagaccattccatagtgtgtggaaaaagacaggaagtctcagtgatacaagaatcctcaatgtcatgaaaagacggtgagtgagtggcctttgtagttcagttcaatctagcttagggtaggagcagtgtttctcagcacaaaataaaaataggaaagtaaaaggccccctcaaatccagagaatttaaacaatatatatttgcctttgtggcagtgaccagtattgtataataatcactcacttaattgttctgtggaaaccattcattactttgttcatggtaaaggttttaccatcacgatggtaaacctctttgatacatggtcatgttaatgaatatcacacacagttaacaaaattcaactcagtaaatctgagattttattggctttatccaatgattcatgatgcatcccgtctaccggataaaaaggagctccaagagccgtataaaatgaaagacattttataggcagatgggagctggaacaaggaggtaaaaagtggattggttatggcaaggtactttcctttaggggatggcagagatctatcagacagatttccatctagtgttgattatgtgattcctgattgactgatttaagattctatttcttggaggggctgaaactgttattaagttaggtcttggtttggtgatttgggggttacataagcaactcaattttgggcccgttgtcttgtttttattattttattattattattattattatttttaaaagattttatttatttattcatgagagacacacacagagagagaggcagagacaggcaaagagagaagcaggctctctgcagggatccggggattctagatcatgccctggggcaaagacaggcgctcaactgctgagtcacccaggtgtcccccgtcccccacctttttttttaagattttgtttatttattcatgagacacacacacacacacacagaggcagagatataggccgagaaagaatgctgtcttgattttaacaacacagacatgcgcatacacacacacacacacacacacacacacacacaactgaggaagttctggggaaaaaatggagaaagtaggagaatgtatcctgaaggctgataggttaaacttatataaatacattgctagtgttgccaatatctggataatctagtaaaatcagagaaacaaaaagcagagcagagaattgataagcaagaaattgtaaaattttaggaatgcacatcaaaaggcattcagaattgtttctctgggtaaatctcctctcccctggcctccctcctttatgaaatcatgaggatagagacactccagcaagggcacaacaaagaaatgacatgaatgttggtggataaggcactggaatactgcagcacagttctgacaggagccatctggaattagcatcagattcccaggttaaggatataatccccaacaagactgcttttacttcagaggccagccacaagtttggggtccccacttgctcctctgaccaactggatttaaatctggaggggtccctgatccttttctcatttgataatttgctagaatgactcacagaactcagggaaatgacatacttagaaccacagtttattataaaggatacaaataaagattgtaactgaatcaatgggttcagcagttggggtgcatcaaattgaatgtagcccaaggaagtgttgaaagcaaagaactttgtattacttgttacacatgaggagactgagagagctctctaagcactatgtccttgttgggttagtataggaagctttaattcagcatattagggagcagggagcttgcatatacattgttggggaggaagaatttcctctgcccttcacaattcttctagctaaactaagaatcaaattgacatgtgactgattaacaggagaaagtcaaatttaataggtgtacctatggggattccacatagaaattccaaagacagtgaagtaacatgaagcttatgtgaacaaaggagaggagtagtgtctgagaatacaaagggaggaaggccattagcaggaaggtgaaaaggcgatgtttgaaaaaataagattgccctattatgtagataagtttctaagataaagaggaatctctgttaatagctctctatgatgaaacgtcaggctgatgaaaagcaagcaggccattaaggggaaggtaaggagcttctcttgaatgggctgtgttttgattgctttaaactcaaaataatgttcatgccaatgtggcttatctttaggaggcctacccccacaacattaatgcactcatatatattctattatttatacacttgagttcaattgcacaggcttagcatgtcagcacactagggcatacatcgtatgttcaaaaaatggtggaaaattccacccataggagaagatcattataatgagctaagggtatcttcaggatatctcgggggggttctgtgcaggtctgcagtaagaggctatcaggtgagacacacctagcaaggggctatcaggtgaaatacctagctaggtgtttccttggttgaaactgctggttctgcaaaataaaatacattctttcactgcttttgcccctccccttcttcccttctgagagcttttaacccttggatttgaataacttcctattgcatcctgggtaagagtcaaataaaaagacatgtagggtgaaatctaggagagtaccaaatactgagcttttacatcctctccatgtagaacttaggtgcctcaccttcctggtacatggatatggtcaccaacctggatgtccaccaaacttcatttaattatgtaggcaaaattgattgaatcttggctgtatgattgaactcaatttccagccaccctcctctgctgggaggttggcctgactcaaagccccaaacctaaatcacatggttagtctttctggtgaccaacccctggtcctgttatctcattagcacaaattcaggtgtgaccaaggggctcatgagttacaaagatactcctattattcaggaaatgccaaggatatggagtctccttcccagaagccggggacaaagagcagtctttattgtacaacagggacacataatataaaataaaagagagttgagaaatgttgacttgtcttaagcctatcacaagaattttaaggaattcacacttaaatatttagcaagtgcatgaaagaaatcatccaagtatagtccctttttacaatggaatcactgtaaaagaaatcaagctcctagttattgcaggagttgaaatgtggatgtactaaagcccagggcactataaaggaattggtagtccagaagatgatggaggttgaggaatatgtcaatatacaaacatggaagatctgtcacagtttatgtactctctgctttcccttaagaatggaacaaaattaaaggttaacccagagagtattatggaacaatttatcacagctgctaatgcaggaaatgaaggagtaagccctggtgcagtgccatggccaaccacccctccttgcatccagaatccagagggagcaggtaaaagcaaaagtatagctcttggctgggtttgccaacaatgttgccaaacagactcagataaactcattgcaaaagaagccaataactcaaagactcataagggtttggaaaagagaaagggaggaatttgttttgggtgccaacgaccagcaagatggcaggctcataccttaacaaccgacctctgtcaggaaaatggacatctagagtcttatagggagaggttggggggatatgtgcaagagagcagagaccatgatcatgggtgagatcagtacgtgtccagcccatgaccatggcagggaaggggacctatgggatgtgatcttctaggcattctgttgcaatcagaatttttctcatccagtgcttagaatgttctggtcattgccaatgcctcaagaaagtgtgataacaaataactgttggatctatagtgagccaaaggactcaccgagagaagcatatagtaatgcaatctcatgctttcattttccacattaaaatgtttctacatttatattcatatggaattgattttgcttatagagagacaattcttttcttttttaaagattttatttatttatttatttatttatttatttatttatttatttattcatgatagacatagggagagagagagaggcagagacacaggcagagggagaagcaggcttcatgccgggagcccaaagcgggactcgatcccgggactccaggattgagccctgggccaaaggcgctaaaccgctgaggcacccagggatccccagagagacaattctaataattattgtagtactgtatttgaaatgggtagaaccaaaaccattcttttcccactggcctgaattgcacgtcttactgtatatcaatttatatatatttagacttctttgggggctttgcattctgtttcactgtcttgcactgcaacacttcattttaactactgggacttttttgtttttttaagattttatttatttatttgagagagacagaggcagagaatgagtgtgagcagtggggcgagataaactggctccttcctgagcagggagcctgctgtaggacttgatcctaggaccttgaggtcaggacctgagccaaaggcggatgcccaactaactgagccatccaggccccccactattggaactttctaacatatttgaatatctagtaggttctgacacccgttctctattcttatttttcaaacatttcttgacattttattatattaaaaatcatattattattattataatcaatgcagggtcattaagcacagcagtcaaaaaagaattcttgagatggtttttttttttaatttttatttatttatgatagtcacagagatagagagagagaggggcagagacataggcagagggagaagcaggctccatgcactgggagcccgatgtgggattcgatcccgggtctccaggatcgcgccctgggccaaaggcaggtgccaaaccgctgcgccacccaaggatccctcttgagatgtttttaacgcaacttagtaagtttatttaagtggcatggagataggacccatgagcagaaaaagctatactgcttgcgatgtgaggctggtggttacatacaatcaaagggaagggggcttgcaggaagtatcagattatgaaagtttctttcaatttctacttctaaaactacttttgcaagatttttctggtgtttatcattcaatattaactatctgtgagatatacaggcagtcatgagacccttaaagaatgtagccatcagcacatatttgatccttactgaaactatgtaggctttaggtcagccttccaggctaggggtaaacacctttctgcttctgtccctcatcataatgaccttatattcatagataacttgggagaaattgaggttctcccaatattgaaggttcacattcaagtacttggggtatttgcattagtgtttatgggccttcaaaaacacttgtaatcttcccaaggttgtgaatgtttcttttcagtttgtttcaaatattttatatattgatattgtaaatgataattttttgaattatattttccaacaggctcttctgttaaatggaaaatctattacttttatatataattttgcaattattcggatttctgaatttaatgtttttttagtttactctccaatttttaaggaagataatcaagtctacaaataagaataccttaatctcttcttttccaatgtatatttcggttctttatattattacactggatatgactgtctaggaaatataaatataaataatagttcataatagtggttataaagagaaaaaaataatagtggttatagtaggaaatttatctaattcttgatatcataggaatatctcagtaagtattatggtggtggttgatttgcaatagacattcttagcataaagatctttccagagcagccccggtggcgcagcggtttagcgccgcctgcaacccagggcgtgatcctggagaccctggatcgggtcccgcgtcgggctctctgcgtggagcctgcttctccctctgcctgtgtctctgcctctctctctctctgtgtgtgtctctcatgaataaataaataaaatctttaaaaaaaaaaaagatctttccatgcctaggttctaatgattcttttgttttttatctatacagtattgtttaattttagcaaatgccaataataaaaatgatcatatggtttatttcctctggcctataagtgtgacaaattttgttgttgttgttttttaaggattttatttatttattcattaaagagacagagagagagagagagagagaggcagagacacacgcagagagagaagcaggctccctgcagggagcctgatgtgggacttgatccagggactccaggaccacgccctgggctgaaggcaggcactaaaccgctgagccatccagggatccccaagtgtgacaaatttgaatgtattttaaaatattaagctgtctttgcattcttggctggtcatagtgtattattcttttactgtttcagactaagtttttacattctggattaagactctggtagtcttaaaaaaaaaaaaaaaaaaaaaaagactctggtagtcttgagacacctgggtggctcagtggttgagtgtctgcctttggctcaggtcatgattccagggtcctatgatcgagccccacatcaggctcactgcagggagcctgcttcttctgcctaagtctctgtctctctctgtgtgtctttcacgaataaataaataaaatcttaaaaaaaaaaaaaaactcttgaagtcttaaaatttctttcagaaactcttcctatatccaatatactccaaaactaatctcacagaaggaaaacatttttttgttgttgttgttctttgtccaatatcaaaggagacctccaaattctaggtaggtcggggtactaacacctgcaaatcaactctgatagaacaattttacaatcactgttgctaaacgattatgttctatgaggcattggagtaagataaacattattttctttaagccctaaatttagccttcgtttcttaccaaaagtatactgtagtgctaagttgacaaaatcttaaacaatatccctgtgacaaagacctttacagctattcaaaaaacactctgcttggggccgctggtagtctcagtcagtagcatgcaactctttttttaattaattaatttattttttatttttattttttttatgatagtcacacacacagagagagagaggcagagacacaggcagagggagaagcaggctccatgcaccggaagcctgacgtgggactccatcccaggtctccaggatcgcgccctgggccaaaggcaggcactaaaccgctgcgccacccagggatcccgagagcatgcaactcttgatctcagggttgtaggttcaagtctcatgctgggtatagagattactttgaaaaatcactgtgtgggctgctggccactctgcttctggctgctgtgtgtcagaaagggccttccccacaccacagcaatgcaagtctgaataagaaaaaccatttcttgggatccctgggtggttcagtggttttgcgcctgccttcggcccagggcatggtcctggagtcccgggatcaagtcccacattgggctccctgtgaggagcctgcttttccctctgcctgtgtctttgcctctctctctctctttgtctctcatgaataaataaataaaatgttaaaaaaaaaaaaaggaagaagaaaaaagaaaaattaaaaataaaaaaaaaagaaaaaccatttcttcttcctaagccatgggctatcaattatatagaaacaccactctgggtaacagtctccaggagagcattgatgagctcatacagtctcaacagaccaccccaacttgccctccaagttctacttcagtttgataaagctagaaattcagagggccaggagcagagtcaattttgggggctctctaaatatgtacagattctgcaataacacgtggctttggcattgaatgaaaattcctgaaaaaattcattttaaaacaaacaaaccccccaaacccccaccctgcttatgatgatgattttcatacacacacaaaaacagtaagaaaagtataacaaatcttcctatgtccaccacaaagcttcaacaactgccaaagtttggccatactcagtctccttctcccacttttatttatttttttctggagatcttcttttaaaataatttttaaaaagatttttttttaaattaatttgagtgagagtgaaggggcagagagagagaatatccaagcagacatccactgagtgcagagcctgatgcagggcttgatctcatgacccaattcgtgaggacctggaccaaaaccaagagtcagatgcttaactgactgagccacagacacctctggagatcttttaagacaaattctagacatcataccatttcatctataaattcttcagcatcatactcaattcttatttgagaccacgcaagctgagagcatacttatgaagcacaattcatcataagagattatataaaggtttaaaacagtgtgattaaaattcatagtgttgtgaatgtctggaattacataatccacagaactggaggtactgcatatccttcaaggaatcctacccggactatgtttcacttaactgagtttttggtaagaattggggggaaggaacaatgtttaaagttatatgttttggcaaaaacttacgagtgcaaacgtttcttgttgctgattaagagagacccattaatcagaacgtagatttggcatccttgtagaaaaattatttagcctaaccagaatttatgacacctaattgcttcacaggcaaatgacatgagctcttggtagtatttattaagctgaatcggctttcattagaatagagtctcttattttttttcttcttttttttttttttctttctttttccactgtgcgacccgcttcagtgcccgcagccaacggcacagaggccgggcaatggttcagggccactgtttgctctggtatgggacactatgagaggcccagggggacaagcctgccataaatccaaacccatgcatagaatagtgtctcttaaaagtggacagccagagtggaagaagccagataaagaagagcacgtcctttatgatgtcactttatgaaagtctagaaaatgcaaattaatctacagtgtcaaagaggatcagtgtttgcctgggaaagggggcatggtggggcagaaggaaaggaattatataagggaatgaaaaatttggggatgttctctcattgattgtggtgatggtttcacagatatttacaactgacaaaacttgtcaaagtgcatactttagtcacacctgggtggctcagtggttgaatgtctgcctttggctcaggtcgtgatcccagggtccagcgatggagtcccgcatcaggctccccttagggaacctgcttctctctctgcctatgtctctgtctctctctctctatgtctctcatgaataaataaataaaatcttaagaaaaagttcatactttaaatctgtccagtttgttgtttgtcaattataccttcataaatatgttttttcaaaaagcctaactaaagggcagagtggtagaaagcctgcagatgccttccacaggtttgtgcctttaggtccaggccgaggtcacaagtggaacttgaaacaagaagagataggagcctgcaagctgacaactatgagcctacaagttaaggaaaccaccctttgggtacataatctactttttgggtggagtcctaatgaatcagttggtggagacctgagccctgttggttcaaaaggttgccctggagatatagctcttgcctctgtggctttcctggggttttattcaggcagcctgataaagctcccagcttcttagtacattaggacaatttttgtgtacctggatcttgtcatgctcaggtaaagctgagaacatggtgtttgtttctggtcttatgtctaaatataaaagctaaggaggaacaaaaatgagtatgggaattataggtactagataattataattatctattattcccagaactgggttgggtagaatttagctgtcaggcaggagaaggtgccaatctgtcactaggatctagaattttgcctgtcagcttggattccaacctggacaactaaaatttcaggaagaattgaccaactttatatgaaaaattggttcaagtggtggcccactgcatttggggagagagaaggctgtccttgctggtttctgtctgcctacctagcagactgctttggaggaagcacaccctatagacaaggccaggcatgtccattattgggaacagctttacttataccataagagtcttgacccttcaagctttggagtcctatatagagttcgttgtatctcctactggaaaatattgagggtgctccaggttgatgtaggagaccatataagccctatcctatctgctttgagctttttttctcatgcctaaagctcctttggttgccctaagaaatgcaggagatcagtgcctgaatcctcccctttggaagatggttgaggtaccagcttagatttgaaccaagctctaggtcttcaggggctgactagaacagagcatcttacccaagacagctgaagttgggagagtgaggagagtgggcccccgataaggcctgcagagagctgagcaccaagccagggagcctgatgtcccaggtaagtctaagataggagagggaactcagtcaggagcaaccagaaatgggaacaggtgggaacaaaatgttgggagatgagtgctttgaacagactccaagagtctgtggctctgccagtatctctataggccatgggagcatcattcgtgaagctccattggcttggagctatagtggtagggcaagcgccactcacattcctactacaggctttagagtctatactaagactccctttgagtcaccagtggaagattctgaagtgttctgggacatctggtgtaggacactatttcataaaactatactgttggaccatactaaagatcctgatggtttatgctagtggccacttggtgtttcctggcacctctcagcagatcctattttctcagtctgcagtagttgttcagagcaccgttacactttgctacgaaatggccctcctgattacaacagtagatagacagtgagtgcaaggggtgctcctcttgtggggctggacagggtcccagttagtcttggcagccttcaagtcactgcctgggtatggatccctggtgctggctcttcaagccttattgagcactacacccatggcctgagttcctgatggttcttgcacatgctttagtttcttcttttcgttttgtctttctgtattggtgttgctaatcatgggagatgggtgggccactcctacccaccatccctgacttcatggggtgagtcagaattgcctctttcatgtgagagtccctttcttttctactttttgtgaagaggtatctaacagctacacatggagattctcccttgtgttctaacatctgctgtgaaatttaatggcatggtcctgtggctcttcacaattctaaccctgtgtacatgccactctaagcattctgccccagagcctggtcagtactgactccagggacatttctggagcttctggcacctagaagctttataccagcctcattccttctctttcctcctttatgactctttaactcctccagtgtcttagaggaaagttccagccaacatattaaatgtctcattctctggacctgacacaagactgacattttttcatcttcggtccaaagactttgtatttttgataagtcattgttataaccattatattgggtaagcaaaaatcatgaggcgtaggatggagacttccagctacataccaaaatgcccctttcttcttcttgcccagactacatttcccagcctccctggccaacaaattggttatatgaccaagctctctccagtggaatgtgaacagaagtatatctgccaaattccaggtctggcctattaaaaaaacctcccacattccttctcccttctctttcccccttctggctgactgagaatttgatacccaaggtgaccttggaagtcacagttgaaaatggtagagccactgttggtttaagttcctaactgaccacgacgaggagatctgcccttggaatccaaacctgctcaggggtgttatatatgagaaatgatgttgcataatgttaagcactttaactttaaagtcttcttgttactacaggctattgtacctacctaatataaggtaagatcaggaagtaactttattttcatttatttctatgtaaacccattttgtgggattcagtctcctgctcctagataaaatttgagacaggttctataagctttctggtcatgtgaaggtagttgaaagtcatgtggccactctaataccccaaagagttcagtagttaaatggtccaatctcataatggtaaaaacttcaagctttatttaaattctaggcttcttgggatcccctgggtggcagtttagtgcctgccttcagcccagggcgtgatcctggagtcctgggatcgagtccctcatcgggctccctgcatggagcctgcttctccctctgcctgtgtctctgcctctctctctcactctctctctctctctctctctcagtctgtgtctctcatgaataaataaataaaatcttaaaaaaaaattataggcttcttggggcacctgcctggctcagtggttgagcacctgccttcagcccagggtgtgatcctggagacccgggatctagtcccacgtcaggctcccagcatggagcctgcttctccctctgcctgtgtctctgattctctctctgtgtgtctctcatgaataaataaataaatttaaaaaatcaataaataaaggcttctcccctttctttgaaatcagctgccctcactaggaatcaaggtgtgcagagatctctcacttgccactttgtggcagaaactgctattgtccctcagtgcccattttcttcctcttccttatttttttagagcaagagtaaaagtgtgtgagtgtgtatggagggagggagagcagagggagagggagagagcaaatcttaaggggcttccatgctctgagcggagcccaactaggggtttgatctcatgaccttgagatcatgacctgatccaaaatcaagcattggacgcttagctgactgagccacccaggcacccctctcctcttccttattaatataactcccaaatttttgtggatatgtggctactccaaataaaggctacatttcccagtatcccctgaagctaagtgtggccatgtgactaatttggcaacagggtatgaataaagcaagtgagcaatcttttggtaatgtactcaatagcaggaatagtgctccctttcccctatccttctcccctactctccgctggaagagactctgtagatgtgatgatggctcattccaacctcgcagctgaaagcagtattctaggcaatgacagatcagcaagacggaggagctggatccccaagcagtggacttactatccagcccaggagtctttatgctggaactattccatgagaaataaattaacttttgttcttttgtctttttgcatgcttgtccctcatcttgctaacttagacgttggatccctctagagttggagtggtgagagggggaggcttaacgggaccaggagaggtctgatttggctagagatactatgtggcacaagtgcttcctggatcattaggcatagctgattcttccttcaattagacacttggtgaatttcttggagataaatccttgactttgctaggatttctcattcgatcctttaatgagggcaaggccttaggctggtcaactatactttctgtagcctccaagtgtctagcaactcatccctttattaggatcaccaaatctctctgactgaccattttggacaggatctaatacaatcctgtgtcagctttctctttttctggccccatagccggtccataggaaacatcatgaatccagtgtccctggaatctgggaaggttggtagccctcaacctagtaacctctcttacaccaccatcagggcagctagacagccttttgttttttggttttcagatatgagtcagccactagctcaccctgtgctcaaactgcaggggacacatattaaactctctgaaagggtttaccaaagcccttttccctgggcttaaatgagggcaataccttagttccctcaggaggctgaattgttaatttcttctccttcctactccagactatggtcaccttcacagggacactctcaggctcaggactccagaagtgttctttcacgtagggactctggccccttttgtcatgatttccctcttttatttaggaagagtttcaaaattttagaagctcgttgtctttttttttttttttttttaatgtaggttccatgctcaatgtgtggcttgaacttacaaccctgagatcaagagtcacaatctctaccaaatgagccagttaggcacccaaagaagcacattgtcttgagcaagagccactgtttgctttccaaatatcaagtccactcacttacctcatacattccacggcatcacacaagaattattcctgggagctctagtggcactgcattcacattcttcttctgtttgaacttccagaccaccttacccagagccacttgcagcagtactccatcagtgctgatgccattgctaccatacccaacaggtttggggctcttattccagggatggtgcaagtagtgtttcaagattgaactccaaaaaagtaacctgagtttccagttctcactagcctacacagatatgtaagtgaggctaccttaaggtaataatcaaaatttcagtgtcttttcccaacctctgaaaagtccccttctctgcccaagtacttctgggctctgaggggaacttcacaagagctcacaaatccagtcatccaggtatattgtcattctgtatccagcacctgcttgagcatcaccttgaatgaattgaagcccttaaggcaccaaatctacattaggtgatgtctatgcctagagaggaaatttcttttttatattctttttctttttaaaaagattttatttatttattcatgagagacacagacagagaggcagagacacaggcagagggagaagcaggctccctgcagggagcccgatgtgggactcgactccaggacctgggatcatgccctgagccaaaggcagacgtcaactgctgagccacccaggagtcccttctttttcatattctatttcattagaggactgcccaaacaatacctgtgtgcttcagggtcttgcagagcttccagaaccagatacatgttgacagtcttctttttttttgcctgggatggaggactggacgtggtgacaaatcacatccacttactctttaattcaacaaatatctcctgaattcctcttctatgctagccatgaggtaaacaagatacatatggtctctgcatccatggagtttatagcccattgcaagaccaaaacaaaacaaaacacacaatgacaaaaaaaagccatttaaaattttaccttcaggactttgttattgggtgcagttaattgtgtttggctgctgctcctgtttgggtgagttttgtgcacaaagcctgccaactctcaggcaaatagatgctgacagcatgtctcaccatgtggagcaatatccttcttaatccatggctacactgatctactggggcctagtacaggagattattctatgctatgctaaaattgtgtgatttttccccacatttagtgacagccaaagaaaaacatgcacttatttctccaagtgcttcttccttccattccacaccatggttcccaaactctgtggcaagactggatagtgaggagaatggcttcttggctgtgataacttcaaaaccatgagaagaccagggttttgctaatcctgttagaaggaggcaggccagtgcagacatggggagatgggaaaatttgacagaagttgaaaggaaggacaatttgcagagggggaagtagaaggttccagaggaacagagaagggtcttggaggcacattctccttcggcctagggaaccccatgcggagatagactaaaggtctgagcagcaggtgcatggcagggaacaactggtacatccccctgagactccatactgtttggattttggccttgtaaaccttgagtaccaatatttcttagagttttctgtgagagtgaaaagactcctgaattaccaaatggtatacaaaggaggtgtattcttgcctcattttctacagaagggaaaggatctcatgaagaacatccagtgaacaaatagtaagactaagccccattgcctacttgccatcctgcccttgctgcacatctgcctccagctgtgcagcccacagaaaccaagctcagtttgatggtcatccaggattgtaaacaagcctggaattttagcttcctgtctaagaaaatccaaatatataactttttttttacactactagaatttcagatttccttttttttttttttttttttttaattttcttactttctggttctgtggcttagaatacagaaactttcaatccctccttttgttaagtgtctattggtcaggaaacatgccctataataacattaagagaaaatactacctaatgggttcatgtgattacttcatcaagtgagagattctttcataatatgaataatttcattatatgagtagagtgttttggaaattatgttataaagtaagtttaataacttaaaaagcctatcccattaatagggagggtagatctctgcagagaagtttccttctccactttgtaactccaacccctcactgttcagtgcagttttcatggagcacatgggccaagcctcagtcaaggtggacaccctgccatggttgaatgcctccaggaggttgctatactgctattcagaacctggcccctgctgtgggtaatggcaaatggacaggcaactcttccagcagagaagtttgaacactcttttccagagacacgatatgaactttaagcctcagctgatgatctgccagtagtggtggcagactatttctatgatgaatggaggggctttggcagtacagagaaggaggcgtagcacttggtttgtatcactattgctctcaggtcaggggacaggtctttatgaagttcttgagtgatgcatgagatggcttttgggcacttccctcagatgaatgtatcatagatggcagtatagtttatagcataatgcctaaaattaagtaaaagtctcaggttgtcacttttggtgccttgaatggggcatggtggtctctccttggagcagagcagcagaacttagcacttatgtcagccctttttgattcaaacattatcagccccctcctaccctgaccactggggcctttagggccccctgccccccacccccaccagctgccatcacagtgcatcctagtgaggcattaggtcttctgtttgtacttaggttaactctacccaagggtgaagagcaatgaagttcatggggaggatccaagaagaacaccttttgtggcctgcaatccagcaggcatcataggttatctatccacctgccagctttggtttactgatatataactgatttagaattagaagcacataaaaaacacctgtattactggcacccctgcctcttaatttcatttcccttcatagcattctttataacattatgcaaatctgatcatgcccaagctcaatttcaaaaggtctttccagagtctattggattagatccgaacctcttgtcatggcaggtaaatccctttaagaaagcctgtctaatctcatgaaagcttttcgcagaggacacttctggcactcacaaaacagtcatccctacttccttgatggcaaagcttttacaaattttatttattgtttcagtgctgccctctcataaattcagataaggaggtcctctcacagcccaaagagatataagtattactatggttcgtctaatgcctcttccatcactcttgctatggttgatttagtagtagggctctgggcccagtgagaagtgagggaaagtcggctggggcacttctgggaaaacctttctgcttctgaacatggttgtttaagatattgtatctgctgctttagcagccaaccacagtccataagaatgaattctaaaacattgaccatgagggaacagagagatggaaagaagctgggtccttgatgatatcatcaagccaccaaattaacccagatctttgtctggaaactttttaaacccaaaaacttttcatttgcagccaccaacattctgactgataaacttgcataatataatcttttacaattcacctcttctttcctctacttcatgcctacagtggtctctctcacaccttcaagctgttgcatacagtattaccctctgcctggagtgcttcctccctgttttttggcctgtaaacaccattcatccttcctgtctagcttgggtgtgatctcctgtaagatctttacagctccccaaaacagactcaggggagtctgtggtgccactgcttttcattgctccaaactctataggagcaatgcttccatttgtggagcagataagaacttccccatcttctcttaccaaaaaaaattttatgagaaacatctccaaaccttttactaatctatctgatggaaaaattcaagcatcccatcaaaacccattgttctgaggagcaaatagtttgtaaaacacttaaaaatttaaattaaaatatcctttttattatggaaagtttaaatcatatttaaaaggagaggcaatgtggggtgcctgggtggcacagtctgttaagcgccggactcctggtttccactcaggttgtgacattgggctctctggtcagtgtggaacctgcttgagattctctctccctctccctctgccccttttgctcctgctctctctctcaaataaataaataaatcttaaaaaaaaaaaaaggagaggcaatgctataatagactccactgcctgcctgtggcatataaaccaaaaaccaatcttgattcatccagccccaactgcaccattgttttgaggcactctcaaacattacatcatttcccctcattaatattttctctgatctccaagagtaacagctctctttttaaaaaatataatcacaatatcattatcacacttcaaatatcaacaatgattcttttatgatatcattaaataccaagtcagggataaaggattaactttcttagaatgtgtgttttatgcacacacacatataatttcttggaaaatcaggatccaaataagattcctatatcgtaattggttgatatgtttccagaccttttaaaaaattatttaaattttatttatgcctgtattttactttacactatgcttttctttctttttttatttatttattttttaatttatgatagtcacagagagagagagagagagaggcagagacacaggcagagggagaagcaggctccatgcaccgggagcctgatgtgggactcgatcccgggtctccaggatcgcgccctgggccaaaggcaggctccaaaccgctgcgccacccagggatcccctacactatgcttttctaacttagctaggattttttctttttaacatttctaatagaactagcatttgaatggcagggccacttgtccaaacaaggggatagagaggacaggtttcagtggtcagtaaagctgtaggctgcagttagcaaaacctctgtcaaagagaaagtgctaaagagtttcaaaagctcttctgaacacaaaagagaagattctttctttccttttgtttttaaattacagtgcctttaattatattttggtttcctcaacttctttttttttttttttaagattttatttatttattcatgagagagagagagagagagagagacaggcagagggagaagcaggctccacgcagggagcccgacatgggactcaatcctgagtctccaggatcaggccgtgggctgaaggcagcactaaactgctgagccacccgggctgccctcctcgacttcttaattttgtcagttcatgtatgggagcaaatctctatcaaaatctatattaagaagaccctcctacatttgtggtatgagtataaaatggttcaatttctaatggaggcaaccggccaagtcaatcaaaatcccaaattcctggggtgcctgggtggctcagtggttgggcatctgcctttggctcaggtcctggttccagggtcctgggatcgagtcccagatcggggtccccgtggggagcctgcttctccctctgcctctctctctctctctctctctctctctctgtgtctctcatggagattttatttatttattcatgagagacacagaaagagagaggtagagacataggcagagggagaagcaggctccatgcagggaacccaatgcgggactggatcccgggatccaggatcacgccctgagctgaaggcagacacacttaactgctgagccacccaggcgtcccaataaataaaatctttaagaaaaaaaaaaatcacaaagtccctttcactcagcaaggccacttctataaatcttccctacaaacatagccattcatgtgtgacatgacaaggtagtttgtggcagaattgtttgtgcaaaaggttataaataacaaatggtaaaacaaaacaaaacaaaacaaaacaaatggtcatgaataggaggccagtttttaaaactgtggtatttccataccacagaatgctatgcaattgtaagaactatatgcaagtccttgatatattgatatcaaacgttgataagtgaaaaaaagtgggaaactgagtagtacacacacacagaacatgattctttttgtttaaaaaacaaaaatgtgtgtagtgtgtatattatgattttgcttccatatgtatagaaggatataaagagtaccagaaagatataactcatttgcagcattgctgctgaggaaacgaacaggatggcctgggagtcaagtgagaggtaagcttcacttgtaggtactttcagagcttttaaattttgaactgtaagagtatattacctactcagtacaaattaagataatctaaatataaaatttaatatttacggtggccctggtggcgcagcagcttagcgctgcctgcagcctgaggtgtgatcctggggacccgggatcgagtcctgtgtcgagctccctgcatggagcctgcttctccctctgcctgtgtctctgcctctctttctctctgtgtctctcatgaataaataaaatcttttttaaaaaatttaatacttaaagtgtacctgggtggctcagtcagttaagcatctgatctcagctcaggtcttgatctcagggtactgagttcaagccctgcattgggctaaaaaacaaaaaacaaaaaacaaaaaacaacccacaaagaagccaaaacaaaacaaatttaatgcttaaaaggctcagccaagggattaggagtgatctcttgcaagtctcacatgctcttgttggtcatgacctccttacattgctccttctattggcctctaggaacattgctccctcagctccttcctattagctcagcacctatgctggcaactcttgccctgtgcatccttacatgtggatgctcctcagggctagaggacctcatggcacattgtttttgtgtgtctgttcaaagccactattttgtctcgactgctggggctagtagggactctagattatggtggggaattttaacttctttctagaacaaagggaatcactgaagagttttagtcaggggataacatgatcagaggttcattttgaaaagattcttgtctgcagtgtggattgattgtagtagtccagggtgaaggccaggggggcctggattattctggcaagatgtgaattaggagggctaatagaggagatggaaagacattgtcaggtttgagaaatatttaaggagtaaaatcctgatgatgggttgaatatgggtataaaagaaagaggcaccaacgtggattctaagaaactggccttttctgggtagacagtgacaggcaactttctgagagaaggaacaccagctgaggtctagtgtgggtggcaaggcaaggagagagttttttttttttttttttttaaggagagaggtttttgacgtgcaaattatttttgaaaacttcaataataacagattactacatgtggaagtgtgaattgtttattgttgtttgaagctattaacttttgggtttttttttttaagattttatttatttattcatgagagacacagagagagagagagagagacaggcagagacaccggcagagggagaagcaggctctccacaaggagactgatgtgggactcgatcccaggactccaggatcacgccctgggccaaaggccgacgctcaactcaactgctgagccacccagccatcccagggtggtttgtgttagaagattaacacagtggattttccaatttgaaagttttgtctgatgaagtatgacttaaaatatatgctatgtggcatacactgtatctaatttagcagacttgtgatgtcaccttaaagaaattggcagtcacccaccagagtagattaaatttatgtataaggagaggcctggaaagatgttccaagcctactaagatgctgtggacaaagaaaacaaacagtaatcacaggcaagaacctcacataggaaactataactgtgaatgtttcaaatcatagtgactaattggccatccagctgcttcttacacaggcatctccatggaatcatgctgcaggtggcataggaatttatttaatgtcaattaaaatggagacaaaaagacaaaagtcaacttttacacaagttcttttctcagagcatgctaataggaaattatcaactaaaaccaccatcattggggtgcctgtgggggctcagtcggtgaaacgtctgcctttggctcaggtcatgatccggggatcctgagatggagcctccccccgcacccccacccccgccctggttagtgagcagagagcctgcttctccctctcctcatttgtgctatctcacttgctatctctgtctttctcaaataaataaataaaatcttaaaaaataattaaaccactatcattttcatggctcttcacaagtattaatgaccatttcactgtcttatctttcttttgtttgctattctttctttcatttcaaacaaggtaatggaagcccatccacatctttgtgcatctgtacaactttatctatctagtacaaattcctaggggtagaattgccggggaaattatgcacacttcactttttcatagacactttttctttaaaaatctgtgtacatgtatttggggaaaattctacacattctcacctcatttcctggttctgtcatataaacactgcgtgggggtttccctaagtacctgctctaagacctcttcactctgacctaccctcatctcagtaatccagaggtctcaagtttccacctccttacactgatcttgaagatgagatttctgtccttagcaggagttccatcactacaggttgcctttggaggctcctgaaggcccaggtttagtttggccctgctttaaaacttgaggaatgtgtggacacttttggaagaactgcaattatcatggacttgatttaaattatttttataatttaaatgtgtgcaaacccagccaaccatgaattttgatgcttcaatacttgagcagatataaagccctagaaacaaaggagaaataaaacacacaaaagtaaaagacaatttaaactaatcgatgtgatgaatagctgtttctctgaaacgaagctgcctctggcaacatgaacacatactgcctaaggcaggttttcttgaaattgacacaatattccactgtgtgtgtgcctggtgatgactcagttctccccatacttgtgtctattcaaattgctaagaaatctttgtcagtacatgttccctggacttcacttggtacacatgtaactcaggcaattacagaagtgctaagttgaccctaagggggtaaacacaaacatgaacaaacacaagtactaacacacagggcggagatcagttatatgtgatccagaaaatgcttacaattctttttaaaaattaccagtcaaatgaaaacatggagtttaatcattttcatggggcattttgggttctcaggagtccagggaccttggtttgagaattgctatctcagtactgaccttgacttctagtgtgaccttgagcaaagcttttggcgctgttggatcccctctgtatgttcttcatacacaaataagaaagatttgggccaccggtattctcgggagatgaagaaagttaagagtattttcaaggtctaaaaggaaagcataaggctttttacagactctggatttgggaaaatcatgatggctaagaccctccagtgtagctttggctttggagtcagaaggacttgggtttgaattccagatctgccagttgctgtgcatatctgtgggcaagttatttgactttttttttttttttttttacttttcttgtcaaaagtgggcatatatcaaaatgccacatcacagagctgtgataagaggactcaggaaagtgctgaaggcagagcctggccctagcaaggctcagtaatcagcagcgccagcagaaagaggccaggggctgctgagagtaccacaggctcttggcaaaggacaacagaggagagaaagtgaagattctgagattctgtctataaacaacaatatttctgatacaggactatcaggatatttcaccccagtgagacccgcatcaaccctaagcttgtgctcagcctttctctctcctaccttcttccctctctggcctccaggcccaggctggaatttctttccctccaggccttcacttctttctccaatagcagtgttggttgttggtcacttgtgaagcatgcgcctccctgttcatcgcaggaaacgtaagcctccgcagttggctgaaaggtgaagtttccagggagagcaggactcagaggctgagatgagtgtctagtctggcctcacaggggctgttctggatcccctccttctaccctcccccttttggaagacaggcggaggaatttaggagaggtcctgggcaggaagcagtaacttgcctcagaacctctccagccctggttctccttttatgaagagctctgtgccacccacctcaaaggctccagtggagagggccaaatgataggtgtaaataccaggaaaatatctagcctgtgcaccacttccctacaggatctcagcatttcctcatggcattcctggctgggggtggaaggtcaaacactggctagatgtggacagaataaagttgagatcaacagtcaacacgccctcccacccgcacccctcagctgttgctctcagatgctgccaacacactgccaccaggaaccacctttaaaaatctattcatgccgtttccctgctcaatatcccaaggcccttctcaccaacagaatgaggcaaactactaatgagatcacctcacctcacctcacctcacctcacgctgcctctctgggtttactcacttgggcagaccctgacttcctgtcacagctgcattttcacataaccatgttcatgcctcccttcctcagccaggagcggccctgcctcatctctgcaaatctccatctcacttaaggcctagtccaaactccgactcttccatgaagtcttccttgaccttgactcaggactggcctgctcctcccctgggtttccctagccccttccagctccagcgcaggtgatgctaccttctgcgattatagacatatacgtatatatatatgcatatacatgtctggctccccctcttgactgtaaatgcctggggagggtggcacggagtgggttgtgttcctcaatgtatgtcttacagtgcttgctttcagagccctgcccgcacaaacccttaggaactatggaatcaactgggaggtggaactcagagacctgagtgacacatgagggagccacagagggagatcgtgttagtggagtgtggctggttgcttccatgaaagggcctgcctgtgctttacagatgccatctcacattatcacaacagactccagggacaggtgttatgtcagtctactggtgagggaactgatgcagtaggatgcagcacaagaagctagatggtgagtggcaagctcagccctcacctcggaggggccaagccttgctttcccctctccccacttggtactctgctttctctcccctctgtgagaggtgtggtcactacctccctccctgcgccaccccctcctatcagtcaccttctgctctgaggatcaaattttccaaactaagaactggcggacactgtctgacaaggacatttgatttcagaggtgacaggtcagcgtatgtttgaagctggggctgttcttgaaaacagggtgtctttttcaaaatcctgagtggagggagtggattgttagggacccagaaggaggcctccaagggcctgcagccaggcgacgtctggattctccccccttgggaggactggacatcccctgcccgagtaaggcctcagccacagccagccagtgcagccggcccgacgctgccgccgtcatctccctttgtctggggtctctttgtctggggtctccccctggttcagttttgaagtcctctgccccctcccctccttcccagtggccggccgctccctccctctccgcggggccgcgcagctcggtcggctgggggaggggctgagggaggggagcgggccgggttgccatggtcacggcgaagccggctgcagctggccggggcagctgctctcagccccgggagaggcggacaaagcccggcgcctgggccaccccaggcctggaacccggagggctgagccggggaactgggactcaggagaaccccgagctggaggtgagggggcagcggtgggggctggagctgggcccacccgtcctggggaggtggtgtgggaggagggcggggcgtcaaggatgcccagtggagttgggggccacgccgctgccgatggctaggctcctcccaaggaaaggtcggggcctctgtcctctggtccgtcccaccgttgccccctcctttcctggcccctttcttgtcatctcgctctgtcccttcgtttcaacccctgtgcctcagtctccctcctcttctcccatctcttggtttcactccaaccccttttctcctttgccttgttgatcgtcccccctgggctgtgggccacttcttagggctcctcactttccagccctactttctgagtgcccactgccacttgggtcagctgctcagtccagccctcttctcctcacatctccacctcctgccttctgctgtgtgtgccttcatctccatccccctttcctttttctgacccccattctctccctctgagttccagccctcccacctcccatcccctcccaccctctgggctgctgcctctgagcagcctcatttttctccccatacaaggtcatctctccctcctgcttccacttctgggcctcagtttcccatttgtacttagtggtatcgaggcctgactcatggccgtggccttgccaccccctggccccatcagttctcatcgtccccagctgctggcccaggaggcagctgcgtctcctggggagggactgccactagtgtgtgtggggcccttgtggtccatccttctcactctgccctgcaggccttccctgcagcggcgggtggtctgctggcccctatgtgcctttcctcacatttttttttagctgtttcccctcctctccttcctgggtggctagaggccattggcttggggggtgggtaacctgggagggacggcatggtgtaggaggtgttgaccgccctttgggggctggagttgggaacgatgcggtagatgtgggatgggctcgagggccatgaaagactgtgtggacactctcagtctttggcatcgctctagggacccctggatagctgggatttccctctctggcccctgggaatctcggctcagagccccgcattccagccagctccagccccctttccgctgtcacttgactccgctgggccccagccctgcatccctcccactcttccagcttcaggctgggtggaggtggctatcaccgactaggaatttctcctgggggagatcagggacaagagtttcagggttctatggtctcgtcttctctccccagcgggcccttttgtctggccctgccatgccaccaggctcaggagcgtgggcctggggtgtggaaggtcccagccgcgggtgaggggcttccctggggctctggctgcagcccagccgggcctgcccgcccagggttcctcccagctcagtccctgggaggaggggtcgggagttggcccaggtgaggtaactgggggaaccttggccccacccccggcctggctccacccctggctcagcctctcctgggcccagattccccagcggccgtcttcagaggggtatgtgtccctgggaacctctaggtttggtcagaggggacagtggggagaggcaaatctccgagtggccatggggctgttcgttagtgagccccttagcagctggacgtgctgggattggtgtgtcccgggtggtttggagctcttgcccacactgagggccaacttcttcctggtagtacttttgtgtacttgtctggttgggactcggtgtttctttcttggggctgttgtctgggactgcacgtacggtgtgaggtgctatctgttgtgaggtgtggtggggtggagatctgcagtggactcagatctttctgagccggtgacattgatgtggggctgacaggtgtgggtgtggagggatggtggcctgaggcagtgcccagtggggtgcagcacctcccaccacaggtcctccatcctgcccacctcacccagcctccttgcccatctctgggactcctgtttccggtgcctttaggttgtgtccgattctctctctgtcccccacaacctcctcacctcgtccaggtgtgtcgctgccagtggtcagagcctcgaccttaccagggccagagctggctgggcgggagggaggcttgcctgaggactcctgggccttgagcagggagccaaaggggcctagggcctaggagtctgggccaaagggtcctgagagaactgggagtgagggggcggcagcgagggggggcggtgagtgtagaaggtgcaagtagagagagaatggggctaggagagagtgggggccctcaggctctggggcagtctggatcagggtgtagaggccagaaggccagagggggccggagagaagcaaaggtcggtggtgtgagaagtgtgggtctggggacctgcttggacaggtgagccctgctcccttcctccatccaaactgctgctgctgggctggcaccgggactgtggtaatctgctccttccctgcgccctggggctgcccccttcacctctctctccaggaactgagcccagaaacggggagtacggagggggccctctctctcacggggcctggatgtgtgggatgtcctccttgctgcctgctcttccgttcttgcatttatggtatagcctgttaccggttcattgcctctggccaacacggagctatatgggtttatcatgtgtcaccactgctgtctgaatccatctattccctgagctcatgcttcatcctcaagtccactcctttctaaagatcttctttatttctttatattatatgaacaggtgtgtcgatttcctttcatccatttatctggcaaacaccatgtgtgttgaatttctagtatgcgccagacacagtgtgttacctctacatatccaatgatgaacaaaacagacatcatcccagttctcatgaaataagagggaagtaaacaaatattactttgattgtgctagatgccaggaaggaaataatcaaggatcactgaggaaaataaaagagcaaggacctgtttagagtggtcaagaaaggcttctttagtgacatgtcattttagctgtgatcctaaagaccttttaatgatatatttccctaattttctcttttgaaacttttacccttgtccttcagccatctcctagcatccttttancccgaggccccgtgcggggcggggggcggggggcggggcgtggggggcaggggcggggcggggcgcggcggccgcgggggtctggtggcggaggccggacgtgcccggcgcctctggctgtgcagctcggccaggtgggtcccggcccgccttcccagtgtgctggcttcctgtctgagaatggggggaacccctgccccccgagaaagtgagttccagctgtgaggaaggacccctttctttcctcagtgtgaagggactctcccccagggccacagttgctctgagcggccccgtgaatcatcccctcagcccgcagtcctcccaccgggcagtcccttcccgcacctaccgctgagcgataaccccccaccgtcagctcccagggggcagcctgccctcagcccagcagagaggccctgacaccctaaccggccggtgacagcctctagatggccatttggttctgttgtgagactgtgccactgcccagtgggtaccatcctcagtgtcccatcccccgctcccttccacaccccccgggcccagccttcgcgggctggtcccctgctgactggaccttcctccccaccccctctacccccggccagtgtctggtgttcagactcactgcagacacaggtgagagctgagagaataggagaaggagcaatgcctctttttctcattacggttcctgccaccgccttgacttccctctggcttgatcatggtgtgtatttgggagtgggccccagtcctcttgggatcctgtgcctgagcctgagactgtgtgtcccggtgtcctctaatggtaggagcttgtggtttctatcatttcacgttcacagatgtctgaggatggctattcactaagtgatggcacaggactttagagaaggccgacctgtggatggatttgatgtgtgcgtgagcgtctgtatttgccccgctgaaagtctgtgtgggtaacagatttaagagaatgtcacatgcgagtgtttgtctctgaaagtctgtgaagagttgtctgtgacagaggggtgcgtgtgcgctcctgtgcgcctgtacatgtgtgggtgtgcgcgctgcatctagctccagtgtttacagtcagctctgtaagtttgcctggctgacgtttgtgtgtaggtgggtgcacagagctgtgtgggtgttgtttgtggtggggatggggtcggggggtggggctgggggaggtcttctccacctgtccttggtttttctgacccagtggagagaaatagggttattggagtgttggagggatggccccagacatctttgtgtttctctgcttggctctgtgccctgtgcttctgagcctgctgtatttacctcttgctttgtatttctcaccctgcctccccctgcctcctatcctctgcctgtctttgtatctttgcccggggctcctcgagctccatctggctccgatgactcatctgggataggcatgaaggttacccaggggaacaagggccccgctgttctcgagagaagtgggggtggaggccagccggctgggaccctgcagcctgctccctgcacgtggctcctggacctccaagggaccaggtgtgatgcctctggttctagctcttctttgatccatgggtgccctctgcaactcagtcagctccctcagctgctgcttcagagctgtggggtctcagctgcctcttacattcctgccctagagcatcatgggagcaactggaagaggacaaagggatgggggaatatccccccactcttcctacctcctggggtgacctggcctcccagtctttagacccgccctcatctccaaggcaactcaggcttttcctcagcgctgagcttttccttcagaggtagccaccttcagaaatgggaactccaggggacaggatgtctgactcttagggatggaaggcagagtgaggagagctgggataggatgctttggatctgatggcagaggtgggctaagggtatgaggactggccctaggggctcctcaggattccagggcctggagaagagaggtcaggaagaggagaggtcagagcagctttcctgctggggctgtggggcaaaggtctcacggatagggagatacctgggttcacaaggagatgacagctggggtggttttaggtagtgcatgctgcttgggtgccagtgaagagcagggattctcaaactttcatgggaagattctgattcagcagatccagggtagggatgaggttctgcgtgtctcccaagcacctgtgtgctgctgaggctgctggtccggggatcacactgggcttggtggggctacagaggatagtgagactggaaagccctggggtcccccacttctcctagaattctgggatcctgggtggggaggggaccagaggttagcccagtgtctggcacacagggagcattctaacaacatagctgatgctattcagcagctattgctgttgttgctttatttctgttattccccatgtggccccttctgccagtctactgttggctgtgaggcgggccccttgactgccctttcactaaccttcccacttgtttgccccccctgcagagatgctgcctccacccccttaggcctgaagagtcaggaactatggggccaggggccctctcatctctactgctgctgctgctgctgctactcttagtggcaactggagatgctgatatgaagggacattttgaccctggtgaggaggctggctctggggtccctgaggatggggcttgggagacagagtcagggccttgaccctccgtatgcctgtgttcacccagccaagtgccgctatgccctgggcatgcaggacaggaccattccagatggggacatatctgcctccagctcttggtcagactccactgctgcgcgccacagcaggtaactggcacacccgggggactgctctggagggagttcctggggcctctcttgcccttccaactcctctgcccaagccaagaggcttctgggagggccaatgccaatgaaactccacccttcatcgtgaggggctttaaatactagagacagaggcagaccagatgttcattgtgaccccttgccctctcccaggctggagagtagcgacggggatggggcatggtgccccgcagggccagtctttccaaaggaggaggagtacctgcaggtggatctgcggcggctgcacctggtggctttggtgggcacccaggggcggcatgctggaggcctgggcaaggagttctcccccagctaccggttgcgttactcccgggacggccaccgctggatggactggagggaccgctggggtcaggaggtgaggctggcagggacagcccccacagaaggttggctcctctctcccctagctacactttaaatgccacccggctgcaggtgactctcccaatttataccttctttagtccaagcctggctcttgagctccatctcgtgttgcaaacctgaccaccttccgggcctttccacctggaggtctaagaggtgtctcaaacctaccataaacttcccgagctgaatttgaatcccattcctaccccaaacccgttcttcttccagctcaggccagttgctcaggccataagccgaggtaatagcgctgattcctctggtctctcaccccctacttccaaagaaccagcaagaccagtccgtatttccagaagccagccacttctcaccaccaccacctctaccaccctaggccatgcccccaccacctccagcttcgacagacacagtggcctccaaaccattctccatgctcctgtctcttcccacctgaaatcatgtccacgtagaggctacagccactttacccaaaaaagtgcaaatcagatgaggcacacctggcttgtaaccctccactggctttccattctgcagattaaaagctcagctccttcctgggtgcagaagcttagtctgccctggctcttgcccacctcccttaggaagaagatgagtcttccctatattctcgctccactcaggcccaccgactttctggctgtccctggaacaagccagggtggtcccacagttttaggacactttcggttgtcgttctctctgtgcctggagagcttctcccccagatgtcctcaggttctccttccactcgcttttcctctagatattgtctcctcggagagtccacctccccctgcttcagccccacagcctgcctcctattcttcacagctgtttttcctactggaatctcagtactgcaggggcagaggggagggatggatgtttgccactgagaatgtgcagagctggcacagagtgggccctcaaccaatgtctgctgaaggaacagagaggatggcgtgcaggaggagagagaaagccagagcagaggtgcagagctgtgagggaatggggagaacctgtgcatggcaggatgggtggcttagagacaaatggagatgggtccggggtcgaggctgacactggaggttggggacagaccttcaggctgagagatgtgtcagagatctttctttgctgcaccccctcattttccacatccccgctgtatcccatagtcctgtaggctcaacaccacccttcatgagtctcttggtggccagtgtgcgctgggccaggaacagcaggtgactgggaagttagatccaacctggagcctttcccactcatccaccctgtttcctgggccgcaggtgattttaggtaatgaggaccctgggggagtggtgctgaaggacctcggaccccccatggtggcccggctggttcgcttttacccccgggctgaccgggtcatgagtgtctgtctgcgggtggagctctatggctgcctctggaagggtgagtcattcatacccccgagaattcgtttccaggcctggggcctggggaggagggcatccagggtcctcttttttttctgttgggaagctgtcattctgagtgaggaggggcctggccaacattgtggcctatgtagggatacaagagggggaggagactggggcaagggaggggtaggaggcttcctgcttcagacagccaccccctgccccgccccagatggactcctgtcttacacggcccccgtggggcagacgatgtacttgtcccaggcagtacacctcaacgactccacctatgatgggcacaccacacacactgttggcgggtaagagaggcaggccctgcagggcctgagcctgcggtgggtgggaggacttagtgggtggggtcaggagtcccggcattgagatgcaagatgggtcaggtaaggccttggggacacaggatccaggattgaagggtaaccaggcagactactagctcatgtgaccctgcaaattagaaaaagacgactgttggaaactgtccaagaggttgcatagtgccccctagaggcggtgccaccgtgcagcttgcagcagccgtgtaccaggacagtctagggggtgggaaactgagagcctcaggatgttggggcaagaggtccaggctggacctccaccacctggttgcagagcacatgggtgggtggcactctcttctctcccactttccgcttcctctgctcccctgctctgtaggttgctgtacggaggtctggggcagctggcagatggtgtggtggggctggatgactttaggaagagccaggaactgcgggtctggccaggctatgactatgtgggatggagcaaccacagcttcctgggtggctacgtggagatggagtttgagtttgaccggctcagggctttccaggccatgcaggtaagtgcatcccattcttctgagaccagggtggttgctcctggggtgctcatctgggctctctcctggccttgaccctctgtccctcctcccttcccccccaggtccactgtaacaacatgcacaccctgggagcccgcctgcctggtggggtggaatgtcgcttcaagcggggccctgccatggcctgggagggggagcctgtgcgccatgccctggggggcagcctgggggaccccagagcccgggctgtgtcagtgcccctgggcggccgtgtgggccgctttctgcagtgccgcttcctctttgctgggccttggttactcttcagtgaaatctccttcatctctggtaagcgcctggtctatgcccagtcctcagtctctgggactgccaacccacagtatgccaaaatagccgctcctggtaccctacctacctattgctcatgagacttcccaggcagagatgccctaaatcattggagcacctccctattcctaaccccctgtctctgtctttacttcatgagcccttcactcatgactgacattgagccagtaggacagcgttggccataaaatacagaaatactctgtgctggttgaggaactcttctccaggcctcctgatacccaagaccccacgtggggctctctctctgggagtcctgtatctctccacaatccagcaactaaaacattgccatccacagcagctagggccccccccattcagattggttggtacacatcctgagtattgcccctgctcctagtagtagaactccataggtctcatgcaagtagcttccctttggtgcctcttccctacctgattcccttctttcttctcatccttctctacagatgttgtaaatgattcctctccagctctggtgggcactttcccaccagctccctggtggccacctggtccacctcccaccaacttcagcagtttgggtgagtagcccagggcctcctcctggacaactgggtcctgtgctgccattcttccctgggcccccctctgcttgggtgggaagcctcctgtggttctgactctcctgtctctgccagagctggagcctagaggccagcagcctgtggccaaggctgaggggagcccaactgccatcctcattggctgtctggtggccatcatcttgttgctgctgctcatcattgccctcatgctctggcggctgcactggcgccggctcctcagcaaggtaagcagagtgggcggggtggggggtgttggggcagtgggtggggaatgggggagtggtggtggcaggcaatagcctggagaggacagacagggtgtgggtgtggagaatgaggccaggctgagaccaatatatgtggggactactgtattcttttggatccggtggggaccacagaacctctaatcagaggtgggcttagtaaagtgacaggttgcaaaggagtgggagggattttggaaatcaggagtagtgcagttcccacagagctgtgacctgatgtgggcctgcaagatgagaggagggaagttaccagaacctgttgcagtgatgctggagaaaggctccttgagaagggcagtggagtttgcttcagggatacagctaacctgagtctacctctcagggaggggtaggagactaatcaccctgatcttacttgctgcctgcccaacaaactcctctccggccagcccaaaccatgcctgtccatatagtccatcctggtcaacctcttggtgcagaagccagataggaaaggtggagagtggagcaagaggggcagggaggagctagaggaagaagcctggcaaactctgagcccatgttttcctgcaggagttcagtggtggtggtatgtgtgaagcttgatgattctgtaattatctggtcagatttgggtttgaatcccattgtgggacaccaggagactcacttacatgctcttgagcctctgtttctttttacctgtgaaatggagttaatagtagaaaccactatgggactgctgtgaggatcagaaaggagaggggagcttggcatttaacgagctagaatcacacagttaatgttcccattcccatgacaaggccgagcgccgggtgttagaagaggaactgacagttcatctctctgtcccgggagacaccatcctaatcaacaaccgcccaggccctcttgagccacccccctaccaagagccccgacctcgtgggaatccaccccactctgctcccagtgtccccaatggctctggtaagacctgccttgttctagtcccacctccatcctctgcctgttttcttattgtatccctttttctctctgtccattcctttcttttcctatctttctagttttaactcatattctcatttctgtgcccctggtcaccacactctatatagagtcccatgtccctaccacataatctccctcaataattttacatgtattacccataatccctagtggtttcatcctgtctctgtgtcccatatacatctctgtctcttcttttttgtgccctctcattgtgtcttctgggcccctctcctttctcctagacttgccatgtttgctccatccatccatccatccatccatcatctatcctatctatatttatccattcatccatctgttcatccatttgtctgcccaccatctgaccatttatggatcatccatctatccatatatccctgcatccatctatcatccattcatccaactacccatccatcttccatctatctgtccatcaatccatccatccaccatctgtcctctgtctatccatccatccattcatccatacatccattcaccattcatccatctgtacatccatctatccaccatccaaccactcatccatcatccatccatccatatatattcacacacccatttgttcatctctccatccatccatccatccaccatccaaccattcatatatcatctatctatccatccatacatacatattcaaacatccatttatccatctctccactcatccaccatccaaccattcatctgtcatccatttatccatccatctacccgtatatattcatccatccatttgtctatctgtccatccatccattcaaccatttgtttatcatccatgcatctacccatccatctgtctatccctccattcattattcatccagctatccagcactctccagatccttgttttatcctgtccctgtttctcagtacattcattcccatcagccctggtcttgccctactccgggtctccctgtctgtctagccttgagtctcattccttccccgtgtctctcccctccttctcccgacagcgttgctgctctccaatccagcctaccgcctccttctggccacttacgcccgtccccctcggggccctggcccccccacacccgcctgggccaaacccaccaacacccagggtaagcccctttgcctctgggctcctccaggctccccatacctctactggggcagggaaaagtcctcacactttgcattgcattccctcctctccctgctgtggcctcttttgctctcctgagctctcaaggaggaagctcttatgccctgaaatctcctctgctgtacttgttctttcttgaggcctttcccttgagcagaggagcagaaagctcactggttcaaagctctatcctcctcttcctcttccaccccatcttttctgctttctagagccagagaggaggttgctctgctgacctaggttcttttataactcctcctttgtttcccctctctctagagctgtgaggaggagggcctctcaccctgggtgcttgccctctccccccatgtgttctctttctgcagtcccagaggtgaaggctcacaccccacccttcttgtctgctcctctgttccttggtgttgccttctctcgttgtcgctccctccccagggctaagaggggatggctctgcttcctctcctctatctgtagattcctcattgtgctggctgtgaggaactgttccttctcccccatctgtgtgcccctgtctctgcttatctctgagcttggagtgttgggtcagggagggtttgggtaaccatgatggggaggaactaaggctgaaagcgggggtgggggaggtagatagaacagctaagtgaacaggagggactagcagtgagtgggacaagggtttggaaagtagggggtgactagatgactggcaccatcctccttctgatggtggacagaggaattcctcttccagtcaagacttgggtcctggtctcttgggctatgctgggatccctagagaatggaccttacatcattctttgttcagccatttccattgccttaaactctgaaacaactcactctcatctcatgccagcgactccgctggtttgaggtcggtgggtagaataccaagaagatgaaggatagccccagtctctcacccagctgggagacgagggttctctgggaggcaggggtatggagaaccatggctctcaggtgctgctcctgatgcctcgtcttgtcttctttcccctcacctttccagcctgcagtggggactatatggagcctgagaagccgggtgccccacttctgcccccacctccccagaacagcgtcccccattatgccgaggctgacattgtcaccctgcagggcgtcacagggggcaacacctatgctgtgcccgcgctgcccccaggggctgccggggatgggcctcccagagtggatttccctcgatctcggctccgcttcaaggagaagcttggcgagggccagtttggggaggtaaggaggatccctggctagctatcagtagtgtcttggctgtctggggctctgatgccatgcccatatgtccccattggtcagacctgtcatctatgtctgtgttatcccagttgaccctgtgactcagtgaaccatgtgacctcctaacaaacgaacttctttccccaggtgcacctgtgtgaggtagagaacccgcaagatctggtcagtcttgattttccccttaatgtgtgcaagggacaccctttactggtagctgtcaagatcctacggccagatgccaccaagaatgccaggtgaggaccagggaatgatatctggcgatggagaagggaggcagtgaagagcggggaatcatctagagagaaatatggtagcgaccaacagagggggcttggccagggaaggaaattgccatctcaggctgatctcaggccaagtctcagtgtcactagtgagtcagcttatctgctggggttagggcgctggtctatatgagcaggagagaatgtataggtcagcccctcagtgtccctgccgtttccctgccttctctaggaatgatttcctgaaggaggtgaagatcatgtcaaggctgaaggacccaaacatcatccggctcctgggcgtgtgtgtgcaggatgaccccctctgcatgattactgattatatggagaatggtgaccttaaccagttcctcagtgcccaccagctagaagacaaggcggctgagggggcccccagggacagggaggctgcccaggggcccaccatcaggtacccccctcatccaggctggccctcccctgagagctccccggcaggagggggtctcctctcccttcactccaatgtggaggagggaggggagcacaggatggagaggcaggctaaggttcagggaggtggggactgggatgaggaatatatggccatccatctgggcattaaggagcaaaaggccagaagttactatggtgggggtgctaagggatgtgaactctgttgagaatctccctctgctctctctcactttcactgcctgagtccagacaataaagcagtagctccctgggtcagatgagccaaacagatgttgaatgggcacctacccctgggccctcaacatgggcattccaactctgcaccaggagtagatgtgacccagtcccagggtatgggcccccccttcctctcctagggatctgtgactggggatgggtctgaggctgcctccatgaccccctgttgttggctcccttcctcagctaccccatgctgctacatgtggcggctcagattgcctcaggcatgcgctatctggccacactcaactttgtgcatcgggacctggccacaaggaactgcctggttggggaaaatttcaccatcaaaattgctgattttggcatgagccggaacctctacgctggggactattaccgcgtgcaaggccgggcggtgctgcccatccggtggatggcctgggagtgcatcctcatggtgagagaccctgagggaggtaggcaggggagggcagcggcaggcaggggagcactggctgctgtgtggtctcagtcagtcacttgcattccctggactgcagttccctcatctatgaagtgagggtttgggccagtgctctggaagttgcttctggctctagggaccagagaaagcagggaggagtggtacaatgggaaagggtccaggagccaagagtgggtacaagagctggagtcagggtggcagagggcaaaagaggtaaggggggacaggaggctagagatagaagggcatgagttggaagagaatcacgaccagaaaatgaagggcaaggtgaagagtaagggtgggtagaagagggaagaggtcaaggagaggactagagcctgagaatgaagggagagcccaaaggagagaggagcaggcttgctgggagggggccagccagggggagtcaggccctgggaagtgctgagtggacgtgcagctccctgtgggaggggaggagggtctgtttgcctgatgcctttctctgtctttgttgctttatccatacaccaggggaagttcacaactgcaagtgacgtgtgggcctttggggtgaccctgtgggaggtgctgatgctctgccgtgcccagccctttggacagctcactgacgagcaagtcattgagaatgcaggggagttcttccgggaccagggccgtcaggtcagagcagaggagagggaagattgggctgtgggtctgggagggccagagcctatctcagggactaaagaacatttgttccctgcctttcatccaccctgccatgatgcaggtgtacctgtctcggcccccttcctgcccgctgggcctgtatgagctgatgctccgctgctggagccgggagcctgagcagcgaccatccttttcccagctacatcggttcctggcggaagatgcgctcaacacggtgtgaatcacacccagctgccccttcctcagggagaattaaggcaaaaccagaggcgataagcaagggaattgaatggtacccccactctgttctctgtcctgaccacccttcacctctaagagagaggcagggtgaccagaggtgggctgggcctgccagggagctgatgccttcccttcccgggacatactctcatgccccctccctgctcctctcttggaagcctctgctgcccacccagctggccctgtggatgggatcctctctgacctcttctagccatccctggggaggggggagatgggggcacatataggacagacactggataaggcctattggagcacctgggccccattggacaacactggttcctagagagaaggctgtggctcacctagcctctctctttccatcgcacactggatcccattggctgagaatctgaggaatgaggacaagaaagggagaaacatgttcccttgtgctaactcctggaattgtccttgtctttggcttctccctccaacatcctctaaaacactggacctaggggtgatccctgtcccctacccctagccatccccacttcccacctgctgtgttgtagctagaacttctctaagcctgtatgtttctgtggattaaatactggggttagggggaaagagggagcaatggcctgcagccttggggttggacatctctgttgtagctgccatattggtttttctatactcacttggggtttgtacatttttggggggagagacacagatttttacactaatatatggttctagctcaatgcaattttaatatcctgcactaggcaggtaataataaaggttgaattttccacagctgtgagtgggtttcttagcattttggtaaaatctgcttcctgtgtctgcccccaactcctttccatttcgtttcttcctttttctccttctcctcattccatttcctatcatgtatcttacccagcacagtgtctgttagccaggcccttgcctgtgggacctcacatcctataggaatgtatgctccttgttaattctagtgcaagctcttcaggaggcttggaaggggccgaattaggcaagggtcttaaccttgtttgacccatcaatccctttggcagactagagaggtaggtctactagtgcctcctcagaattgttttaaaacccattacacatacacacaaaaatgtgtgtatctcatatatgatcacagaagagatcagttgagtttactaaaatgtttaaatagtgtatgatacagtaacctatgtgtttttaaaatatatttggtaacaattatctagcagcaggtgtaataactactaacatttccaaatagtcataagcataaaagatactcaacacttgggcagccccgatggcgcagcggttcagcgccacctgcagcccagggcgtgatcctggagacctcggatcgagtcccacgtcaggctctcttgtatggtgcctgcttctccctctgcctgtgtctctgcctctctgtctctatgaataaataaataaaatcttaaaaaaaaaaaaaaactcaacatttggagatttctacaaaggtagtgggatacaaaaagagctgtggtgtctcagtgacaagtcccaggtcctgctaatactgctgggggctttgctcatattcatacttggaagaaatgctaaatttctgttagaaggtaataaaaatagacgtgtaagtttttttggccctaattctaggacccccttcaagggtttggaagtcctgggcagagaattgttggattaggctgttcagatgtacagatgactcaatagatgtgatctgtttggatgggagccagaatcaagagcctagattatttcagaggtttggaaggatgagccacaaccacgaagagagcatttaacagaatttaagttggtcagggaaaaaagaaagatcacttgcaagtattggaaaaggcagacctatcttggtggaagtttatgtgaaataaagaccctggggtcttcgttgatgatattcacaaagtgagccaactagataatgaagatgccaatagagataatttaatcttctgttgaattaaaagccccttggggtccaggtcaccgatcctgctgaaacctatgtaggtccaaccactgtgaccccatgttttaagacacaagttgacaggtcagaagtttatttatttattttactttaaaaaaaaaatttttttttaattctatttgccaaaatagagtataacatccagtgctcatcaggtcaggaggttagaggccagaacccagaatggtgaataacagaagccatggcagtgagttgagaactcccaaagctctagacctacacaaccacttggagttcatttgaacttgtctcagtgttcaaacctgctccttcctccatggtttcctgagtcagtggatagcagcctcatccactcagctgcacatgccaaaaacctggggaacatccttgatacaccttctcccctctcccaaggtcagcctatcatgaagttctgttgatcttgcttcccagattttccttaaatttgtcatttctctccacctccatcaccgtcctgcatacactacctccatcctgcccaggccaccatagtagtctcccaggatctgttcctgctcttctatggtttgttttgactgcagtcagtcagatataaatctcaccctgctactttatttcaaatcctttcatggcttcctgttgattttacaataaagaacaaaaccttcctgaccaagttgctccccacccccttctttcagcattcttctccacgctgtcctttatacagcattggcctgctttcagttcccacaactgggccagtccctcttgccatggcctctggagtatattgttcccctcccaggaacctggttcactgcggtctttgccttgttacgtcctgcttgtccttcagcaatcttccccgagttggcccatcagatcaaatcccctcttgatgctctcaaagcacttgactttctttatagtacttaatacaggtgtgattttacttttttttttttttaaagaaaataataatgataatgtttactgggtacctccagtgtgccaggaccatgcttattacatattataccttatttaatacagatgaaacagttgctgccatttcacagaaaagactattttaagcaacttgctcaaggccacacggccaggaaactgcaaagctagtgtgaagcagcccataggttcctggctgttctttttctccagggtgctgcctgaggggagaaggttatgatctctccatcacaggttggataatcctatgctgggaagctccaaggagtgcaggctgattatccagctccagaaactcaacctgtactcagttcctgacatcagataacttgcccccattcactgcatccctttaagcaggactctccaagacaacctgtgatcatagaactggtctgtatctgcaccatgcaataggtagccactagccacctgtggctattgagaactggaaatggggctgatgtgactgaggaactgaatttaaatttttggttaatttaaatagccacaggtggctagtggctcctgttctggacagggcagccttttatttatttttatttttattaatttgacagagcatgagtggggtgtggagcagagagagaagcagactccctgctaagcagggagcccaatgtggagctccaacctgggactctgggatcatgacctgagctgaaggcagatgcccaaccaactgagccacccaggcacccctggatagagccttaaagggttttctctttttaaagctggtctgcacgacttccccttgcttgctcctgtcaaaatgaagcacatgacctatttcagttttacacacagataaaagttctgcatgccactttgcaatctgctcttcttcccctcctgataggctgtacacagctcagccactatgcatacagtgctctaagtgttgcccactactctacattgttgcaatgacccacattttatctaaccaactccccatgatggacatttgggctgtttccattgcttgctttctttcttgttttctttctttctttctttctttctttcttttttttttttttttttaagatttcatttatttatttgagagcacaagcagagggaggggagaaaggagaaacaggctcccctctgagcagggagcctgatgtgggtggggctccatcccaggaccctgagatcatgacctgggcttaaggcagatgcttaaccatctgtgccactcaagggccccggtttccattgctttcataacagtaacagacacacttcagtagttttgcatgtgtatctgtgtccatgtgggaggatttcggtgtgatagatttctaaaggtggagttggtcaaatggcagttgcggtaaaataattggtaggtactgccaaagccgcctttaaaaggtgtgactacgtaaactttcaacaaaagtatctgactactgtatgctccctttgcagtgacaacatcgaggctgccaatcttttttttttttgctaatcagatattttattgtttctttaatttacttttatttattttttaaatttacttttaattactgatgagagctttttcatttgatcataaacaatttatattttttctgtttgttgcctgctacgtctttgtacaatctttctattctgttcttttccttattgctttgtaaaagctcgttgtattgtctattttgtcaaatatttcttcccagactaatttgtctcttattttacgtaccgttagccattgtcagtttcgtgtcatttttgcggatgtgatgcaccgaccgccacggaaagagccagaggcgggggagcggccgggcgggccgggtgcgctgtgcgggctccgcaaccccagccgcggggcgtcgggccgacggtctgtggggcctccgtctcgtcgtctgtaacgggaacgatacagtcctaaggccgctgtactgcagccctggctctggcttaggacgttccccagccctgccccagcctcatcgaccaaccagaccaaccactggtttctttacagcaactgtgtttattggcacgttctacagaagcggggcggtgggagcccggggaagtggcattagggctgttctgagcgcggggagcagcgccaaccctaactcgctctagatacagagtgctttgctccgacttgacgagagcaaagggctcaaggagcgcggttcgccgcgtctctccactaagcgtgtcgccaagagccaggtccgcacctctgccagggagccccggggcccttcccctcccggcatccgcccgctgtccaggtcggttaaactagccgttggcggcgagagcggaacccgacgcggaaccaagttgcgcggcctcgggtttcctcggctctctcgattaaaggccagcctccctcccggcggcggtgccttttgggaattgtagtcagccacgcttcggcccatcccggggcgagccaggacaggactccaattcccagaatacgccgcggcgggcgagcgggtgccgcgcctgttcttacctccctacttttccactctttcccctcctttccttctcgccgcagtcctccctggtctcctgtgcggttctttgtccctctctccatccccctcgtccattctcctattcctgggaggcacggcgggaccgtagctccggctaagcgacgcctcgcgactccgggtacacgaggggtggcgactcaggcgggagggaggaagggggccgggggcgggggacaggagccggggctgtgtgggtccgggtgctcgggtgcggtccttcggggccaggaggacaggcgggcaggcagcgcaggacccacgggccgggaagtaggtgcgaaggactggccaacgcgagctcatgccctgagctgacgggagccgggagcccggggagggctggtctgaaactagtttccgcgtcactgcttaggtaaacattgaaataaaaactgattctgcaaatgtgggacaatgaacaattctctatttggaaacagagagaaaactggagttgaggccagaagtggcaaggaagcaagagaggagaggaggttggtcaggtctgggagaaaggaaaggagatgagtgacatagaaaggaaatcatagaaagtacaggttattgtgggggccagtgggtctggaacgggaatgagctgagggatgacactggcgtggactgtgggggtgcatttctaaccttgcatctctcaggtgatggagagcacccccgcaaggggaggactgaaccgagtacacctacaatgcaggaatctgcaggaattcctagggggcctgagccctggcgtcttggaccgattgtatgggcatcctgccacctgtctggctgtcttcaggtgaggacctccttcatggtagggaccaaatgtaatggggccttcaggctggaataagttatcatgacttgaagcttagccctgctggggcttgaagattgaagtgtgtcaagccaaaacagagtgggaacagcaagactggtaaagctgtgggcgggatgagatgtttgagaggctgttgagggcagagatacaggtaaggcagtttctgatattaacagtttacctctacctccttacagggagctcccatttttggctaagaactgggtgatgcggatgctctttctggagcagcctttgccacaagctgctgtagccctgtgggtgaagaaggaattcagcaagtgagtctttgcagcatgctcagccagatacagatttctcaacaactagatcttccaggtgttccttggaacatttccaagaaatattaatggatataccacaacacttacatttaaacaagtctgagaaactctgcatactctattttccctcccagaaagttgtgatgtcttcaacaaagttctggtaggcgtggcagtaaagaaatctgccttaagaagacactgttttctctgtgtgaaatggtgttccaagggatgatcagttcagaaaaggcagaaatggaggcctttatgggcctccttctttttattctccagacacccccttaacctctctgcttctgtttcagagctcaggaggaaagtacaggactgctgagtggtctccgtatctggcacacccagctgctccctggtggtctccagggcctcatcctcaaccccatcttccgccagaacctccgcattgcccttctgggtgggtatgtcacttccatcttcctaagctaggccaggggaactagtatttaaactgttagcagtggggttggcagcgatggggcagagagcccttgaggagcctctctggaaccttgtgggctccactgttgggagctcctttagggataaattggacaagatggagctgcatgatgtaggaaagaagtgtctcctactcagagcccgtggggatgaagagggaaagagcagaggggcaggcagggaacacagccagggtcccttattcttggcccattctggcataggggcaaggcctggtctgatgacacaagtcagctgggtccagacaagcacgcccgggatgttccctcacttgacaagtacgccgaggagcgatgggaggtgaggacttgggactctgtgtctctgcttgtactcctacatcccatggcccttaaaggcatcgttctctctgtctacttctgttcctcaggtggtcctgcacttcatggtgggctcccccagtgcagccgtcagccaggacttggctcagctcctcagccaggctgggctcatgaagaggtgaggaaaccagaggtgcatcagatccctgctaaactgtgtgtccagggtgggttaggattgcaggcagttaactaaaaaaggagagctgcgtggagtatggccagagagaaaccaaggtaaaatgcgaggacaaatggggacgatggcctctcttcgcatacctctgccatggtccctctctgcctccagcactgaacccggagagccaccctgcattacttcagccggcttccagttcctgttgctggacactcctgcccagctatggtactttatgttgcaatatctgcagacagcccaggtgaggaggtgacttgctggcatgctctgatcttcgcgagaaccattgagagactaccctcacagactgtttcctgatgttctgtcccctcattttctcccttccatccctgcccctttgtcactgaccattcatccctagagtcggggcatggacctagtggagattctatccttcctcttccagctcagcttctctactctgggcaaggtaagcaagggggatgcagctggaggcttgggtgggcaggctggtaggtagatgaggggggacgtcaggttatgggcaaaagtgtgaaagataaaaatgaccaaagcatagatgggaaaagagggaatgagtgtatggggttgggaagggggagaatgggatgtgtttggaccccaactggccacttcttttccccaggattactctgtggaaggtatgagtgattcgttgttgaatttcctgcaacatctgcgtgagtttgggcttgttttccagaggaaggtatgagcacccagatacatggcttctaggaaaggcaaggtggtctgttgccttggcttttaaaaagggggtggggtctcagatggtagctacactggcagtgagtatagcataagtagatgtagagttcttgaatcactattttgtgtacctgaaactaatgttacattgtatcatctatactcaaaaacaaaaaagaatgggatctcaggaggcagtaccaggaagaagtcgccagactgagtacttgggttccttggagtcgataaattgggtgttgaggctcttgctttgggaggggtctgatatctcaggcaggaatatggttagtgacacctgagagggggccctctgcctttcccttctgtcttttctagaggaaatctcggcgttactaccccacacgcctggctatcaatctctcatcaggtgtttctggagctgggggtactgcccatcagccaggcttcattatcgtggaaactaattaccgactatatgcctacactggtgaggccagagagggctgggaggacagcagcctgggaatgggagtggggagagggaaggacgcaggagggagtgccgattcatgttcatgtttacctgccagtttacagagttctctgacattttgggtcacacttcaaggtctggagggagtctaggtatggggatagcctcctcatcttgtcttcctacccctgagccagagtcggagttgcagatcgccctcattgccctcttctcagagatgctctatcgcttccccaatatggtggtggcacaggtgacccgggagagcgtgcagcaggccatcgccagtggcatcacagcccagcaggtatccccacttggggaaggtgggtgcaggaagataggctgcacttgggctgtgggatacagctcatcttacagaaggctactatcagctggcgagttgtgtttgagcatagaccatgcacataaagagaagtcaaggctctgagcgtgggaaaaaacacaaggggaggagatatagatttgtgtctccaccgccaaccccttcctagctgcattaatggcctggttgcttcacttctttgagcctcactcttgtcatctggaaaatggaaataataacagttctcccctcacaggctttgggaaggattcaatgagagaatagcagtaaagcctttggctcagagcctgctatgcagtaagtgctcaaaaaataatagttgctgctattttaaagaaagaagaataaaacaagactatgcaaagggcagatgtgctagagaaggaatagcagacatgaccagtgggagcagcagcttagaatgacagctgaatggggataggttaatgataggcacatggctgcaggtttttaaacagcaagctggtattctggtgacattaggtgacagcttaggtagctttcctgccttcttacttgagcgcctgatcccattcttgtctgttttcccagatcatccatttcctaaggacaagggcccacccggtgatgctcaaacaggtaccaagctgctggaggctggaaacccctggcatctggcgatgaagtgatggaaaagagaaagggacatccaaatctggggaatgagtagatggctagggatgtctgggacagtattcctgaatcttcagagcaactgcttgcccctgcagacgcctgtgctgccacccaccatcacagaccagattcggctatgggagctggaaagggacagactccggttcactgagggtgagtggcttctggtggttgattcttgtcaccggccggaagaaggacacttgagccttgatgaacagaaaaagctattcatgcatttcggtttgtttattacatgggctgggagaggaaagctggcaggacactttatttggggagtgagtctgtagtagtaaattgtctcaaatcagtgctgttgggatttagctagaagagggaaattgggagggataattcacagtagtttctctggtttggtgagcattagtgggttttcttacccacccgtgttatattgccttactgaatgtggctggatcaactactgtcaggatgagctttggaacagacaagcatagaggattagctttgaaatggaggtggctggcaagcgcagacccctgccccgaggctgccacgcaggggcctcacgttcttggcttttctctctacgctggccctccgctgcccctgccctgcggactgcaggtgtcctgtataaccagttcctgtcgcaagtggactttgagctgctgctggcccatgctcgggagctgggtgtgctggtgttcgagaactcggccaagcggctgatggtggtgaccccggctggtcacagcgacgtcaagcgcttctggaagcggcagaagcacagctcctgagggcggctgggaccggggcggggcggcctcagaactctggtgttttctatttacgtgttgggctccggtttaataaagttgtggaaacgagccacgcggcccccagcgcctgccctagaggctgcttctctcctcggaggccccgcctcctgcagccgtaaccgtcgtcggacccgagggagagcgcgcggggcgggtcctgctaccgcgcatgccccggacggggccccgcccctgctccgcgccgctcgcgggcccggtcggcggccggattcgctgcttccccagcgcctgcggctcggcggccgcggggcgccctgggatagcggcgggcgggcgcggtgagcgcgcgggtcggcctgcggggcgggtgggggggtgggggtgnnnnnnnnnnnnnnnnnnnnnnnnnnnnnnnnnnnnnnnnnnnnnnnnnnnnnnnnnnnnnnnnnnnnnnnnngcggggggggggcaccctgaggtccgcccgaccgagccggaccccgcgccctcgggccctcacggggaggcgctgtgtgggagcgaggggcccgggcgtgaggactaggcgtgccgcgcccgcccacccacgggtcgcaatgctgcgggtctggagcgcctctccgcctttgcagacactcctgatgcctcgttcgcccttggcctcgcttccatcacggtgctgggggctcgggccctctcaggccctccgcaggtcccaccctctctctacccagtcagagccgtgccggtcctccctctcccggaggaaccatgaagccaaacagaagcgccagcgggagaagcagatggcgctggaggctgggatcaccccgaagggcaaggtcagggggtcacgcagcttgtccttggttctctgcccggggtacgctggacctggcatcccacaccctcgcttctgctgttcctctccaggcacctgcaggatccagtaaggcctggactcctaaggaggtagtgttgtatgaagtccccacggaaccgggtgaaaagaaaggtacgtagggtacttgaaggcctctgcacccacatttttgttgcgggcttgggctgctgaagtgccgcctgggaacgaagttcaggacttagtggagctctccttccgccactgctgcagatgtgtaccgcctcctgcctcctgcatacagtcctcgctacgttgaggcggcctggtactcctggtgggtgcgagagggcttcttcaaaccggagtatcaggttagtacctgggagggaggggtgctgagcggttcccacgacagaatggccactgagcttgctggtcacagctgagcctcacagtcgagcttccagccagcctgcccaaggaaactggcagggcttgtcctctgcccttcctgtccaaaaggttttctcctttcctgtttgcagaactgttcctccttctctctctccccccagttttttctgtcttagagacaccatagggtgctattcccccaggtaacatcccattatcttttgctcactgacttttccactttctagaccaggctgccccaggccacaggggagacgttttccatgtgtatcccacctcccaatgtcactggctccctgcatatcggtcatgcactgacagtagccatacaggatgccctggtgcgctggtgagaggggaatggggctacttgcatccttggaggggaaggaggaagtgtggtagtatggaaggagtgtaaacgtgtaagctcaggggttcacgtaatggtatttgttttgtaggcaccggatgcgtggggatcaggtgctatggatccctggctcagatcatgcaggaattgctacacaagtatgcattttgccattcttcccgtttcttgggtagaggagagtacccccaaagtgacctgattctctgtccctttgcctcttgatcttaccctaggctgtggtggagaagcaactgtggaaggagcgaggaatgaggagacatgaactgagccgggaaaaattccttagggaggtgtggaagtggaaggacgagtgagtaatgaccagtggaagtggaggggccgagattgccccagctgttctccctaacttgatgggctctccctcagagaggggagctctggattcctttagcattcagcagggtctccatgtgtgtgtgtattacacgtactttaaaatgcacatgtttgtgtgtgtgggcattttgtgtatttttttctctgcttatttcatgataccttgcctagatttcactaagtcttctacttatctgttcctaccttccatttgcttgaaattaccctcattcttacaggtctgttatcacatgccattttctctgtaaagcttctttggggttttcccagatgagctgccccctctgtaattgtagaattacattttgtaattgtagaattactgtctatctaccttccttctctccttcctgcttccttccttccaagaaaactccacacctaacgtggggcttgaactcacaacctcaagatccagagtcgcgtgctccaccaactgaaccattcaggcgccccagaactttatacttcttttaatgccatggaaggcccatgctgagtttgtatgtctgtctccattggcttcgagaagctagatcaatgccatattccaatttccagcgttattgggagtatcactgggcctggcacgtagttggtgctcaggacacgtttgctgataacagtctctctgggcacaggaaaggtggagagatcagtgagcagctccaagctctgggggcctccctggactgggaccgagagtgcttcactatggatgctgtgagtgctccatgcttggtacctgagggtgttgaggcagtgtcaagagttgcgtgtaggcaggtgggatgtagtgtatgttgggggtggcaggatgggaatgcctgggtccctggacactgaagtcattccctagggcttctcagtggccgtgaccgaagcttttgtgcgactctacgaggcaggattgttgtaccggagccagcagcttgtcaactggtcctgcactttaagatcagccatctcggatattgaggtgaggcagaggaggagaaagctcagactctggaaccagactgccaggattcactgagtctggccacctaccagctagctgtgtgacttctggcaggcctctggaagcccctggaagcctcagtttccccagtctgtagatcagggatgatggaaatgcctgtgtcaagggggcattgtgagaatttaatgggaattcatggaaggtgttcagcacaatacctgtgcatggtgtaagtgcttggtgaatatttctgtaactgtgactgacttaagggaggggaaggtgagtcctcaatcctctgaatgtctatagatgcctgtagggagcccagggcggtgggtgagtggaggtgggaagcctgcagaaaggctactctcagcagcaccctgctgctttgattcctccaggtggagagccggcccctgcctggccacacggagcttcaactgcctggctgccccactcctgtgtcttttggcctccttgtgtctgtggccttccctgtggatggagagcctggtgaggatagtccttgggaaagttgcctgtttctctctgcttttttttatttattttttccttctttaagattttaattatttattcatgagagacacacgcacacaacgagagaggcagagagagaagcaggctccatgcagggaaggcggcactaaactgctgagccacctgggctgccctttccctctgctttcttgagcctgtgttgggttgatgggagggaacccaccagcctgtttcccacatgacctggtgggaggcacataaggagccttggtagtgtttgtgttcttatgggcacttattctgggtgttctgggccgtgaaagaaaagtacacatggtggctgccctccaggagctttacataattctacaggaggctggtaccgctgaaagagataaaagatcagtcccaaagtgtgtttgaacagtaagtgtctggaagagttcagagaaagtgaagaaagattagctggaaaagacagaggaagtttctcaaggagggcctggtgctgacccctaagaatgcatagcatttatgattagggcaccgagaaacctctgtattatctgggcgccaagtaaatgttctggttgcttttgttaatgctccgtctcccccatgcaagttatcgagaaattccttagcaccagacagctttccaggcttctggtcatcagctcacagggaaattctagtctcctaattttctctagttgcttctgggagcctgctcaaccttggctgcttccagccctgggagtgggagaccagggtgatgactggtgtcaagtgcttaaattttgtctttagatgcagaggtcgtggtaggaactacaaggccagagacgttgcctggagacgttgctgtggctgttcatcccgacgactcccgatacacagtaatgcgcagcgtgctgtctgccacctgcctttcctaccgcataacttactcttcccttcttttctgttggtagtgccttcttttcttcaattttcttttcctaagacttctctcatctcagctctccggtgtctctttcttttcatgatgccttttcttttctctagctcagaggttgacaaattatgcggcctgcaagccgggtccattccattgcctatttttgtatgatccacacttgcacctttagatattacctgcagctgggtgtcaatacccaactttgctgcagtggcagagcagagtaagtgtgcagagactgaatttgcctcttggcctgcaaaggctaaaatacactctggccccataagaaaaagttcacagaccactgctctggctttttactttttggtttcaccttctgattcccagggttctcagactcggcccagacctttgtaccccacatgcatgcctgtccttgaccttgctcctttcctttaagcacctgcatgggcgacagcttcgtcaccccttgactgggcagcttctccccctcatcacagactccactgttcagccacatgtgggcacaggtgggtggaagccatgggaaggagagcaggccggggatcctagaggagtgaggaaggaaggaggggagggaaagcctcttttagggcagcttccgtgggtagtgggacgaaaaggaggcagagactgagaagagggaggagggacggggatgtgggcgatgacggaacctctggaaaaggccaggagccagtgctcactgtggttctgctcccccaggggcagtgaaggtgactccagcgcatagccctgctgatgctgagctgggggcccgacacggcttgagccctctgagtgtcatcgcggaggatggcaccatgacctctctctgtggggactggctacaggtgatactggcctcactgtcaccctgtccttggggggcactctgcctttcctcacctcttcccctctcttgctttcttgttttttagtgacctctaactgtgactgttgccattctctccccagggtcttcaccgatttgtggcccgggaaaagattatatctgcgctgcgggagcggggcctgttccggggcctccagaaccaccccatggtgcttcctatttgcaggtaacctcattttaacccttttacttaggggttcccgaggaagggagtggaagggagtggaagaagcttaagagtacaatagggtgggctctgtaccccttgcaagggaacagaggctctgtgtcagttttactggctgctgtagcctcagttctgagggcctggcatgtagcagggtcccgtgtcccctggggggaaagcacagaagctgaggagcagcagattcctcctttctctttcagccgttctggggacgtgatagaatatctactgaagagccagtggtttgtccgctgccgggagatgggggaccgagctgcccaggtgaggctgaagtgcagggaaggccggagcctcaggtactgggaaggccctgaaaattggaatgaagacatagggaggctgaggccctcctgccccacagacttctggccctggcatttgagaggagagctgtgggggtggaggcaaggtggcccagaaagggctggctcatctcccgcttgacctcagaatcttcttgggagccttgggaggtcctttctgagtcacagcactgcctcagaggctacttgttccatctcgggacagatgcaagtgaggtgcaggaagggaagctctaacggcctttctgttcaggccgtggagtcaggggctctggagctcagtccatccttccaccagaagaactggcagcactggttttcccacatcgggtaagggcgaggggagctctggaggttggggcagggtgatacactgcttattctgagaagtcactgatgccctcttgttctctgggcagggactggtgtgtctcccggcagctgtggtggggccatcggattcccgcctacctggttgtagaggagcacatgaaggtcggtaggacgaagaggatgggagggttgggcatagcagaaagagaagtagccacagctcaggagtcagagagggcttccagtgtcagtcccagctccctgcctgtcctgggcagggaccccactgtgggatcggcgcttccgagctggcacttcttcatctcaccgccagagggggctggcaattcccaggccacaagggagactgtgcaaactccgtgacgtttcacacctggtggctgctgttcttccttattcttcttgatcccttactttctctgtagggtgatggagaagactgttgggtggttgggcggacagagaccgaggccagaaaaatagctgcagaactgactgggagatcagaggcagagctgaccctgcagaggggtgagtgtcagggttgtggagggcaaaggagggcagttgggcctcagggggagcagactctggggtggaggaggtgaggtcagggaggttgggaatggggttagggcctgaccgtggtctttctgcctggagttgggctggaaaggtgcacagcagtacgctcgacgttccagttgtctccattccccactctgtttcccagatcctgatgtcctggacacatggttctcttcggctcttttcccctttgctgccttgggctggccccaagaggtgaggcgggttgagaggaagagggtgaagatggggatgatgaaggagatgaaggaggcagtagcgcccccctacccccacccctgcagtgagcctcaagagctgcaggtatagggcttaggcttctcactgcttctctttttcctcctagaccccagaccttgctcgtttctaccccctgtcacttttggaaacaggcagtgatctcctgttgttctgggtgggccgcatggtcatgttggggacacagctcacagggcagctccccttcaccaaggtaatggcccttaggtgcctagcccatctttgactccccagttttccctaaatcttggtctctgttcgaacccctaatgtgctattgtctgtggtcccaattcctttttcctgattcatttcctgtcctaacccctgacacatggaggccagagagcccctgggcacctcctaggataggctcccctaacccctctaccaactccctctgtgccccccaggtgcttcttcattccatggttcgggacgggcagggccggaagatgagcaagtccctggggaatgtattggacccacgagacatcatcagtggggtggaactgcaggtcaggatgaagagtctggcgaaggatggggtttgtggggcagaagaagggagcctgagcagaggagccggctgggagggagagtgagcgggtaggacccttgaaggggcagggtctttgaccgaggccactgaagtgcttacccatcccaggtgctgcaggaaaagctgaaggacgggaacttggactccacagagctggcgattgcggctgcggcacaggtgagtccccagcatctgcctctctcagcctcaagctggcggctgctgggtttcctttgcagcccaggcttctgtccctgcagctgtgtaggcatctgccacccttcttatccctctggttgcagaggaaggacttccctcatgggatccctgagtgtgggacagatgccctgcgatttgccctgtgctcccacagggccttgggtaagcctgggcaagggaggggctggcattgtaggcacccctgtagaggggtggggcagggtcaagggctccctgtgctcctgccacccatgtgcacactcctcctcccactccctaccagggggcgatgtacacttgtccgtctctgaggtcttgagttcccggcatttctgcaacaaaatctggaatgccctgcgttttatcctcaatgccttaggagagggatttgtaccgcagcctgcagaggaggtaagagaataagaaaagaggcttgggaggcagaatcattagttctctgagggttgaagatggcatttggaggaggaggaggaggagtgatcctgtcctgaagccgtcttccccccgcagctatccccctcatcccccacggacgcctggatcctgagccgtctggcccacactgcccaggagtgtgagcgagccttccttgctcgggagctgccactcatcacccatgccctccaccacttctggctccacagcctctgtgatgtctacttggtgagttagactggaatatggcattccactcctgcatgcctgcctcctcttccccttgagattggattttctggcagagagttcagtctctttttgttttaaatgttaaatagcattacagaatcattattttttttaaagattttttatttatttatttgagagagacatgtgcaaggggaggggcagagggagagggggcagcatgctcctgagcagggatcccatgtgaggctccatcccaggaccctgggatcatgacctgagttacccaggagccgctctttttttttttttttttttttttttttaagacacatttattcagcgtcatgatcagactattacatttagcaatcaacagcatgggtgcgaaaaaagaaaactacattaagactctttacactttagacagaacagaaactaagataatgtgttatgcaattagtcacaaatacgatcctcaagttttttgcccatacccacaagtatgtctaaaacgtgtcttctttgtagcaaccaggccctgccactgctgtgctcggctgagttcacaaatgtgctgtaaactgtagctccctgtcacttctctggctctcctcccttgctaagctttgtttcctggcagtaattaaaaccttctaccactgccatagctgctgctgctgctgctgctggaacaggcatagatagccaccttggtttcgtggtttggcaaagtattggcctccaccaccataagggccagagcttctgcctccaaaatttcctcctttcatgggtccaaaatttgaggattgattgttgtaattgccaaaatcattatagcttctgccacctccgaagttgcttctgtcattaccaaatccgttttagccattcccactgccaccgtatccaccaccacctcgactgccaccgaagccactgaagttccctccacgaccaaagttgtcattcctaccaaaaccaccttcacgaccaccactgaagtttccagaaccacttcggcctctttggctggatgaagcactagccatctcttgcttcgatagggctttccttcacagttgtggccattcacaatatggtgtttttgagtgacagtcttgtgtacagagtcatgattatccaatgtcacaaaagcaaaacctctgttgttgccactgcctcggtcagtcatgatctcaatcacttcaattttcccatactgtttaaaataatcttagatgatgttcttcagtgtcttctctactgccaccaatagaaatctttttcatagttacgtgggcaccaggtctttgagaatctcttgagacagccctctttggttccacaactcttccatccaccttgtgtggccttgcattcatggctgcatccacctcctccagggtggcatatgtgacaaaccgaaagcctctggagcactggtgtttggatctctcattaccacacagtccgtaatcgttccccattgctcagaatggctcctcagactctcatcggttgtctcaaagctcaaacctctgatgaagagcttctgcagctgctcaggctctttgggagactctgacttagacatgatggtggtgggaggggagactaacgatgcttactcggcggcgtccgggggcggaaaggactctgtctctttttaataggcaaaaaattcagtgcttttttttctttctaaagtatacaaaccagttttattccctcttcccacctctgagactccctgccatagatttccacttttcatttgctccagagtgtgttctgggaccgccagtggtttccaggcttctgtgtgctcccgcccttgtttacccacagcattttccactggcagggcagtgaatgtgtggacaaaggacatggagggggcctgggcctgggcctgggcctgtcccctgaccctatggcttcctccctaggaagctgtgaagccagtgctttcgcactcgccccatccccaaggcccgcctcaggtcctgttctcctgcgctgatgtgggtctccgcctcctcgccccactgatgcccttcctggctgaagagctctggcagaggctgccacccaggcctggcagcaactctgcccctagcatctctgttgctccctaccccaccacccatagcttggtgagtgacatatccctgacgtctgtgaatgggaccgttggtgaacagctggggcgccggcttctcaaagggtgtggtgccctggggtcatcaacagtcttggtgtggactttaatatagagtcttcagggaggtgagtagttcttgcagggatgtgttgggggcagcgtacaagagcagaactacattgctatgtggctgtgcctcagtttgccatctttaaccaggggtagtaatagttcatgtcacagttatgataaggataggatggcccccaaatatctgcaattttaagctttaataatttcagaagaataaatgctgaccaactcacccccaaaattattttaaagttgacctgtttaaattttcttatgcttgttcggttttgtgagtaacacagttgaaattctaatttccttttggttgtttgacatctttgatcagagcagttaacagacatcaaccacagatatctgttaagatcttagatgtgccccaggttgtgcttgaggtggtgaattgtgtgtagtggagactggggtaggcaggtgtgggctggagccaggagggttgatagtgagtttccccggatcctgcttgtcagctctgggtctttgtctctaggagcactggcgccagcctgcgctggaacaacacttctctcaggtccaggaggctgtgcaggtactgagggccctccgagccacgtaccagctcaccaaggcccggccccgaggtgagatgggccctaggttcctgaggccctgtggcaagaaggggttggcagaggcacggtgcgagcctggggggcagagcccagagttaggaggggcaggatgggaagagaagcaaggtctcatgctttgaccctgacagtggccctttcctcctcagtactgctgcagagctcagagcctggagagctgagcctcttcaagcccttcctggagcccttggccacactgggccactgtggggccgtgggcctgttacccccaggtgtagcggcaccctccggctgggctcaggccccactcagtgacaccattcaggtgtacatggagctacaggtgctgagaggagattggaaggggaagggagacatcgaacggatgccaggaggagggcaaggggcgggttctgtaaaagtgagaaagactcctgaaaatggggtgagggaggtactggacgggctgtgggtgaagcagagatgcaggtggcacagagaaggctgagccctcactgttcttccacagggcctggtggacccccaggcccatctggctctgctagctgcccgaagacgcaagttgcagaagcagctggatggcctcatggcctggaccccatcagggggagaggaagagactaagaggcagcagagggtaaggctgggggaagcctgactccctgagggaacgtgggctggagagggtgggccttatatcagaatcttcacctgcttctcttcccgtctagctttcttccctccagctggagttgtcaaagctggacaaggcagcctctcacctccggcagctgacggatgcatgtcccagccccaaggagctctgagcaccagttcgttaaccctgggggttttcttctccctcagacctgcctttgggacaaaccgatctggagcatgatgggtcctctgagaccatgcggctcacctccctcattttgtaaaatgaggaaacagactggcttggtcagcatcactgggtgtctttaagatgttcacattcctgcccagccttcctcctaggcagtgccacctggaagtttaggaatgagataaacttttaaaatctcaaacattatggcctgtggtccttttatccatctttccctttgtggtgactttcttgcctctcaattctttttttttttttttaaagattttgtttatttattcatgagagacagagaggcagagtcacaggcagagggaggagcaggctccccatgggagcccgatgtggaactcgatcctgggaccccagggtcacgccctgagctgaaggcagacacctaactgctggtcctgcttctcaattcttccctgagactttggtcttagccttgggctctgggctgcagtgggagtgtaggagctggcggtgcctgcctcattggaagaaagagcttccagtagggtctggccgcagtgactcgggttctacctacttcgaattattgacggtgccttggcttctgcaggcccttcctcctcaccaaatggaagctcctctgttccttggtcttatcttggggggatgctggagaagagcaggtacttctctagccccgaggagcgacaaggtacgctggggcttgagtgccactcccgttctgtgtccctgacactagagagccagggacatgttgcccagcctccgacgcatgcacatccccactgatgctttgtgtcttccccatggagttcaggggcctgcctcttacatgcccaagttatattcagtccagcagctctgagtagctactatttatggtggacctgttagagtctgggtcttccatgatgccactgagcacctcaggaagcgactttttgcttcattttggaaatgaagaaatgtgctccgagaataaaagcaacttgtctgaagtatcaagtgggattcaacccattaaacaggtgcaggttcatttggggtgctgtaagcaagcttcgaatataatggcgacttaggcaaggagggcatttctgctgggcagaggcagggctctccagtagtggaggcccacaccctgctgaatcttctttcttgccattctgatacattccttccaactgtgtctaagaactgtcgcagcctaccaccccctcattccacccagagggaagaaggagagaaggaggtgggcaacagtttcttttctgtctccccaaccccctattcaataagtacttcttgagtacttaactactctgcgctgggccctattctgggcccttttagattcattaataaatgaaacaaagatcttgcctcttgtggtactttcattcagaaagaacacatataaataaactgtgtagtaggtctgagagtcattaatgatatgggggtggaggatagaacaaggtaatataagtggggctgggggcagattgtagtattaaatagggggtcagggtaaaaattgtaaaagagatttaagcaaggacttgcaggagatgcaggaattagccaagtggatgcttgggagaagagtgttccagggagagggaagagccagagtaaaactaagacaggagcgtcccatgagtactcggtagcaaggaggccagtgttgggaagaatgggaggtaaattcctatgtggggtagggggttgggaaggctcaaggccaatcatctagagctgtgctgtggaaaatggttgccactcgactaattaaaatgaaattcaactaaacattcagctactcagtcacactagtcaagtttcaagtgttcaatagccacatgtgactagtggctaccccattggtcaggttctaaaacatttccatcatcatggacaatttattggaaagccctggtctaggaccctgtaggctgcttgaaggacttttgttttctcccctctgaaatgaaagcacctttcctttcaaagatgtcatcaggaagttgcatgcttcctttcaacttctatctcattgctagttgcaagggaggctgggaaatgttaatgactgtgtgctcagctagttgtaagtgagccatgtgctcagctagaatttacttgactaccccaaaagaactgtcttgagtcttgggagagagttttttgagaaaagaatcaggaaatcagcctggtgatcccaggccctgagacctaggaatcagattgagcagcagttagctgtttgttcctccagtcttctggaaatccagacatccagtctcccaacttggttagggcatacacacctggcccacaggtgccacctgcccactggtgcgagctaggagcaagccatgaaacactggggccctttgcaactcccagttacttctcttctgggccgctggtcccaggacaattgtaaaggaaaccagaggaattttgttttgcaagtgtttcttttcactcccccatttcttattctcccctcatcttcagggatgctctatatggagctattgccttcacctccctcagatggagtcagcctctaatttcgcatgatggtgatggtatgtaggtgggaaatattaggcagggatgaggactgtggagaataggaaatgatcatgttaatacccccaaatggtcaagtttgggctgcatgcttgcattttgagaaaggtggtaaggagtcaaggtaatcttaggtgaagagtcagatgagtgcctacctcaagaaaatcaggagagggaggaccctggactcgtgaggggactaggacttatacgttgggcccagggttctaccttaacaatccctactgcccatgcccacttgtctggcatgtgcccttggtagcttatccatgtaatcctcacaagagtccacaagcagcaggtactatcaatcatccccattttgcaggtgaaaagatggaggctccaagaagaaattcacctggggctcaagtgtgggcctgtaggactgaatgtcctcatagtcagccagtacaagctctgctccccccttttcctccccacctgccctcctccctacctcttatgccaggctggccatcccttcacaggtggaacttctcatttcctactggagctgcctcccacccccaccttctactctaactgacctgtgtggggccctgggtcagggggacccatgtctggggactgttctgtccacatttgtctctgggctcctgagctcccagccctaaagcttaagcaaagagagatgaaatgaaaaccttgcttaagcctaggcatttgtctcatgtccgacctgtctgctgctaataactttccccctgttagcctcaggcttcatctgtaaaactggatagtgacacctattatgctacgttcaagattgctgcaagcatcgaaatgggaaagcatcaagcctggaacaatgtagggattcagcacaggtttctttcctttattcctaggtgttctgaagatctcagcttgaagtgtgtgttcatgcacatgcggatgtgaaatgtggtgtgtgtgtccccaaacagttcagaaaagttccccatattcttcctagaccttttacactggtgttgagggagagtgtccatcccagaagccctctgcttaataagggagagagtcagagattttggtgtccaattccattttcctgccacccctctgctcattaacccacaaaggcaagtcattgaattcagcatatttactaccactcagggttagggcagccctcttgtacttcggtggccaaatgcctgggccaagagggggacacagttttcgacggttctcagactctgcaggtgacatggtgtggggatcctgcatgatgtaaggtgatgttggtccctgatgagaggttgaggaggaggcagagctgggggagagaaagagttagggggaaggtgtaagatggctctcactcatccattggagttggccagacccagaaaagaggcccacactgagtcagaaacacacttcgagttcacaagccctgtctttcccctcccaaagaattaccttctcaagcaattccaggaagctggaattgtaggagaaatttgctagaaaggagtcctttagtttcagctgcaaagtcattcctggccctagggatccaaaaatagagcttagggcccagtaattagggccaaattccctcagagacatgggcaccccctccttccctgcttccccctcccccagttcctcttccctgacaatgcccttccagaccttagccctgtcggagtgtagccccagaccaagagctcgggaccaagagctctgaccctctcactcccctctttggccttttcctgagatgagcacccagcatcaagccctctggccctcacctgttgcctgtgaggtgcccaggaaagtcaggaagaggaagaaggacatcccggccgccattgtggccacctcgattcttgcttccctgatggacaggagagatgtccgaatctctggctggcctctccttaccaggcttgccttctacactctactaaattcttagcccaggtatttggggggaaatgggagagggaagctgggtaactggatcttccagttctcccaataaggctttgaggacccagaagagggccattcactgggctgttggggaaaatagaattcgatcccctttcctcagtcctgtgcctcatccctcccctatgcctggagatttgaaggggagggtgcccagtcctacagagagggaagttaaggaggtgtccttcctggaggcctctgggccccacccaggcctgggcctctccttgctctttagggattaattattaactgcaattaatatcatctttcatgccaccaaaggcctcaggaatgtaggcccaaagggaggggtagattataccaagtttctccccaaacccaggtatcctgctcccccaggcacagtggctttctaggtgagaaatctgcataagggggaactttcgtattttaatgttttgttttagtttttctaaaacatcccatatactcaggtggagacacaagtttcatcaaatatcattctgccccctgccttatacacagttgtcctcccaatcaacggttgtagatgcaggcattataagcacggatgtggagagtttggagcccattcgctttaccatctttcattacaaattatgaaaccagggcccagagagggcatatgactcacaaaggtcacatagtaagtcagtagcagagagattagaacccatccctcattatgccagacacagggacaagctcaacagattgacatgagtcacgtaatcccccggaacacacaaaagcacatgtcctttgtcttcctatttgcatgcttatgtattatcgccctcctccctcaaaaaccagtgggcccaagcacagagggacagaagcagtgagaccactgggcaaagtcagggaaagaagccaaaagcaaaagcaaggaaatggagggacggaaggagacattgtctacaccatacatattaagtgaggcattcaaggacacctagacttgcacaggacagcaagtagacaagagtggaaagaataaatggactgaaacacgagcagacactggaggtataagcagaggatagaaagaaggagcacagagagatgctttgggacatctgagtcgtcgtcttctacttttttttttttttaaagattttatttatttattcatgagagacacacagagagagagagagagaggcagagacacaggcagagggagaagcaggctccatgtaccggaagcccgacgtgggactcaatcccaggtctccaggatcaggccctgggctgaaggcggcactaaaccactgagccacccaggctgccccacatctgagtcttcttaagaggacagttgggggcaccgttatgattttcccagctggtgctccaactctttctatatagtcatggatggcactgctgtttgttaggaacattagaaccatgatttcctttaatgttcctttgtaatgaccctttgaagtcagtagtagatcaccccattttaaggatgaagaagcaaaaaaaaaaaaaaaaaaaaaagggatgaagaagcaaagatttaggtcacatgacttgctggaggttgcacaggttgggaggactggatttcagtgcagtggatttagagcagtctggcttcagagctaggttctgaacttctgcattacatggtttctgaacacaattccggtcttctctggtgctgctcttctccccttgcccctgctctgccaactggatcagagatggctcaggtgtttaccctgcctgaggtctcccaaaggtcagatgcaggccccaggccttgacattctctacctccatctagctctcaaattctgcttccccaagggacctgcatatcctcaaccccaatggttgtacttctaggagcaagaggactcttccctttgaggaagttctgggctggagattgacttgggcacagaagactggtcccaagtctggagagagcctgagggccaggtaggggagtcttcagcctctctcactcactctccttgttgctcagtgtttcctgggatcgggctggggtaggttaatcctccggggacagcttggtgacctcttcttggggacagagatcatgggcctgatggaggccccgatatacctggctcacttgagacttgaaatcagactcagactctttaaagagccagggagatggacctggaagggcacacaccaacagacacagtggatgctgcactcgtgctgttcctctgcgtgcaggaacaccaacctctggaaaggggtgttggcatgaagatgtgggctctggacccagggagatggtcaactcttctaaccccattatttcatttttctttttcttccaacagttcagctgctcatggggaaacacagtacctgcaggcatcttgactacctctgggagtccctcaggctcttgaatgttttgttttagttgttctaaaacatcccgtatactcaggtggagacacaagtttctttgccagtctcctaactattttgggggatatctctgctggtctccccactgtctctgccagtctctccaccatctctgggaagatctctgccagtctccccactgtgttcacaagtctccctaccatctctgttgctctccccactgtctctgccagtctccctaccgtctctagggagatcgctgacggtctctgcactatctttgtgtttctcaccaggttcttcaacttctgggcgttttctcattagtcctcagacttcagatacgaccatttctgagagcactgcggtaacagtctcggctccaccaggtgatatttctgttgctcaatccagctctgaagggctctgtggctcggggcggcggcgggggccgggggtgggggggcggtgttgtgcttggccatgtgtaagttgacagttccccagaacctcactgaagcagtgctatggccttggttgctatacaaaggccccccccttctgcattttagtttacaaattttttctcttacagttagtgtcttttgtatcctacctaagactttttttgcctacatccagatcataaaaatattctcctatgtattctctggaagctttattatttaggctctgaaatttaaacctattaaattaaattaaagcctattaaattaaattacattattaagttaaattaagcctatgatctatcttcaattaatttctgtgtatggagtgcaatagaggttggttcatctattcccttacggataattggttgccccagaaccatttatttcaaagaccctccctctctgcccgccatcgaattgtgtgagtgcctttatcaaaagtccagtgagcatgcaggtgtggatctatttccggattctattccatcctgtctgttattatgtcagtgccacagtactacatgactgcaattctgtagcaagtttcaagatctggtaggataagacttctttttgttttcttttttttttttaatttttatttatttatgatagtcacacagagagagagagagagaggcagagacacaggcagagggagaagcaggctccatgcgccgggagcccgacgtgggattcgatcccgggtctccaggatcgcgccctgggccaaaggcaggcgccaaaccgctgcgccacccagggatccctggataagacttctacttctcttttgctttaggatttcttggccattctcagtcttcattttcatagaatcagttcatcaacttgtaccaacaacttgctaggattttgactgagggggcactggacatagtttctgcttctgctcttactttgatctcttctggccttcgaggacctgtctccctcacagcagcccctggaactgctcccactgtgcctggccttccacacccagcctggctatctccagaggttctacttccataatagctggagtggccaccacgtgctctgagctcagcctccagaccagtaagtgcccttatttgcattggatcatttaccagtaaagatgttggttgggcctattctctcttattcttctgcagccagtcctggctctgggacaggaatgcagggacaggcatgagtgcttgctttcaactgtgttttgagcatgtctgaggatgtccacaattcttaaaggggttttggttttggtattccctcgagcttctggtcacaccaacagccagatatttgttacctgactacttccttaaaaagtttccaacttccttcctcatggcctgatctgtctttctggtgcaagaaacatcccctccaaggatcctgttccccctcctccctctgttgcatcttcttctctcctatgttcctatcagaggagacatggccaggctccccccaggtagctgagagcaggaaatgaggggagagcacacagggcaacaggctctggctccccttgatagctagcatcaggccagggtggtgggaagtaccagagttcagaaggagagaggcttacctggatatcctcatagcagacacattgctgattgagagagacatagacaacaaagccagaggtattggaggaaagttcaaaaagatggaaagatgtggatgtcagcaaggagtttagagaccaacagaatgcatccacagctgctggggaagaggtggctgcaacttggaaggaagcccttaaaaaaaccctccattgagattctcttttcaagattataggagagaactccacagagagttgtggtctctgagttgtatagacatcagagtcccagaggaaaagagaaggagggcaatgggaagctggggggtgaggtctcagcagccttggtcgctattcctctcttcttcaggagaagagttccatcccagactgggccatcctactgatcactctcactgtgatgacagcaatggtcagcctaccgcatggtgtcaagaaggtgagtgaagctgtggcccaaatgtgtgggtcccaaaggccagtggggctgggacctggcattccaggactttgagaagaacaagagttcaagggagaaggatgacagcttgtcacactttgggagaggtgaggggggataagggaaccttgtctgggtggctaaaacactgaccaggcagggatgaggacttggggccaccgaaagagaggctgggaagggctggaggctgccacggagacactaaattcaactctaggtagtgcagatctgtctgctctctggatcacattaacctgggtgttgaatcctagctctaccaatatagctgtgaccttgtgccatcttgcagggtgcattgcctgggaggcaggctgcccagttctgaggagtcagtctttggcctgatgccatggagcctcatcaatttcccattaattgcattaatgagcaggtgacctgttctcttctcactcattccattctgcctagggcttagggacaaatcataccaaatgacgagagaaattcagatgtctggtcctcagatctgccatgagcctcactgccctgaggcccagtagatcctgaccctctcccctctctctgcctgctgtacttcctccagaaaggcgttaggccatccaggcacccactgcatacagtgcaatagttgactacttactgattgtctactgtgtaccaagcactgtttcaggtgatagggaagcagcagtgatcagggcaaagaccttgcctacagggtgcttactttacatgacaggagacccactgcgaacaaatgaagcaagtcatagaggggtgatgacttggacacctggacctatggctttccctctccttgatcttggtagtttgtccaccactgcaactccagcctcagagactgtcatttgggactccagtgaatgaagtttgacagtcttctgaactaatgcttgctttaggcaagaaatcaagaggaaggaaagagggagactccaggagatcctagaaatgagatgcatttctataggggtagatggtggcttggaggcaaagagatggctgctgggctgatgtgggagggggaaaggagaggtaggctgaagtcagagcccctgctcaccaagcatctccaccaaagataaatctcaacctctgtgtcctgtctgcatccttggtgaagtgtgtgatgtcatatcctgggcttctttatctgtcttgttacttgtctctcactgtctccactgcttccacatcttattgtgtcatctctgaacatctagaagcatctgtctctgcagtagtgggtcacgtgagggctttcctctttgctctttcacctgatactcatggacagctccacccagggaaaaaagagtgaccatgtatgagtaaggggtgtggagagccaggctgacgtgagagaggtgggagggcaaatgtgaagctggagaagaagcaggatttggatctcctcccagaacctgagcacccagtgatcccctctgtcccactcatcaaagctcagtccctctagagccaagccatttgctttctacctcctcagagccctggaggccgcccctacccagtcccctctcccttcacggggctgggtcaagagtctgccccctctgtgtcccttttcccagatcccacccattcagcaggcacccagatgcttggctccatgacgcagcagctgcggtctcccgttatcagggcacccctgtggggtggggtggttccatttgtttaaggtttaggctgaggagccccagcccccatgacgtcaaatatggacccatataagctgaggggaccccagcccatggtcccaagcagctgtccaactccaacatggcccaggcagccctctgcatccgctccaccttcggcctccagtgctacctcctcttccttctaggttcttgggagtcaggtaagttgcctttagaggcaaatgggtcaccataatacagggagacagaagacagagagggattatttcttagaagaaatagggttgaatgaacaatcatagaaatgaacaacaggtgaatgtgtgatgggaaggggtatgggtacagggttgttgcaaaaattgcctagggtgttcattgctcaaatttgctggctaacgggcaggtagaagatgaaacccagcctgtgctctgcttctcaagacatggcctgaaagcctgcctccacccagaaaggggcttcttccagtttacataaagacactgtacaggctggcagtcctgggtagatagcagtggggacctgacattcgctgagcatctgctatgtgcaagaaactcacaggtgctcacaatacttcatctcatttgatctcctcaaatcccctgaggtgattaataatatcccacttgatagtgaggagagtgtgacctagagagataaagggacttgtccaaagtcgtgcagctagagggtagtgaacaaggagtctgacactccacactgcctgctgccctcaagaggcacagggtgcatttctttccagaagccttgctctatgctgaccttggttctactctgaagtctggcccatttaactattctgtacttcctcacacctggctaatgccaatagatgatgcttactgagcacttcctgtgtggtagtaggcattattctaggcacttcatccacattcatttatttaatccaatagcagctccataaggcatgtatggttttgtccccctacaaatagttgagaaacaacccagggctttggtgaaaaaatgtatatggaaaagtttagaggatccctgggtggctcagcagttaagcgtctacctttggcccagggcgtgatcctggagtcccgggatggagtcccacatcaggctccctgcatggagcctgcttctccctctgcctgtgtctctgcctctctatctctctttttctctcatgaataaataaataaaatctttaaaaaaagaaagaaaaatttaatgagcaaaacagagcctacaagttaaatcatcaaattagttcacttagttaagaaagagttctgtgactgaccccagggagtggagaggccaacacaggggcagcttggaggggacctggatgattcaaagaagggtcttcataaggcagacacacacaaatagattcagaaaaactaagtactggataccgttatccatggcaatgatgttgatgattgcaagccagggcccagaaagttgtgagtctggatgctccagataatatttggggcagggcaggtagaaggtgcttcttctaatagtgtttgactgagggtgatattggaggaagtttctccttccctgagctcaggtcacattggggctcagctcagataggggtgtggggaccaaacatatggtggatggtagggctgagaaatcttcaagctgcctctgctaggtcttagtggtcccttctatttgtgccctgacttgatgtccttcccctacctcaagggtctggggacagaggcaccagagccatcctcagccccccaatcttcaggcttcctgtcaggctgctatcccacctgctgctctccaacaccttcctttgtgctgctgcacaggaagaggaatctactcatgcccagagtagaagggcatgagtcatgaatcaactccatacacattcacttttttttaatatattttttaaagattttatttatttattcatagagacagagagagagaggcagagacacaagcaggcaccatacagagacctgatgtgggactcgatcccgggtctccaggatcacgccctgggctgcaggcggcactaaaccgctgcgccactggggctgccccacacattcacttttgagggagatttgctctagggcacagacaggtacagggaagacttgagatccaaattccagtccaggagattctggactctctgcatgttgcctgggtgggagggaggggagggctgagggaagggccatggcagtggacgctcagatcctgtagagaagagcaagtggatgataggtcaggagggcttgagactgggataaggctgggatggggtcaagttggagctggaatgtgggtcccactgggcacatgactatgtccagcagggagtaaggccagggtagagagaggaggggtgactgggttgcatatagaccattagcccacagttctggaccttctctcccatttatccacaggactagtcaatacccagactcagataactgaatcttagaaccccagggtctgcagtcatagaaccagaggtgcagaaactagattaaattatctctgaggggagcacaaatggggctgaggtcttggagagaatctaaaaaggttgttttcctacactaaatgttatttagtttaggacgcctgggtggctccgtggttgagcgtcggcctttagctcaggtcatgatcctggggtcccacaacaggctcttagtggggagcctacttctccctctgcctgtgtctctgcctttgtgtatgtctgtgtgtctctcatgaataaataaatgagatctttaaaaataaataaataaatgttacttggtttaatttatatgacagaaataatatatgctcactatagaaactggaaaattgaaaaaatgagaaagaaaaataaaatctctcctaataccctccagttccccactcaggcaaccatttgagtatatttctctttactctttttgctctgagttttaggtcacataatgagcttatgctctatagacatttcaagcatttatccatattattacatatgaagtaagccatttttttagggacaggacaccaagaaacattagatatcctcttttgggcaaggctgctctgatagagaccctgtatcatgagtcacctacctggatatccaccgtcttttcaaataatataatgaaacagattgaacagacctttggaattgcacatagttttgatgctgtgggatttgttttcattctctctctctctcttttttggtatatttttttattggagttcgatttaccaacatatagcataacatccagtgctcatcccgtcaagtgcccccctcagtgcccgtcccccagtcacccaatccccccgtccatctccctttctactaccccttgttcatttcccagagttaggagtctctcatgttctgtcaccctcactgttatttcccactcattttctctcctttcccctttattccctttcactattttttatattccccaaatgaatgagaccatataatgtttgtccttctccaattgacttacttcactcagcatcatacataccctccagttccatccacgtcgaagcaaatggtgggtatttctcgtttctaatagctgagtaatattccattgtatacatagaccacagcttctttatccattcatctttcgatggacactgaggctccttccacagttcattctttaatccaggctgagcatccacctccagtatcttgtgctaaagccagattttcctgtgcctatcagtgaccaaaaaaagttattttcagaccattattgtggtcagtgaaatgaatatctcatggtgaaaacttcctagggaactaaaactgctactagatagatctactggggagaagagatagtcacctcatggttgggggcggggagtattagtcactgatttgccttatggttaagctcagaaccaaggaattgtttgagttttgattccagattttataatcgatggttcaacaattgtgtgatgtaggtctggaattttaagatctagttatctgagtctagttattgactatgtggcacctggggttatatgacaaccaatatcccagaaccggtatgcttcaggacttcttttaatatctcaggggctcaatcatttcacatgacaaaaattaccctttggttttccaaactttggaggtcacagttatgtttgcttttttttttttttaacttaaatgtgcataggaaaggttgtttctgaagagttttcatcagtcttaaaatattctgtcaatcacctattcaacaaatatgtataaagtgcttcctttaggctggggacctagcaatgaataaaacaaatataaatccctgccattgtaggaagtattcattatgtactagagaatgatgagtgtcacactgataaaacacagcaaggagaagtggcccaggaatgtgggctgccttttggaagaggtggtcaaggcaggcctcatatgggcatatggtcaggagagatagcaggggctgcagaagatcacgggatcaggctccccttaccaggagaaaagggcaaagtatgagactgtttcaaagactacaatttggattcaagaaacactttaaagaatcgtctatgctcaagctgatgtagtcgacatcattgtcatttacagttaaggacgtggagttcatgaatatttaagtgacctaagcaaggatgcaaatctggtgagggacaaagcctaaactctaatcctgtcctctgattctttaagaccagtggaatttgccactgtgctgctactgctcatttattcactctatggatatttattcatcccttatcacatttaaaagcatctgggatggggatgcatgggtggctcagtcagttaaacaaccaactcttgatttcagctcagtgcatgatcagagagagggtcatgagactgagccctgtgtgtgctgagtgtagagcttcatgctgactgtggagcctgcttcagattctctctctccctctctcctcacccaactctctctaacataaataaataaaaaataaaagcatctgaggtttagtgagaagactgacttttccaactatttaatctctttgaacttcctttccttatctataaaactataaggtcatatacttgtccttataggtttgtggtgaagattaaataaacaaatatagaaacagcattctttaggggttccacagatgccagtgttcttcctttcccaacagttgggctgacctatagtttgtataatatagtcttaaccagtctgggcctggggacccaggactttggctcaacttcttacttgggggatgtccttggggagattactcaacctctctgaatcttgtatacttatctataaaaagggaagaatagtgaatagttctcaacttcaaagggctgttttcagaagcaaatgagttaatacatgtcctcattcatatgacctgcctgtctcacagtaagtatgcaagagaggttggccatggctatagctatggagttgtgtgcaaggcaccattcttccagtgtaaaacttgaaactcaattttcttggctgtaaaatagggagactgatagcttcaaaggcaccttttgggaggttgtgagatcagtcactctagaagaaaatccagaaatgtctatgaggcaaatcagaatcagaatgtctatgaggcaaccacctgagatcttggcccagagaatgtggccaatgaacagcagctataactgggattgttgctgagggaatcaaagaatagaactaacacagtagagtaagagcctgataattcagtcctcctttatctccctaacattgaatcccttcagagacttgggcttctgtagtaccctcaccctcttcttttccctcctatatttctttcaaggggttccccagcctcctactctctttggcagcagggaggtgggtggatcatggttttctgtgattgggaatgggtccaggttctggtttccaccttgagctaacagagactggaaatctcagttatgtaacaacagtctctcactctttggcgatctcctggctaggtatcagagacatctcctctgtccccattggttgtttttccacataattaaggcccatatctgttcactgatagaagtgttttctctcacaccctgtccttaaatatagtcagtcccttccagaattcagctgcctcattcactcctctcaagacccccaagcagatatctttttctcttaggagggtgatctttattccagatggcattaggtgtgtgaagggctggggggaaccatagggattgagtcatctcatttacttctctgcattcagaccaaactttaacaccaaaatgaaaatttcccatctccctcctatacccaccctccatctcacttcttatctttctctcattcaccatctgtatctacttattaatacccatgggaagctctgccagaaatcttactcagtctctcacagttacatttgggatggagctggaatgttaaggaaagatggaaattctgatatttgctctttcctctcagctctgtaatgtaaagggaactccattccataagtatataaattctaaaggagcatttgtggagcaaaatgacagttaatacctgatctcaaaatcttatgatttgataggcagggcaggaggtagaggttgataggcacacaaataactgtaatgtgaagttgaaagtagcaggaaagggtattaacaaagaattttttgagcactcagatgaagctagatcatatgtgcttggagggatctggaaagatgccagaaaaccagaaaggtctgaaattgagaactgaagagtagaggtggcatttttgctgaaggcaccacctgaacaaaggtccagagactagaggagacagtggggattatatatcatagtattatgaggatactggctgggagatatacctaaggtaataaagggatccttagagatagaggtgggcagagaagcaagaaagaacataatggaagtttcttatttgcttttcttgcttcacaggtgctaccgcatttcgagaacttcagaaaactggtgtttccccagcatctgatcatttgttacctcctacttcaggccttgtttatagtacactctctgattatactgctcttcatttaggccacaaccctctagacctcactaaatctacagaaatccataagcgaaaaagtcattgcaatactacacaccatatcaagccaacttacaaaccgatagataaccctcaaaattctacaagtgattatgaagtttctccttcttctgaaaaaaaacccagcaatcaaggaaaaaacccaaatatccagaatagacgccctattgatcctaatgactctactaacacacataaaggactgtctggtgcaaaatattcaaccctagcacccaagagaaaaccattttgcaataagcccaatgtaagcaaaataggtacaggaaacatacataaaactgcaacatcgtttggaaacaccatcactactttagacagtaaaagcactacttcacacaagaccataattcctgtccacacctcagtcaatacagagatcaacaaaatacctacatcttcctcaggcaaaagcacagcagtcacaaagtctacaagaatcccagaaaggtcagaaggagctgaagatggtaaaatagttgctagttccggaactacggttgcctcaggcaagactgtgaggaagactacagaacacataaacaggatcacatcacccattgaaaagattacacaaatactaacaacacttacagaacacaaacaaaggactgcgtcagctcatataaataccacaagatcactagaaagcccactgggacatgggaaagaggccccattggctaataagacaaccccaagaatccaagcagagtctacaaaacatggagaagagactaaatcagccaatgggaagaccacaacaacccaagaaaagtacaagaaacatggacagaacaccactccagccagcagtaagacaatgaaagccccagaagatcccaaataccatggaaagaagaccacaagagccctagaagggcccaaggatgatggaaagaagaccactccagccaacactacgagagcccttggaggactaaagaatcctagggagaagaccaccaccgtcagcgggaagaccaccagtaccgcagaaggggccccagaccatggaaggaagaccgctgcagcgagtgggaagaccacgagagccctgggaggactcaagaatcctggggagaagaccaccacagtcattgggaagaccaccagtaccgcagaagggcccccagaccatggaaggaagaccgctgcagcgagcgggaagaccacgagagcccttggaggactaaagaatcctagggagaagaccaccaccgtcagcgggaagaccaccagtaccgcagaaggggccccagaccatggaaggaagaccgctgcagcgagtgggaagaccacgagagccctgggaggactcaagaatcctggggagaagaccaccacagtcattgggaagaccaccagtaccgcagaagggcccccagaccatggaaggaagaccgctgcagcgagcgggaagaccacgagagccctgggaggactcaagaatcctggggagaagaccaccacagtcattgggaagaccaccagtaccgcagaagggcccccagaccatggaaggaagaccgctgcagcgagcgggaagaccacgagagccctgggaggactcaagaatcctggggagaagaccaccaccgtcagcgggaagaccaccagtaccgcagaagggcccccagaccatggaaggaagaccgctgcagcgagtgggaagaccacgagagcccttggaggactaaagaatcctagggagaagaccaccaccgtcagcgggaagaccaccagtaccgcagaaggggccccagaccatggaaggaagaccgctgcagcgagtgggaagaccacgagagccctgggaggactcaagaatcctggggagaannnnnnnnnnnnnnnnnnnnnnnnnnnnnnnnnnnnnnnnnnnnnnnnnnnnnnnnnnnnnnnnnnnnnnnnnnnnnnnnnnnnnnnnnnnnnnnnnnnnnnnnnnnnnnnnnnnnnnnnnnnnnnnnnnnnnnnnnnnnnnnnnnnnnnnnnnnnnnnnnnnnnnnnnnnnnnnnnnnnnnnnnnnnnnnnnnnnnnnnnnnnnnnnnnnnnnnnnnnnnnnnnnnnnnnnnnnnnnnnnnnnnnnnnnnnnnnnnnnnnnnnnnnnnnnnnnnnnnnnnnnnnnnnnnnnnnnnnnnnnnnnnnnnnnnnnnnnnnnnnnnnnnnnnnnnnnnnnnnnnnnnnnnnnnnnnnnnnnnnnnnnnnnnnnnnnnnnnnnnnnnnnnnnnnnnnnnnnnnnnnnnnnnnnnnnnnnnnnnnnnnnnnnnnnnnnnnnnnnnnnnnnnnnnnnnnnnnnnnnnnnnnnnnnnnnnnnnnnnnnnnnnnnnnnnnnnnnnnnnnnnnnnnnnnnnnnnnnnnnnnnnnnnnnnnnnnnnnnnnnnnnnnnnnnnnnnnnnnnnnnnnnnnnnnnnnnnnnnnnnnnnnnnnnnnnnnnnnnnnnnnnnnnnnnnnnnnnnnnnnnnnnnnnnnnnnnnnnnnnnnnnnnnnngaagttgatgagagatatggatctgaccagtcaggtgtataagctcagaaaaagagacatgtggtgtgaggggggatggtaatataggggtagtgtggcgaaaaacgatggggaaagacagtgatgcatggggcatgaatagtggcatgagaataaaggatgtagaatagggattaactgtgtattggcgatagaatctgggatgtgagaataggggatataaaggtaaggaaaattggacagaagagggaattggagatgaaatctggagcttagcccatgggatctggggctggaataaggatcaaggtttggatggaatcttgggaaaggaggaagctaaaggtcgaggatcaggaataatagaatcaaagggttgtgggtgtggaggaagcaagtgacatagcagatggagcccatttctcctttctcctaatcacaggtctcctatatgacaaaaacacgccaggcactgatccagaacaaggaggacaatgacccagaagatgatggaggccctaactcctacccagtccacctgatggagcagcagactcttggcatgggccagatcacttccccacggtgatctctcagaaagtgcccagctcttccatgctcttccatgaggagttagactcaccgtttgtaattcctagactccgggaagggcaaagtatggaaagttaacggcattcacccttcatctgctgtgttcttattgaaactggtctagggatgagatgataagcaagaagatgtgagtctgggagatataaaagaaggaatgaataatatgagcatgtgtagaagatgatggtttcagaatgaaaagctgtttgatggacatatgggatgggcaccaaaataggacaccaagtcttgggaagagcagcatagctaaaggaagtttgggggcaatgccccagatctgactggaagttgggtttcaggaccaatctatatttccatctactattactcagactgtgtgtgtagtaagcaggcttgtctttcagttcccaggacacttaatcccctcctttttaaaatgaataagtaaaaaaaaaaagtaaaaaaaaaaaataaaatgaataagtaagatctgagaaaaaaagaggacttatttctttttatcttttttttttttaatttaaattcaatttgccaacctataacacccagtgctcatcccatcaagtgcctaagtggacttatttccttcaccatcttccatacctgggagaaaggaaaaatccagaaaatatcataaatatctctcatctagataattcttccctcatccccctgaatccttttgcttttctaaatgtctacagtaggcatcttgcctgtttggcttgatgggttgtagtggcatgcagggagggatttttgtttggcctacagtcttacccatttatccccatcaggacttccatgatggtgttccccactcatcatttattttcctatttgttttaccaaaagccagtccaggcttttccctttcccttttcaccttctccattgcccccattctctctcttcctcacacagtcaccccagattctgattttcctctttgtaggtatctcatctggattttctctcctactcattaaagcccttttacctattagtgtttggcagagggggaaagaatagacagataatagagagcttcctatttattggtctttttataataaggtataaaatatttgtaaagtaaggacatcataatttctggactatcagttgggagaagtcctgactggtgttcctgactctggctgtgaccttacagatgatcttaagcaggaggggctagagaacaggaattctttagagggtcatggaagaggaggctgaatttctattgcttctaagacgagtcactcctgagttcctgctgggcttaattgcatggtgacaaaacagggagaaaatgtgttaattaattagcaagtatttctaagcacctattataaattctgttgaggattgtaaagaagtataagacaaggttgccaatcaggatactaatataggaaaattaaaattaaatacataataagagacatcacaaggcaatactacacagaataaaacagcactctaatgaattaaacccgatatttatgggcaactactatatcccaagtttatgttaggacactagccctgctctaaaaccattccatgcccaaatgtcagtcccagcagaaccatcgctcatcatccacgtagccttggctctcacttataccaaaggaggatcagcaacctccctgaccagaaagacatttcagtttgccacaggccttccagtttgaacttcatttggaatcaaaacatagtggttgggatgcctgggtagctcagtggttgagcatctgccttgggctcagggcatgatcccgggaaggggatcgaatcccacattgggctccctgcatggagcctgcttctccctctgcctctgtctctacctctctttgtgtgtctctcataaatacaataaaaacttttttaaaatgcagtgctttttgctacttttggcattctcatttgcaggaagctagaagtctaccatgaacagtggtcctaacatggacactccttgtcactgagttatttaccagggtccactccaggttgggtggatacctatgaatctcccaccagagttctgctctgctaaaggcagaattatatcttgaatcagaatggtggcattccagatgtcagaggggccccagacttaggtccctggaaggagccttgaggcagagggggacacctggttctggaagagggctggggtgcctgagaaaaaaaggacaaggatgccaggtttttagtcatctgggcaaatggtgactgagcatgtgtcagctgccaggacaggagtgtcactggttctcagaagaaagcagataccgcctatccctagcttctaatcattgaatttctgcagcctggacctaatttaaaaaacaaaaccaaactaagcaagaacatctctgagcgccccccaccagagtgtcaaacatccaacctaatgcctttccaccaaggcacccaactggagcattgggggtcaaggggtatatgttctgggagtgtggaagtttctccaaatgtaacaggaactatgagcccgaacacagtggctaacagtctcccttctcccttctttctccctgatgctcacttggaaatctagggagaaaccctctgacaagctccagggatgggctctcattagagaaaagtgaatgatgaggggtaaggagggaatggctccttccttacaagctaaacaccacaccccacccagaccccctcaggagagatcaatgcccaagacccctggagctgaggtgggcgcccagcgtgagggcagagaggtgaggaggtgagctccggggcctcgaagcctcggccctcccttccctctaggctccacttggcctaggggagcccccagcactgccccgggtgccccccgctgctccagcaccggaaggagcctgggcgcacctgcccaagctggcacagcctcagactctggcggtgcgctccccccacccgcaaacctccggactaaagggaagttttcaccgcagcatgggtttcaatcctccaagaaccctcctttagtacacttgtgtacaggtggcaaaaccaagactcagggaagtaccttgttcaaacccatacggctctgggatcagagttcttctcccaactcaatttcacttcactttcaattacactttgttccttagtgtaacgtggcagcgggacctggatgggtgggatgttatagggaccatctaaggaacaaagtgtattgaggtttgtgcaagacagcatccagctccttcttccagaggccaggtctcccctttcagccccttggacttcccagagttccgttcttctgaccccactgggccagggtctgtcctgacagcctctgttaccttctgagactcattcactggactcagtcacagtgctctgccctctgtgccagcaccagtgccccttgcagctgactgtgccagcacacctgtttctggacagtgactgctggtgtggtaagaagatccaatgacctggggcccagtcatcctcatttttctcacttctgcctcctacaaaggcctctgttccagaaataagacatccccagagaaaacaggtttttgctgacttctggtcccagtgatgggtctcctttcctctgacatgttgagtctcttgctctctctccttccctgttcctacctgtctaaattgtcagagatgcctctccctggagagaaggggcccaaaagttatgtacctcccctgcccccagccgcccccagcagcaactataaagcccacagcaatggccaagtgagacagcaaagtgagccgggcatattgtacagaaagtgttggaacccaagagttcagctgttccagtccttggcttccttctaccatgtaacttatcccaactgatcttactgatcccacaaccctggccctagtaagcttttaattcttcttgaaacttcatgtcctaatgagagtccagacatcaacttgccctctgcagcccactcctgctgtagaacccaggcattctgattttatttaagattttatttttaagattttaagattttattttttaattcatgagaggcacacagagaggcagagacataggcagagggagaagcaggcttcctgcgaagagcccaatgcgggactcaatcccaggacccaggaccccgggatcacgccctgagccgaaggcagacactcaaccactgagccgcccaggtgcctaatcatttaattttaatgattaaaaccaatgccagaggcacctgggcggctcagtggttgagtgtctgcctttggctcagggcgtgatcctggggtgctgggatcgagtcccatatcgggctccctgcagggagcctgattctccatctgattgtgtctctgcctcatctctgtgtgtcttcatgaataaatgaataaaatcttaaaaaaataaaataagaaataaaaccaatgccaaataacttataaaggctcttcatttccactgtaggatggaatgcctgaaaagggagtaggccaggtaggtgtggatttgataggaacaggcctgggttaaatgaacaaaaggacttttggatggtgtttttttctttttcctttgatatttgtttcttttttaaaatttaaattcgattagccaacataaagtacatacttagtttcatatgtagtgtgcaatcattgatattttatttttcttgtgccctctctctggtgtctcccagtgactctgccctggagactgttgtcttgcacattctcttctcttcctcctcccggtctctctgcgaactccttcagcttgaaccattattactgcagatagcttccagactcatctctagcctgtatttgctctgaaatccagtcctgtatttccaggcttatttttcccataacaacttcacttagatgtcatgtcatattgaacatgtttgtccagcaaacatttttggagcatttcttccatgctagatctgaagatacatcagtgaacaaagcaacaacaggccctgccttagggatctcacagtccactgggaaaggcagatatcacacaaggaatgacacataaatacagaagagttacaagtgtgcaaaaaatgctaacaggcaccgcctcatcttcccaccatcaggtctctacaatttccctcatctgcatccattctctccctccctgatccctcttaacattggaggagtccttctaacctgtcttgcctttccgtaggtttcttttttttttatttatttatgataggcacgcagtgagagagagagagaggcagagacacaggcagagggagaagcaggctccatgcactgggagcctgacgtgggatttgatcccgggtctccaggatcgcgccctgggccaaaggcaagcgccaaaccgctgcgccacccaaggatcccctttccgtaggtttctaaccccctccccaacactctgtctacttccccttcttctccaggtccttctcattggcatccacgctctagaacagtgtgcacaagaatcagcagtaagagattctatttgtctacttatttatttattaaaaaatcttttttattgaggtacaattgatatacaacattatattagtttcaagtgtataacaaaatgattagatatttgtatatattgagacatgatcaccacaataagcctagttaacatccatcaccacatataattgcaatttttgcatgtgtgtgttgaaaacttaagatctacactctgtgtaactttgaaatatacaacacggtattattaactatagtcaccatgcggtacattacatccccaagacttacttatcttataactggaagttgtaccttctgatcctttttactcattttgcccactcccaccccctgcctctggtaaccaccaatctgttctctgtatctatgagctgttttgttatagcatccacatataagtgagatcattcagtatttgtctttctctttgacttacttcccttagcataatgccttcaaggtccatccatgttgtcacaaatggcaggatttccttttttatggctaaataatatttcattgcatatatgcgatattatttctaaaatgtaggttttggcccctgtcccttggggttcctgagtcagtaagtttggggttggggctgggatctgcattttaacaagctcccaaccaatcttgaagcctctgggccaggggccacactttgaaaagttctgttcttccagcatccatcttaacaagcccatatttttcccagctctgccctctgtcattgccaagtttcttgaaatcattcctaaaaacacaatctctattttctcatcttctattcactgtatatatatttcctttgcaaattttatcagagtaattcatgtgaatagttttaaagtccagttgtcctatagattcattacaaaaaatagctatctctgttgcacctgcccccttcacatctgatgtttgctatccagaggtggcaactcttaactttaagtttttctcctgttatttacacctacagacttaaacatcacacattcatattatattgttatttatagatttttttttatatttatagatttttaacaaagaccttaaatgcatcttttattgggctaagtaatattacaagactcaaaatagtttcctgtcccaattttgcctctgaaaagacttaataatgtatatgtatccaatatcatgtggaattaatatccttttcaaaacaaaacacaattttaaatttctaattttcttatcagttaacctcattttcagcagcaattactaaataaaacgaaaaataaattctctgatagcaaattacacaagcccaagagagaataatccaagcatattaccttagtttctcagaacataatttatctagcatttggctcacaaatttaaaaatcagctgtgttaaaacatgacagcacatttgctgttaactcctgcttgtgtcttaagaaagctcttacggaaagaattttaaaaatgtttcacaggtagcaggtgcagaccagcgatttgggaaatgggcaactaaaaattgcagtccttgttagcattgccaggcacagccacagggaagtatggaatgctcttcagtaggttcccagtccaggagatggcattccagaattcttccttttctttttgcaaagcagaatgctagcagagttttctgaatatgcaccttcctcttcatcagctctgtggtggggacaccgtcaggctgggcctgtggtgatgtggctgatttcctcttcctcctcctcctttctctttctcaaaacttgtattgtagtaaaatatacataacataaatctaccattttaaccatttttaaagtgtacagttcagtggcattaagtacatgcacatggttgtgcaaccattgctggtgacttcttcctgattccgcctcctggaatcaccacgctcaggtccggtttcaccttgttgctgtccaggtacttgaaacatgggtagggacctccgatggtgcagcttggcctttctggtcatatccttccagaagctgtgctagggcaacacagctgtgacctccatgggcacctggtgtgctagacctctccctgaagcccctttctgtggccatttctgaatatgtgaactaagacttgagcaaccgttttcttataaccaggcgaatagttcttaatgtccttataaatgtttttcttttctgaatacactgctccctggtcaattcttgtgccagcagtctagagccctgccctaagccttcaactgcctgtggaactggtcctcattttcaaatatgttggctgctgatggaattgtgcagacttttccggatctacattttctatgagctttccagctagttctagtgcctacagttccaatgcctacagggatgctgtgtagagtgcttttctcgtgagtggggggaggggcagagggtgagaatctttaagcagactccttactaagcaaggagcccgacatggggcttgatctcacgacccatgagatcatgacccgagctgaaaccaaaagtcagacacttaaccaacggagccacccaagcacctgcattagttcgtagtttctgcatctccttcaacattatgcctgttgctcagaagattttcttttccatattcagaagtggcactgtcataatctggcttgcatttttttttaaaagcagttttcaggtatttctctcctttggtaagatgttctagctcttcatttctcttttgacccaccattccacagtctctccctcacgttaagatcaagagggcctcttccttttgggccctgaaagagccctagttagagttttacagatttttgtttctttgtttctgatgttacctatttacttattcattgcctttctcccttacttgggagagcttcctacctaattttttaccactatgtcccatgcctgaaataccacatgccttatggaagcttcttaaggaatattttcgaatgaatgaatgagaagttctagacacagagaatgcctatcagagaggaacttagagcaatcaagaatctcctagattcttctctaatccattcccactgctactacttgttctagcactttatactttttaaaaagtaaataaaggaaagaaagaaatcatcccaagtatctccccctaccattttctcgtgtctctttactgagagaactttttactactgcctaacacatcagttctgaccttgactgcctcaagagacccagcaacatctggccttatccaatttacagcctgactgccttcctttcatgcataacaacccataagctctcctcaggcagggacagtatgagagtcccagagagtgaagggggtctctgctcaagtgccctccctttttggtgtgacgtctccttacttccacctagcttagggagtgcttctgagatctgtccacatgacctctatgtttttgaacaacacattttctcctttatctgagctccaacaatccttagtgttagagagatgatatgcagtttctgtttgtgttgcctccttagcatgtgttaaatgagatgattcacctaggcacatagagtgagaaaaaaacccacaaaaaccaaaacctgaggattctgattagtaaaattcttgaggaaagaggaaagcacagagatcaaatgattcattcattcaacagcatagttgagtcagtagtcatgcccatgacatctgcataaaaataaaattaaaaaaaaggaagaggaaagaactatcatagcttcaccctataaggtgcatgcttccacatgcatgggtaacatagttctgctgactcaacagacacaggaatgacaaagatgggcaatgctcccaattaaatttaaaaaatgcacaaattggggtgcctgggtggcttggtcggtccagcagtcagtggagagtgcaactttttttttttttttaagattttatttatttatatgagagacacagagagaaggcacaagcaagaggaggggcagagggagagggagaagcagactccctgttgagcacagagcccacacggggctccatcccaggactctgaggtcatgacctgagctgaagtcagatgcttaacccactgagccacccaggtgccccaagcatatgactcttgatctcggtgttgtgagttcaagccctacatcaggcatagatattacttttttaaaaaaatctttaaaataaatgcaaaagtgagaatgattcctgaataaaaattaatatactttaaggaggactatagctcctgggcccagcacagcctctgagccctccatgtcccttatcacagcttctaggcacacaaccaagaccactgcagccccaggggccaccacacagtgggtctccatgacggactcctccgtaggcctcagagcaactcagcctgtcaggccatcgctgtctccaccacagcctctgtacccactatgacctctaacgcagcccccgataccactaccgtttccattaaaacccttgtgacaaacactaagtccgtgccctccttagtcaccccaataactgccaagcccatcacaggctctgagagcacctcttcctccatgatgacatatgtgcccaccacagtcttcactatgacctcggaaatcaccacaagccctagggccaccatagattccactgcagcttcaaatgccactgcagagtctctccagcataggctctgagatcaccatgccctccacatcaatatgtgtgcccacaatggcatcctccttcacctctgaaatctccataaacttggatgccaccatagcttctactacagcccctgagatcatcccaccttccactaccatgtctgtgtcaaccactttctccaacactgcctttgagatcacctcagcctctgaatgcactgtgctcttcatcatggtctctgagactaccataccatgtcttccataataatgcctgggcccatggatacccttaaaataagctctaagaccacaacagcctctaataccaccatggcctccactaccaatgctgagaacacgttggtttccatggaagcttctgagagcactctggcctctaccacagcctcagagatgactagggtcttcactaaagcctctgtcacagcttcagagtctgtgcctcccacaagtgtggcaagacctgctgaaaccactacagcatccatgcccaccacattctctgccatagcctctgaaactaccacagcctctgagaccaccaaagattctgacttcaccatggtccctcccaccacctttaataccaccagatcctccaccatagcatctccagccatgatagtctctactacatgctagtagccctactagcttttgagtccactgtggccttcagcatagtctctgagaccaccacatcttccacaataatatctctgctccccatagcttctactacaggtgctaagaacacaacagtctctgagaccaccatggtctccatcattacttctgagaccactctgggttcttccataacatctatgcccatcatacttatcaccacagactctgagaccaccagtgctcccagcacagctttcaagataattactcctccaccacaaggtccattctaaccacagccttcagcatagcctctgaaatcaacataagttcttcaactatcctagtctctcaaacaacttcagaggccctcaggtgcagcattacagcatccatgccaatgacagcctctatcccagactttgaggcctctggggcctctaccaaggtctctgagaccaccatggcctccacaattatatgtgggcccattacaggctctaagaacacagtttttgagattaccatggcctccaccaccaccactgagaccactaaagcatcaactgatctctctgacaacaccgtggcctctaccatagcctctgaggccctgacagtatccactaaaatttttgtgatgcttggagagtttgtgctctccacaacaattccgtctgcagagaccctgactgtctcaaccacagagcaccacactttctgtctcagcatctgggcccatcatattttcttccacagattctggggaccaaaacttccatatcaccttctggacccaccacaacatctttcgctttggcctcatcacccaccctagtctctacttctgcctctggggtccccacagtctccacagtccccaccagtgtctctgaacctttcacagactcttccatcacctcagtgctcaccaaagccattgacttttctattcagtccatcaccaacacagctatatcaggtactgaccaccatctcttctctaagcacacacatttacctccagtgttaaccatcatctttttgcccgtttctgtcatttctgctctagactctagtcaagctaccactcctatacttctgctccctcttcttgaatcctattcatttctactctgtctcaccttcttttgttcatcgtccatttctaacccaaccagaaacacttctttgcaagtatcccccctacactcacacacacacacacacacacacacacacacacacacacagacaagctcattatattccatcacagaagtgatgaatgcctaggttctaggcagaacctagagggaactcacctcaactctgtgacaaacatcccaatttgtcagatgctgtcacttctgtgccaagcacaatcagctctgttccatccaccacctgtgacactgccatctcatcttcaatatattgagccctgatccagggactgcaaactacacttcatgggccaaatctggctgttatctgttttcccaaatgagatgttattggaacacagccacttgtactcctttacgtctatagctgctttccagctactttgcatacttgtgacagagactttgtgacccaaacaacttaaaaatttgccatatgatgaccctttacagaaggtgtttgccaacctttgctccaaggttgattaagaccaaaattattttttcatactctggcacttgctctgaataaaagcacctctgtgcttgccatccgtactcatgttggatgtgactctaccactttgttctgagatacccactgctgttccggtgactgacatgttcttgcatcaacacaaccacttccagtctaagcacagcccttgctgctgatgccacctgctgtatgtattaggtcctcctgtatttttttttattgaggtttgatttgccaacatatagtataacccccagtgctcatcccgtccagtgcccccctcagtgcccatcacccagtcaccccaacccccacccacctccccttccaccaccccttgttcatttcccagagttaggagtctttcatcaccctcactgatattttccactcattttccctcctttctcctttattcaatttcactattttttatattccccaaatgaatgagaccatataaagtttgtccttttctgattgacttacttcactcagcatcataccctccagttccatccacgttgaagcaatggtgggtatttgttgtttctaatggctgagtaatattccattgtatacatagaccacagcttctttatccattcatctttcgatggacaccgaggctccttccacagtttggctattgtggacatcgctgctataaacatcggggtgcaggtgtcccggcgtttcactgcatctgtatctttggggtaaatccccagcagtgcaattgctgggtctagggcagatctattttgaaccctttgaggaacctccacacagttttccagagtggctgcaccagttcacattcccaaccaacagtgtaagagggttcccctttctccacatcctccccaacatttgttgtttcatgtctagttaattttcacctttctcactggtgtgaggtggtatctcattgtggttttgatttgtatttccctgatggcaagtgatgcggaacattttctcatgtgcttgtaggccatgtgtatgtcttctttggtgaaattgctgttcatgtcttttgcccatttcatgattggattgtttatttctttgctattgagtttaataagttctttatagatcttggatactagccctttatctgataggtcatttgcaaatatcttctcccattctgtaggttgtctttgagttttgttgactgtttctttggctgtgcagaagcttcttatcttgatgaagtctcaatatttcatttttgcttttgtttctcttgccttcatggatgtatcttgcaagaagttgctgtggccaagttcaaaaagggtgttgcctgtgttctcctctaggattttgatggattcttgtctcacatttagatctttcatccattttgagtttatctttgtgtatggtgaaagagagtggtctagtttcattcttctgcacgtggctgtccaattttcccagcaccatttatttatttatcctttttccagtggatagtttttcctgctttgtcgaatagtagtcgaccatagagttgagggtctatttctgggttctctattctggtccattgacctatatatctgtttttgtgccagtaccacagcgtcttgatgatcacagatttgtagtacaacctgaaatccggcattgtgatgccccccggctctgttttttttttttttttttttcaatattcccctggctgtttggggtcttttctgattccacacaaatcttaagatgatttgttccaactctgaagaaagtccatggtattttttttaagattttatttatttttcatgagagacacacagagagagagagaggcagagacacaggcagagggagaagcaggctccatgcagggagcccgatgtgggactcgatccagggactccaggatcaggccctgggccgaaggcaggcactaaaccgctgagccacccgggctgcccaagtccatggtattttgatagggattgcattgaatgtgtacattgccctggggagcattgacattttcataatattaattcttccaatgcatgagtatggaatatttttccatctctttgtgttttcctcaatttttttcagaagtgttctgtagtttttagggtatagatcctttccctctttggttaggtttattcctaggtatcttatgcttttgggtgcaattgtaaatgggattgactcttaatttctctttcttcagtctcattgttagtgtatagaaatgccactgtatgttctgagcacactcacctcacctttgttgacaaccacgattgtggtgtcagctgtgctcccagtgatggcccctgtctcatcctgagtaaatctgagtccatcattccttcctctagcaacatccttatgcccagagagtacatcacaagaatatcagaccctctcccttttatcccagcccacactctctatttggatgattgctgcatcaatcccagtcacatttcctcagttttagcctccaccatcaccagcaccattaccatcaccagcaccaccagtggacatagtatacctcctcttctgtaagacactcacctctactctggggacctcatggcttcaggtgaaccactttctaccatctcttctcccaccatgcagctcttctcaaacaaccaacatgattagtgtgttagatcaacccttctgctctcagtacacctgcctccttttaattattgtcagtataaatgcatcatatcatgtgacttgcttcctaggcaccaggaccactggaacgagaccaactgccccatctctgtcaccatggcccctgcaatggactccatgtcccctgctaccaggaatattgtacttgaggaagcccagatacctctgactgggtacatccactgttgagcaccatctatcagctctgttccaggtaccaggaacaccaggatgagatctacccaggagccaaccaccactcctggaagcaacaccacttcgcataaaataggcccactcaccacgggcacggacccagttactatgagccaaatgccaacacatgggactaagccaaacggatatttgcagccctgggacagcgtcctcatctctctatttgatgttgtggtaggtgttggaccattatcaggactgagcttttggctggtgagttaccatgggtggggatggaggaactacctacatgatggatcatgggtgggaagagaataatgagaataggaccactaggatgttcaggacaatagagctgtgtgtggagagtcacatacatcctagcgcagtcaacataagagcatcagaagcatacctattggtctcacaaatcagctttatcagctcactgcaacaagagagacggcacactggagggactaaggagctttatactaaaccaagggaaagagtcattatagtgttgagggagtgcagagttttggtgaaagttaaatgcagcaaagtgttagtaagctcacaacaaagtagaatgaatactagggtcaacagtagctccagaatgtgaagcggactcagtttccttggagacaacaaagttacaacaaatggggaatgctgtgtagttgacccttgaacaacatgggggttaggggcactgacatcctttatagtcaaaaatctgtgtaacttttgtgtcccccagaacttaactactaatagcctactgttgactggaagtcttttaaaaaaaaaattttatttatttattcatgagagacagagagagagagagagagagaggcagagacacaggcagagggagaagcaggatccctacagggagctggatgtgggactcaaccctgggtctccaggatcaggccctgggctgaaagcagcgctaaactgctgagccacccgggctgccctgaaagtctcaccaacaacataaacagttggttaacatatattttgaatgttatacatatcatactgaactcttacggtaatataagctagagaaaagaaaatgtcattaagaaagttctagggagggacacctgggtggctcagctgctgagtgtctgcctttgcctccagagttctgggatgggtcccgcattgggctcctgcatggaagcctacttctcctccctctgcctgtgtctctgcctctctctgtgtctctcatgaataaataaaaaaataattttttaaaagaaagttctagggaaaaactgggtggctcagttggttaagagtctgccttctgctcaaatcatgatcccatggtcttgggatggagccccgcatcgggatccctgctcagaagccagctgcttctccttctccctgtctatacctcttgcttgtgctcttttgcttgttgtatttctctctcaaataaataaaaaattttttaaaactctttaaaaggggcacctggtggctcagtgattgagcatctgccttttgctcaggtcatggtcccagggtcctgcgatcgagtcctacattgggctccccacagggagcctgcttctccttctgcctgtctctgcctgtctctgcctctctcatgaataaataaataaaatctttaaaaaatcaaaaataaaaagtcttaaaaaaagaaaattctaaggaagagaaaatacatctacagtattatattgtatttctcaaaaaattcagtgtaaaagtgaaccagtggagtttgaagccatattgttcaagggtcaactgtattcagaaactcttctctgcctctgggatggagattgaagctggtattctttgttaaagtaacttagattctccagacaagggtaggatgtttgcttcttacaaatataatttcaaacaggaaacttgtgatagtctatgcatttagagaaccacatttttcattgacaaaatcactgaaagtgactaagtcactgttatgaaggtttacaactgcagtgtgtccttggggaaaacattttcctgtgaaccttgcagctggccttacccatattgtcatcccaccctgaggaatggaagtatggactgttactttctcagtctggtttttactttctcagagagtatgatataaagaccatgagagagagaaagacagaaaaggtaaataacagatgtaatgagaggtaggaaaaaggagaagaaaggtgaaatgggattcacctataagtataggagtcaatgtgatgtgaattgaagactgttgagaaaatagggacaagcttattttttataaagtagctgaaaataagcactagaaaaaggatctctaaaaagtcctagaaagatgaacatttgaactcccaacaggtttttcaccttcattatagacattgcttccaagggcaaaagagtgaaggtgggaaaacctccttctataattttacccaagtgaaaagaaattcacttttctaggtacctcttagcacagtttaaacaggttggaagtttcagaatacttcactaaatactaaaaaggcagataacaaggaaatgatcttcacaaggacagaagccacagaaacactcaccctcctataggggaagcttctgacgctctgagaactgacatgtgtagaggcccagaagcccctgaagctctctgtggtggatgatagccatgtgccaggcagcaaaatgcatctctgctttccattctttatcctggtcttcatcttctattctaatgcatttttcttgttctatcttttaaaaatatatttattatttcctgtttgggctgtatgtgttcctgtaagtggtcttcaacatttatagggtgacccacaaaaaatacatgagaaatttacacactagccacaaatagttggcataatttccaatcaacttactttagttttttacttcagaatcttgaacctttcccatggcagaaacaaaatgcaactttctggccatgagaaattctctaaatgtttaagataaagatgtaataataaaaactagctctttattcattgtttactaggtgtgaggtccagagccaagagtgtaagagaaccttgtcttttttttactctggataaccacgttgggggtacatactcttatgatcccatttcacaaactacggcatgagagtcagagactaaagtaacttcctgaagatcacagggcagggcgctaatccaagttggcttgattgaagagccatgttcttagctgcagtttaaagcctgttcttcaacttttagctctttatgggctttctcttgtctttttaaaaattgaagtaaaatttacaagaggtgcacaaatctcaactgtacaatttgattaattttaaaatgtgcacacacccctataatcaccactcagtttaaaatatgaaacatttctatcatatgagtagtttctggtgtgtcccctcccagtcatcccaatacctgcccaaccaaaagtaaatactattctaacttctattttatgaactttcatttattttgtacctgtcttcacagatatacgaatttttagttgaatagcacaacaaaagactccctatttctgggagactctacttcttaggtacaggatatggatttacccttgtctcgaaagtttagtggcatataatcataccacggtacagagaaagatcacaattttcatatacagaatatataagcacaataactagaaggctgttttcacagagaagtaaataaataaataataagaaaaccagtaatatcacacctaccaaaaaaaaggataaaaacggaaaatagacaatattgaaaagtgaaaatttgtgatttttcacaatttaagagggtttaatgatctggaatggaaagaagttaactctagtaatatatgttttttatcttttagaaggacttttcttttcctctgataaatagaggcatttgtaacctccatgaccacagaattgaccttggtccagacccggactcagcactgggctctgggatgttcaacggtctggaaaataaactggttcatggaggagcacatctttggacatgaagtgggccatggtatggactgtgaattgagccacagccataagagtggttatgtcatgaatcatgaggggagtcatggacatggaagaagccataacaagagccatgaaatggatcaaagaggaggttgtcaaggaagtcatggaggataaggagagtatagacaaagactgaacaatggaagatattctagaaaagaaaatattggggaagaagggaatcatggaggagaaggcagtgaccataaaatggatcaggatgaacttccaaaaggatttcaggggattggccttaaagatagtcatgctcaagccaagaaaatagagaaaagatcactaagagtttgactaacaggccagccgggggggggggaggggggagattctacaggagacttgcagatttatcaggtttagatgtgagctcaagtaaaaatattccctgagcttaaccatagttgagaacctcttaggaagccacaatctcagaatggtttcttctgatgtgcaagtgatagtgtatgtgcctttggttttggatttctactctttcgtttcctcaggatgtcccgtgaccaataagaaaaataaaagaattattacagctgaaaaaaatacctcgtaatatttgtggtagccagatcacttgcttatttgtttatccatgtggacattcctttctcttttttcctttgttattgagtgattagtatgtgctaagcattgtactaagggactttcaatgcactatcatgtatgattgtaaaattggtaatcttaaaataatcttttgaaaactttcacttttctggcaatatagtgagtaagtgagtggttacgttaaccactcctcttaacaaaagcaacaaaaattgccaaaaaacaaatctttgtaactgtatcaattagctaggtagatagtaggtagtatttagatcagcaactgagagaaggaagagactgacaaagactcaaagaagctctgaaccaggatttgtattgagggcacctgccaaatctggttaacataagcttattttctcatagcttcttagcagttaggttacaggagacaaagtccaggacttgaacagggagtggagtctaataggcaaccctaaataaagctgaggcattaagggttaaagcctcagtgtatggttaaactagaataaaactatattgcccgtcatgcgcatggagactgagaaaatgtctatcttgaaacttaacactgaacagaggggggtgaaaaaaaatctcctctgagaatttgtaattgcatgacattcttcatttggttttattttccttttaagtcagaggaaggcaaatttattgaatcattttgtaatgaagcaaagatttaaaaaacattaatagaaagcaatacttcttaaatagaagaaaatggcaatcctttcatagtctgcttaataaatcagcagcctaagaggacagaaacaacacagaagtttaaaaatatgaatgagttaatttctaaggctttcaagagaggaaaaaaaaaagacataataactatcatattagatgctgaaaacaagattttcacaccacggacttcttcttcattgaaagatgggttcagggatcccggggtggcgcagtgacttagcgcctgcctttggcccagggcgtgatcctggagacccgggatcgaatcccacgtcgggcccctggtgcatggagcctgcttctccctctgcctgtgtctctgcctctctctctctctctctctctctctctctgtgtgactatcataaaaaaaaaaaaaattctaaaaaaaaaaaaaaagaaagatgggttcacatcaaggattatcttggcaaaactcatgtgttgttcttgtgttactgactccagctatggaaatttttgtggctgtttgaaaagacagattccaaaagcagtgggaagtcaccctctaatttgatataattagcctaatatggcttggatccccactatggagttgtttggtgagagatacacagcaggcattctgcaagcgcaggctggtagcctgatcttcactgatctgatgtttgttccttccttccttccttccttccttccttccttccttccttcctgccttcctgccttccggccttcctgccttcctgccttcctgccttcctacctccctgccttccttgaaggtaaattgacatataatatgatagtaatttcaagtgtgcaacagaaggattcaatatctgtnacataaggattcaatatgcgactgcattgcttaggctatctcttatgtaagtgttgttaatatctgtctaggtttgtagcatcaaatcatacaaactagggggacaggaagctattttagaaccattcattgttttctagatctccttcatctttgggaagattcttcttccctacttctttgtctctttccaagtgccatgtgacaatgagaaaaccacaggaatgtgctacaaattgaaatcttaaaatacactggctactacatatataagtttttctttttgtttttcctttgccctttataattacatgtttattatgtgccaaacaccatgctagtgcttttaaatacattatcatttttttctttcaaaaccgtccagtgagaacttaaatttctagctctgaaatgctctaggtgcattgacttaaaataccccgaaaaactttaaatggtgggctaaaatatctccttaaacaaatcagtgaattggcaggaaaagtaagaaatgctagaattaaagactaagttaaagtaggaacccaaggaggtaaggggagtaactgaagccaacatctcccaaacccagtgaagtagttagtattaccacagcctcagtcagaccagcctgggtgggcactcttgcataaatctgaaaccttcagggagagtgtaagctaaaataaatccactcttcctctaaggaaatataagcaaaattacctgtctctaaacttggtgtacgggaagggaggagagatctcttgagaaatagcttgtaataatttgagaaataactttgcatggtttgcagttccaaatcatgggttattcaaaagacctcaagcctatcgcttaatttgtgagaattgtcaaatggtaatgcatccatatgcttggccaaaacatgcaaattctctgtggaagatcatgcctccatcttaggcttcaaagtacttctacagatttttccaagaaaaataaactcagtcataactctctagtaaaaccatctcactcataaagcatcagtgaaagccagcaagaaacaaaacacagaatagcaggatcaggtattggaataattaaatacagaatagaaagcaagtaggtttaaatgtgtgtcatagcattatgactgtccactaatatctatgctccatcttgaacaatcatattcttgttgtatttttatttatgttttgtggttttatacctttttttctgacaatcagtgattttctcatctacattaactgtctgtagattttttaaagtggtgatacgtacataggtaaccagtgtgtagagcttgtttggtgaatcttcatcctcgttacattttctggactatggatacagtatggaacattccttattcctttggctcagacaactttgttgagcctggtgtcaatgtgcacatctagagttcacatccccttcatggcaaatttccagatctctttgaatgcccgaggggcatgcttcttgaaacccactccacagatgcgcttgtgagcgttggtgtattctctggtcactacctcgttgatggcagaatggcccttcttcttgccactcttctttgggggagccattctactgggattgggaaggaaagctcataatctcaagttttagtcaagcacatacccactctgctactcaccgtattctccagtctctcagcttactgtagccgtatggctatgttctggcttacggtgtgtaagcagataacaataatctctcatgaagttaaaaaccaagacagaattaaaacacttgatgacattagaatatgagttgggaactgggtagtaataattaaagttccaggattcttatattgttttgaaggagataaagatactaattacatatagaatctgataagtatgcatgcaaaaaattttagggttatgtctaaaaggtggaatctggacttgaattcagaacctctgcttccaaataattctagaagagagagggagagagaaaaaaaaggatttcttagacagctatagactctcaaccataaaatgggattgctaggagtctcaaccccagccagtcattaaatggttcctcacacttcagcctcaagaagtgcttcagcctcacagctatgaggcagatctgcatcagtcttttctagtacactctgtcccctcctgactctcagactcactcattcaaagttcttcatgtctctgaccacctcctgctcctttcaaacaggtcttgcatgttgaaaatacttgttcacctacaaataagctatctgaaatgttgcttcttccacagagcttctcattaacagtaatgaagtcagctgactttggtcacacagactgtgcactgaaactcccatctatccacccccctggtccaggccacaagatgctttccacatgaactcccaaaaccctctgctcatttaagtctgttcaattatactcatttagctgactgtgtgtcctttgctgctacatctgtgtccagatcaacatgaaatttctggaggactcagactatgtatctccctcccccgaaagacttgaaatctcctaatatgttatctgtggtataccctactgagagatgcttcattaggttgatgagaaagaatatctgaaggattccagggcagaaaagatcctgcagttacctctgaaaacaaacaagaggggaacttctttgacagaggatgagaagcggaccctataccaccccttcatctgctatgagcctgacagatggcttgttccgtacattcagcactccccatgccctcagccctcatgccccagagaccccaaagatgccttcatcaacccctggatctctttcctcctgtttattcaatatgtgttgttgagtgtctactgcataccctgcaatgctctgtcttctgcctataacccagacccctggttattattctgagtctcatatttccatttctttcagagatgtagggtaccaccccttagctcacttcattagggcacacagaacttcttgaccaggaaacaaggtctttcagtagaacaggtttctggccccatccctaccttagaaggtggatcccttctactctggcgaatttgatctcctcataccattctacttcctgctctgacccagccagcccagtgccctgcctagtgtgatcatgtcattctcctttctcaccttcctcttgacccctagtctattccttctcaatctcggtattgtttttttaactgctcacagctggcagaagaacaaatcaacttcccaactcctccccaacccatatgaagctataaaggtccttgcagctcttctataataaagaaagaggcaagaacattgcatggaggaagcttaaggaacccaggcatccagtcttctactcaagttcaaagttcttcccaagaacaagtacttaggagacccaagctcttggaagctccagccttcatctcttcaccttgaactctcctttcttaagaatcctgttctttgccttctagatcttggccacagctgggactcaggcatcctattttccaacaacgagacagatcaagatgcagaaaggaaacattctccttaagtgttggttactactgcatctcctacttttagaaactggtgagtgatttcctttaaaaatgggtaatctgagaaactttgaggtgctttgggagatgctgaccacttctaggactagctctggttctcttccatagaatggggatcatcattttaccccaatcacttcaatctaattaggtatcactcaggagaccgaacaagtggttaaaactatagactctagtctcagattgcctgtgcatggatgatggcttcattgttgttacctgtatactttggatgaattatttaatttctttgtcctaagtttctgcatctataaaatggtaataacctgtgtggttcactggggtttcaactactaagaacatgaagagttgactgtggtatcattcttactcttggtcatctcagtttttttctagttttactcaagattcggatcttaaccccaatttatagcatgttgctgatacagggggccttcccaaaatagagcccaaactctaatccaatgttagttcaattaagcctgaggagaaaattcacatgtgtggaatgaagtgataggcaccaatgttccagttagtggtaaaatgagccactaattaattttggttatctgggggaggttgagggacaacctccagtgttgtgagggacaaaaaaaaaaaaaaaaagaaacaactttaactctgagtctccaagaaagttgaaaagattttctatactttgcagcccttaatcctgggagatcataaatttttaagctgtatatgtcttgtgcttctccagccttcgccatagagatcaggagcccctgggaatttatatatatatatctcctcacccagtcccttgttgaaaggctacatctcatttaatctagagtggtttgcctatgagtctttattattaacaggctattcagacaattatgatatagatgttttcttaagaacactgaaaaatattttctcagaagggagcaatactactttaagaatgaattaatcaatatgtgctagtttcacagggcttctacaattcctttataatactaatttgtattggatcttgtacagtggaatatggaataagtttaccaccagtggaactaagttatgtaaccctggttgaggctgggtggggagggcaatttagcatggtagctgaaagtgcagatccaatgccctaagtacaaattcctgctctactacttactatctgtataaacatgggcaaatgttaacatttctaagcttcaatttcttcatcttagctgttgataataatggtgtctagttcatagggctatagtgaattatcaatgtaatgaatttaaccaggcatttaacagaaagtatttacactcaatatgtgtttatcgtcatttacgattatcaacaggtgcaacatccactgagtttagcacaccaggcaatactgaaaccagaataacctctaatgggaccagtacaatctccaacactaaatccagcacaatctctggaggaaccagcacaggtgtcaacattggattcagcacaacctctggtagaacaagtatagcctccaacactgcatctagtgtgacctctaatggaaccagtacagccttcagcactggatccagcacaacctctggagggattggcatagctgccaatcctagttccagcacaacatctggtggtaccagtacagcctccaacattgaatccagtgtgatctccagtgtgttcagcacaacctccaatactgaatctagtacaatctacagtgacacacctgttaacactggatctagcacaacctctgacaagactggtacagctgccaaaactggagccagcgtgacctccagtgagtccagcacaaccaccagtactcgatccagcataacttccagagggagtagcacacctgtgatcactagatccaatgaagcctcaggtgagaccagtatagcttccagcactagacccagtatgacttctggtgggaccagcatgcctgccaatagtgggtctagtacaacctccaatgggaccagcacagctgccaaccctggatccagtgtgacctctagcaggaccagcgtagcttccaacactggatctagtgtgacctccagtgagaccagtacagcctccaacactggattcaacatgacctccagtggggcctggacagttgccaacactggatccagtgtgacctccagagggaccagtgtaccctctgacattggatctaatgtgacttccagtgggaccagcacagctgccaacattgcatcaggtgcaaccacaggagcctctggcacattttctccaactggaacacacacaacttccgataagattggcacaagtgctactactccagtgaatgaagagacacccagtgggtccctgaaaccatgggaaatattcctcattactttagtctcagttgtagtggctgtgggattctttgctgggctcttcttctgtgtggtgagtgcctaatatgtaggaaagtgtctgggggaaggagtagtagaaacataaggaaatgggatgtgaattgtagggccaccaagttggggggtgggttggaaggaaagaaagatcaggagagtgttactaaaaagaggtagcaagttagaactggaagagccagggatccctgggtggctcagaggtttagcgcctgcctttggcccggggcacgatcctggagtcccgggatggagtcccgcgtggggctcccagtgtggagcctgcttctccctcctcctgtgtctctgcctctctctctctctatgtctatcataaataaacaaacaaacaaacaaacaaacaaacaaataaataaataaataaatctttaaaaaaaaaagaactggaagagccaatcaatgtgcagagggaactattgagttgtgggaagagaaggccaaaagaaagaataaagtctagaggaaggagtactaggtgaaggaaatgatatgaagggggggaagattccagaaggagtccatggttaaggcttggataaggggatacagttctgaaatgattcacccttctttttctagagaaattccctatccctgagaaacgtctttgacacagctgtctactgccctcatggccccaaccttggctcaagtcctggagggaatcacggagtccaccacaggcctagttggagccctaactggttctggaggagaccagtatcctcaatagccatggagatgagtaggggatacaataggccctgaatggccccctgaagttagagtgcccctttctccaaggtggaagatgacctgggagaccagagaccagagtcctttcatttatccccagaagtcccctctcagctttgtttgggtctctgacagccttggcgaagacactccctagctcttgcttttaccagactgtggaaagaggagactctattggtcatttagctaaaaaataaacacatccaaaatatgtaacagaatctgtgtgtgcacatgagtggatgtctatagcgccgagttgattttcccagttgtatgagagaatctccatgccagaacccgcttggcattcaaaaccttcacagtaaaatgtcatttttgcctgtcccctttctctaatccttcttgtcccaagcaggaccagtgtgtttctgagactctccaaattgacaggagaattgaattgggagagatgagaaggaaggcaggtgccaggattctctgagctcactgattaggcctatggtacacagaggttacgtcatggcacatagagaacccagagcaaaaaaaaaaaaaaaaaaagagagagagagagagagaacccagagcatgatgaggtggacaagtgcaattacatgtgctgtggagcagggcatgttcactcaaaatcatagtttcttgggcatttacatttgctctatacctggtctacttgtcaaaataaaggtgcaagttgacacttttctctctcacagtgaagcagggaaaaaccaagggaaccaagggaaaaactttctggctttaacccttctggacaaggtctaatctttcaagaggctcatagcagaggcacctgtgataaagcctatgattctcatgagtccccttccagaagggctgaacatatctctttcatgggtgcaggggagaagcctccctgttcctataggtcttggaggacagagaggagctattttggaaggctgagttgctctaaatccacaaggcaacaagagaaatcccatctgggacagaaccctcagatagaattagtagtttgttgggggattcaccctgacttgtagctgtggaaactgctctgccttccaatatttactaggtttacggaacacctgggtggtttagcagttaagcgcctgccttcagccaatatttactgggtttctccagtgtgagcataccagttgatcctaatcaatgaagccatgctaagccctatgcaggcccatcaccatcatcatcatcatcatcatcatcacaatttcacttaaaaggatccagcagcagaaggagaagctgtgttaagcgccctgaaaatgtacctcccaccagtgtgaacagtggaaagcatactatgaaggtcaggcaaaggaagccgtttagatcattaaaaaatgtaaacatgaattttcaagtttaaaattgtaatagaaaaatgggaagaggctggccactgttgtgaacaaaattagaaacctggaagaggggcagccctggtggcgcagcggcttggcgccgcctgcagcctggggtgtgatcctggagaccccggatcgagtcccacatcgggctccctgcatggatcctgcttctccctctccctctgcctgtgtctctgcctctctctctgtgtctatgaataaataaataaaatcttaaaaaaaaaaaaaaagaaacctggaagagcaagtggaaaaaacagcttaattatacgcaacaatacagagatgaaaatcacccagaaaatagaagacacttgcagaatagatttaggaagactaatatacaagtaataaggttcaaaacagaaaaaaacagaggtggagggacgcctgggtagctcagtggttgagcgtctgcctttcgctcagggcatgatcccagcgccgagatcgagtcccacatggggctctgtgcgaggagtctgcttctccttgtctgtctctgcctctctctctctgtgtctctcatgaataaataaaatctaaaaaaaacaaaaaacaacccccccccaaaaaaacagaggtggatgagaggaagtaaaagaacaatagggaaggtttgaatctgcatggtgaaagtgttcaccaactacagctctgtaaatacaaaaatcattgacatttttttaagattttatttatttatttgagagagaacagagtgagagaaagagcgtgggtaggaggaggggcagagggagagggagaagcagactccctaatgagcagggagcctgttggggcatggttgggggcggatcaaggaccctgggatcatgacctgagctgaaggcaggtgcttacctgactgagacactcccactgacatctattttaaacaagtgaatcatatggtatgtatattctatttcaataaagttattaaaatattattactaggcatataatttaaataaaattttttatttccaaagataaacaacaaataaagcagtaggcatttcagcacagaggaaaatggaaaggcaacaaagtacagtaagcaatttagcttatgattaattcacatggttaagctgtatctcacttctcccagcaactggagcatgcatgtagtttggaagcatcattacttaactttcatcatggaatacacttacatggactacacatgttttaacttgacaaagccacagctcaccaagcatgtttgatccaagtagagtctaagaagtggaaaaaattagtgctgccccttccagatctcatgtttttgccctattgatctaacacaatgatctttgaatggaatctctcccatacatttggaggtacatgaagacttctaaagaatattatgcacatattgaatattttacagaaatcattttttaagatcctcatcttttccctaaacctgatctgtctgagaatacctcagggtatcaggccagttagatttttctaactcccattttacaatcatccaccttttttctttctagctcccatattattatggtgcatttctctggggtgcagaaaattctagggtgcaaatgaaggtgcaaataactcaaaatttctaatttaggcatcatgtacacaaagtagggcttcatgctttcccctaccacatgtaaaatcctgttagggactaaatggaatataacaaacctgggaatttcgatacgtgttaggatgttattcatttagatatattatagagtgagagggaagtaataagaatttctgttttaacagtctcttttcttgaatctcctgtcaaagaatgcatccctcttgagaaagtatctcatggaagcagagcaaagacagtatcagtatgaaataataaaggtggcagtcccttatttaacctaggcaaaaccctatggcaagtcaacccaccttatctgtgcttctgcctattttaaaacattcaagatttacaaaaaatttgctaggaaacagcaaattatgtgaagaacatctcccaggcttgtacatcattctctgtcaggggaaaaagcaccctgttcaccaatttcttgcttaaatcatagctgtatattttgtatgatttcaaggaagaggatgtcacaagttccgtgtttacttccaaatgattcatgttattcctgaagatgaaagaaacagagagaggctttatagtatgtcatctaagaatacatattgtggaactagaatttctgatttttggtttgagctcagtgttaccttgcacaaattccttaactcttctgggtctcagtttgttcatctgtaaaaaatgatggtggtatagtccccatttcatgaggatgcatgcatttcaagagtgtattagtagcactacaaattttgttatttttttatattgggtaggttaatgtttcatattttcttgaaaatatggaaaataattgcatcagaaaacctttttcatttacattccaccaaaggattattggggactgtgaaatttaaactttggagtcttacacaccacaggaaaatatttaaagtgtttatcaacatatcttctggtataatcagcaaccacagaaatacaaacaattaatagagaatattattaaagattatatgcctcagattggacagcctagaaaaaaatggataaattcccagaaaaatataatctaccaaaactaaagcaggaagaaatagaaaacttgaacatgctgtttaccagcaataaattggatcagtaatcaaaaatctcccaacaaacaaaagtctaggaccagacacttcacaggcaaattctaccaaacatttaaaaagttaatactcattcttctcaaactatttcaaaaaatagaagagggaaaacttccaaattcattctatggggccaccattaccctgattacaaaaccagataaagacatcacaaaaaaagagggagaaagagagagagagagagagagagagagagaactataggtcaatatagccatagatgcaaaagtccttaacaaaatactagcaaaccaaatccaacaatacattaaaaaaaatcattcaccacagtcaagtgggatttttctcccaggatgtaagggtggttcaatttttgcaaatcaatcaacatgatacatcacattaataagagaggataaaaactatatgagcatttcaataaatgccaaaaaaaaaaagcatttgacaaagtacaacatccattcatgttaaaaaaaaaaaaaaaccctcaacaaagtaggcttggagggaacatacctcaatataataacggccttatatgaaaaatccacagtaaacatcatacgcaatgggtaaaaactgagagctttccccccaagatcaggaacaaaacagggatgcccactctcactacttttattcaacatagtactggaagtcctagccacaatgatcagaaaacaaaaagaaataaaaggtatcaaaatcagtaaggaagaaataaaacttttgctatttgtggatgacatgatactatatgtagaaaactctaaagactccaccaaaaagctactggaactgacaaatgaattcaataaagtcacaggatacaaaatcagtgtgcagaaatctgttgcatttctatacactaagaatgaaacagcaggaagagaaattaagaaaagaatcccatttacaattacaccaaaaataataagatacctaagaatataaacttaaccaaagaggtaaaagacctgtactctgaaaaccataaaacattgatgagacaaactgaagatgacacaaagaaatggaaagacatctcatgcttatgattggaagaacaaatattgttaagatgtctatactacccaaagcaatctacacatttaatgcaatccctatcaaaataccagtaacatttttcacagaaatagaataaagaattccaaaatcttgtatgaaaccacagaagaccctgaatagccaaagcaaccttgaaaaagatatcaaaattccagacttcaagttatattgcaaagctgcaataatcaaaatggtatggcactggcacaaaaatagacacatagatcaatagaacagagtagaaaatccagaaataaacccacaattacatggtcaattaattttcaacaaagtaggaaagaatatccaatgggaaaaggacagtcttttccacaaattgtgccaggaaaactggtcagctacatgcagaagaatgaaactagaccgcttttttataccatatacaaaaataaattcaaaatggattaaagacttcaatgtgaggcctaaaaccacaaaaatcctagaacaaaggagacagtaatttctttgacatgggccatagcaacatttttctagatatagtctcctgaggcaagggaacaaaagcaaaaataaacttttgggactgcataaaaataaaaagcttctgcacaacgaaggaaacaatcaacaaaagtaaaaggcagcctactgaatgggagaaaatatttgcaaatgacatatctgataaagggtcagtatccaaaatatataaagaagggatgcctgggtggttcagcagtggagtgtctgcctttggctcagatcgtgatcctgggatccaggatcgagtctcacattaggctccctgcatggaacctgcttctccctcttcctttgtctctgcctctctctctctctctctctctctctctgtctctctctgtgtctctcatgaataaataaataaaatctttaaaaaaatccccacaatatataaagaactcatatacctcccaaaaaacaaataattcaacttaaaaatgagaagacatgagcagacatctctccaaagaagacatacagatggccaacagacacatgaagaaatgttcaacatcactcatcataagataaatgcaaatccaaactacaatgggatattgcctcacatctgtcaggatggctaaaatccaaaacacaaaaaaacaacaggtgctggtgaggatgtcaagaaggaacacttagcactgttggtgggattgcagatgatgcagccactctggacaacagtatgttgggtcctcaaaaagttaaaaatagaactatcctatgatccagtaatcatagtactcggtatttacccccaaaatacaaaaactctaattcgaagggataaatgcacccctatgtatattgcagcattatttacaatagccaaattacggaaacaacccagatgtccaccaatagatgaatggatagagaagagacaatatacatatgcgatggaatattattcagccataaaaaagaatgaaaccttgccatttgcaacaacatgagtggagctagagagaaatatgctaagggaaataagccagtcagagagagaaataccatgtaatttcacttgtatgtggaatttaaaaaacaaaacaagtaaaggggaaaagtaacaaactgagagactcttaactatagagaacagctaatggttactagaggggagatgggtagggggatgcatgaaacaggtgatagagattaagagtacacttgtgaggagcacagggtgttgcatgaaagtggtttttttaaaaaacattttatttatttattcatgagagacacacatagagagagagagagtgcagcagagacaaaggcagagggagaggcaggctccatgcagggagcccaatgtgggacttgatcccgggactctaggatcacgccccgggccgaaggcaggctctaaaccgctgagccacccagggatccccatgaaagtgtttaataactatattatgtacctgagactaatataacactatatgttaactatattggaattaaaataaaagcttaaaataaaaaatgctatgctagggctcctgggtggctaagttggttgagttaaggagagtgagtaaagcaatagaagtttatcaagcaaggatgcagaaaaagttctcaggagtggcaacacggttgccaatgggggcctccactgacagtcttttactggccagggagcttgtggccttatcattcttgtgctgtcttggtttgagtaaggactggtgataacatctttaatggcttacttctttttagggtctggttattctttgtttgtcacaggtgactgtcataaaaaagacactcaccccacccacacctagggcagggtggtcgttgttcccttatctctggtttccttagacttcagcatttttgggatttctgtgaacctgctcccagagccccctccccatctctccctacctagccctgcctgtctcttactcagaatggcagagatcataaactgagaatagatagaaaacaaacaggacaatatgaggaaaaaaaaaacacaaaacatatcctttggtgcatagaagcatgatagcatggccaataaaatcccttcaagcaaaaaatattacaatacaatattacaatacaataacgtggggcaaggaaaatgttcacagtgcagaaggaactatgtgaaattttgactgttgaggaagaacctgcttatctgctattaaaaagaatattggtgagtattgagaggctgcagagttgagatgctactcagagctgaaacattttaaaaagtagtgaaactgtttcaatgtttatatttacaatatggtagaaattatattctttgtaattattaaattgtgatttaaacattaaattacacataagcagatgagggaatatacagtttttcaaaattctttttcaaagtatctgagtgaaaaacttgaagaccattgctcaagcacataaaaactttctacacaaacagtgattcaaggtactcgatgaagtctaaacaaccctatgaaagagcttcacttgcaaatccgaggataactgctgccatcagggggccagtttgtgggaagatgggtcagagacatggaccatctaggtctgtatttcacaaaagattgtgcttctctttatgtaattttctgataagcaacatgtcataggaaaaggcagttttgtgactccttatacagacgagaactctcctggaatcgaggattcagaaagagaatgcagactcttgtccagccagtttggagaagggcacagtgaggttgggagacagggagtgaactcaggaatttcctaaataaaacttacagcacaagagaaggaaggatttcacatctgtactaggtgtttacaaattgcctattttacataagtgcttggttatgaaattccttacattgtgatgatgtcttactctgcaaaacagacaaaagttctaagccttcagcctctgtatgttctttccttcatagtcctcagaactgactctccaaaaggccactcaaaaatgacctctggggacgcctgggtggctcagtggttgagcgcttgcctttggctcaggtcatgatcccaaggtccaggatcgagtcccacatcaggctgcctcatttataaaatggagacaacagtagcactgtgtattagggttgttggacaccagcacaggctccaactgaccagatgggataagaggtgttgtgcccaagattgcgaatccaagaaaccaccaaggagctgacaccgatgcaaacacatgagggttgatttacaagctcgagcttgtacacccgacacagcggagcagggacttggaccccgaggtggcttacagctgggttttttataggctggtctagaggattttcagaaggggtggaggaatttctcaagttctgtttacattttgatatcacaagggcattgagctctgttctcattctaatatgggactttctaccacgggggtgggactttctaccacgggggtgggctctgttgtctttctgatacgggattccctgcgaggacattgaggacattcacagtttttcctataaagttcagctcttattcacaggggcctaagatggctgtacttgtgctaatgctaaactttaggtgggatggctttgatttttctctgcctccacagagggagctcaagagagacctgcttgaaggacctgagtcctttctccacatgaccattaggagatatgaattcccctcagagaacaaatgggaaagaagtggaggggagactccttgaaatgagaaaaatagcactgggggtggggagccactgcacatcatatgggctgaatattaacctaaaagagtcttctgagagtttttcttttttttttttttttaacttttaaattaaggctaacatatatgcagtaaaatgtgcaaagtggcacaagtattcaaattgttgaatttcgggatctctgggtggctcagtggttgacagtctgcctttggcctagggagtgatcctggggtcccagactgagtcccacatcgggctgcctgcatggagcctgctctgcctgtgtctctgtctctgtctctgtctctctctctctgtgtctctcataaataaataagtaaaatctttaaaaaagacccacaaattgttgaattttaaccaatacatgtacttatatatcctccatccagacccagctgtgaagtattcccattatccctaaatgtagtcaccatctgtcagcatacaatgttcttatattattgatcatattctctctgctgtacttttcatctctgtcacttgttttattactagaaatttgtatctctgaatcttccttatctaatttcctctctgacaaccatcagtttattctccgtattcaagaatgtttttggggtgcctggctggctcagtcagttgagcatctgactcttgatttcggcttaggtcatgatctcaggtttgaaatatcaagccctgcatcagactctgtgctcaatgcagtctggtaagattctctctctccctctccctctgaccctcccccacttatgttctctctctctctctctcaataaataaataaaatcttaaaagaaaaagaatgtttttgtttgttcattggtttgtttgttttttttttttatattccacttgaaattgtatggtatttgtctttctctgtgtgacttattttgcttagcataatgccctctaagtccatccatgttgttataaatggcaagatctcatcgtttattacaggtaagtaatattcatacacatatatacatatatatatatatatcttccttatccattcatctatgaatagacacttgggttgtttccatatcttggttattttaagtaatgctgcaataaacataggggttgcacgtatcttttcaaattactgttttccttttctttggataaatatcctgtattggaattactggtagttctatttttaagtttttgaagaaacttcaaactattttccacaatggctgcactaatttacattcctaccaacagtgcatgagggttcccttttctccacatccttgccaacacttgttagttcttaactttttgataccaaccattctgactggtgtgaggtgatatctcattatgatttttttaaaggattttatgtatttattcatgagagacacagagagaggcagagacacaggcagagggagaagcaggctccacgcaggaagcccaacgtgggactcaatccctggaccccaggatcacgccctgagccgaaggcagacgctcaaccacagagccccccaggcgtccctagaaatcagtattatggagaaaatctcatcttgaaggtaaaggcacctttatgctttccaaacccccagctgtcatgcaacagggactcactgagcttagaccaggtaagtttcttcctccttcctactgctctaaaaatgaaacttacccaagaaaaccatgattctgctcctctcaggctcagaggacaggtctcctcatatctgaaatttttgctgtccctgttttgctttccttcttatctcctcccgaaaggaagtgggccaactatcctctttcttcccctaacaccaccacatgccttcctccaagcaaaactgcactctcccacctctctcagtcctaaataaccacattgatcccccaaacattgctccttcaaagggagaagaagcccagaaacactggcctcctttacctagtagcagctataaacgccacagctatactcaggtggagaaaaagaagacagaatgtggttcctaggagtccagctctcccagctcctggctttccaccacccactgctctcctcccaagactggctcctggccagctttcacctctaaccgagaaacttcatttcccattgagacctgaagcatctgatccttaactgtccccatctgcagctcattttttgctttgggccccagaaaatctcccaggtgattatttcaagataaggagaagaaagcgctcttccatcttctggttcctttgacttcctggcatctagtagctgaattactggtttatcaaaaagaacaatatgcagaccacagaaagtctaaaggagttggggtcctgtgtattaggcatcatgtccccaaattcttattccttttctagaagcaatgatgattacattttttgcccatttctatgaaattcattactggttccactcttcagaccacaatactgataccacgtttctcttgaagcaaatccatttcatctcccccagacaagtgcttgatcagggggcagagactgagtctcatctccctgagtatcctggattgaagaaactgattttttttttaaattttatttatgataggcacacagtgagagagagagagagaggcagagacgcaggcagagggagaagcaggctccatgcaccgggagcccgatgtgggattcgatcctgggtctccaggatcgcgccgtgggccaaaggcaggcgctaaaccgctgcgccacccagggatccctgaagaaactgattaatgcatgttttataatgaaccagaagatcctagtttttttttttttaatttttatttatttatgatagtcacacagagagagagagagaggcagagacataggcagagggagaagcaggctccatgcaccgggaacccgacgtgggattctatcccgtgtctccaagatcgcgccctgggccaaaggcaggcgccaaaccgctgcgccacccagggatcccgatcctagttttaattcatcctcaagtccaaatcagtacaaggcccacgtctaaaggtaatgcaagtgatgatatttcctccacaaatgctgtctaatttcaaattgttagccttaataatccctgaggatgcctctcgagatcttgtactattcctggtctctctaactccagactcttcctcctcccacgctggcactgagactgacccccaacactgccaccatggcaggcccttccttccccctctcacacattctatggttagagtaggagctaccactgaaatggaaacaaccacttcttcccaaggcatagtcaccactacctctgttttagttaccactaaccctagaacaaaatctagtattcctgtgtcagagaaaatcaacactgaaacagaaaccatcttgattggcctacatgccactgccactgaagtgggcattagtacttctgtgcaaggtacaaacacttctgaaacagatacatctactctcatctcaggtaccactatcactgggataggcatcacttcttcctttgaagtctcacccactaaggaaaaaggcacaaccactactgttcaaattcagcccccactgaaataccattaatcttgtccatctcaatcaccatcagctctagaacagaatcagacactcctatttcagataaggccagcactaggacaaaaatgatcacctctgaccgaggcacaactaccatgaaaaaaagtataacttttgcccaaagcataagcattcaagtcccaaatgcacccaccctcatcacaggcaccatcatcattggaaaaggaacacccacctctgctcaaggatcagcaaccatggagacaggtgtagcaacttctgcttcaggtgcaagtcacccttggaataggcacaacaatcttcacagtcctaagcacaaccactatggaagctggcacaactttcatccaaggcacacccactcgtgtatcaggcacatcatcctcatcccatataccaccattccattcacattattttcgaaacaggtcacttcttcccaagaatcagctactgctgaaataggatcagtctctccagtccaatgtttaaccattaccaaagtaggcataactaccccgatcctgaacgtaaccattgtgggagaaagcataaccactttggtccaggacacaaccaccctggactgggcacctctctccttactgtatacagcactatgatcagaacaggaaccacgacctttgcctttttagcctgtgatcatctggtactgaacaaggaacatcagcctctgattgaacagacaaccattggagcaagcacatccctaaacgcagatccaaccatcatgagaaaggacagcctcctccaactcagtcaccacaagctctgtcccaggtaataccagctttggaagatgaaaaccttccctagctcaggcaacagcacccatgggaatagtgtgaacactgcttcttaaggacaatctgtactagaacagagactgccacctatgtctaggcaccaactgtattcctatggctggaatatcatactctgccctgggcacaactcccactgagattggcacaaccgttcctgcttcaggcaccacagcccagggacctgcctctatctgtcatgacaattgtagaataggatctatcctcaaaataatcaccactgttggattcactgagagcactcatgaagcagaccaagtcctttccagtatacacacagtacgaaccacactccagtggctgtggtaaaaccaagatatttatagtcttgggcacatcctcatttctctgacttcagctgcagctgctgtcattctggtagaacttggattttacctagtgagtatttgtcagtggttaatgaggaggctcttggtaacaacagatcatgggttagaagatatgtgtggaatgcatggacatttaaagtcttatagttaggggcgcctgggtggctcagcggtttggtgcctgcctttggcccagagcatgatcctggagtcccaggatcaggtcccgcatcgggctccctgcatggagcctgcttctccctctgcctgtgtctctgcctctctctctccctctctctctctctctctctctctctgtgtgtctctcatgaataaatgaataaaatctttaaaaaaaataaggtctcatagttagaaataataaatggtaaagattgttagaacaaaaaaaagaaggacattcagagacagaaagcattgtttttgtagagacagggtgggaagagtaaagcagaaaacaaaaagagagatggagaaaggagataaaaataggggaggggagggtcacctgagtggctcagtggttgagcgcatgcctttggctcaggtcacgatcctgggatcctgggatcgagtcccacattgagctccccacggagcctgcttctctctctgcctgtgtctctgcctctctctgtgtgtgttctcatgaataaataaataaaatctttttaaaaaataggagagaggaggttgaaggagtctaggagaatatagagacaaggaatatagagacaaggaatagggggaacaaaactctaaaattcccaaaatttagcaccaaaaggagcctttttcgatgcaaaggagaggagaattaagtgttctacactggcttccctttgggttctaccctttaatccagttgtgctctccaagagcacagtccttgccctttaatgtttctatcccactgagggtgtatcttcttaacagagttgaactaggttggcacacaaaaacctatggcctttatcaaggcagactaacaggagtaatccagagaggacaggagacaaaacgctaacagtctccctgatgaagtgctgagtttgcagagctcagccagggctcccgggctctccagcattcctccttagggctgagagagctgcattcagtcccagattgcattctgcatgcacatattcatcaggactttctgtcttgttccagtgtatttacttctcgttttgaatttttatgccatatctcttgttatagagagattattttctacaacatgtggaaaatagcagggtgtaaatgatgaagacaactcagaccataaatggtttctttacttttagactcttccatctggacagcattatatacagactcacatctactagtcttctcctaaatgtgctggcacgctcttatttaagaccaagacataatatcaataataatggcaggtaatgtttaccaagcacttactctgttccagggactgtgtgagtattttacatgtgccatttcattttcttctttcaacaactctgtagggaaaaaatgtgctattattatctacatttcatatacaaagacactattcaaatctcatatacaaggaggcatagatggtaagttacttactgaagggcacacagcagacttagatctcaacccaggatttttaaaattcaggaacccatgctcttaactgcaaggtcatatgatgaatttcaagactgtaggttttccagatcagttagtctcccaaacatacatttctttagttaatatgatgactgatttctgcactttgatgggtccatcccctgaatttgggagattgattgtttttgttttcagaattctactatatcaatatggcacaataagtgagaattcgtaggcacagtaaagtcgttattttatgttatttttgctatccaattttgctaaagaataaaacagcagtgatatgaagagacacagaaagtaaaaagagatttttttaatggttttcctaaaaagttaaagtgtgtgactttagtcaaccaggaggctatgaaatgggaaagaaagattaatttcttaaagtatttacattttttccttttagagggacactcttctgtccctgagaaacattagcacatattacatccatgaccgaggcctgggttaattgtcctgcagcttcaacaataaaatgagctatggagggccttggttttgaccatgaggaagctataacgcaggccatgaatggagccacaatcatgaatgtgaacacagaataaatcgtgaagtactcacagaggaagtcagggtggaagccacagatatgggaccgtgatagaagtcatgttaatgacaatcacatacagaccttagaggaagtctgttaagagggcattgccatagccactgaaaatgagagacattctaaggggtcaccttatgaaaggagagggtcatggaggagaagaaaaagagttataatgggggagtaagtcaagatgtgggaccagaatgttcccagggaatggccttaggtcatggcataactcaagaacagaaccaagtaaagtcaatatctgactgatgaggctacagctcaagtagagtgtgcttttgaatgatgacatggtttacaaggcttcgaaacaaccttaagtaaatgcattctctgcactctccccataactcagaatctcaagatcaaagaggttgctggctcttgacaggggtgagaatgggcacagtgactgcacaaaccacagctgctttcccattctccctccactcaggtcatttcagtacccttcagagcttaactttgtctttgagaagtctccttttcttcttttgtgtcttcctcagatgttatatgactgagagaaaaatgactagacactctaaggaataaaaactcattaatgcatgtggtatccagatgaaatgcttagcttttagtttttgtctgttttgctcttgtcctttgtttctgagtgattgcctgtgccatgctgtgtgctaagtggttttacatacacctacatgtagtcctcacaacaacctatgaagtccagattataatccccattaagaagatgagataattgaaactcagaaaaagagctaataagtgagcaagatttcactgtaagacaaattctctaactccaattggttccagaggggaaaaaattttctatttagaagttttgtaaggattcttactcttagagcagagtgctgagattccagaagcaacttgttactgaccacaccactcatccatcctctacatgcaacgctccattgcagacaataggcagatgaacttccaagacatcctagaatctagattcctgacccctccctactcaacacctcattttctaccacagctcattctcttccagcttctaggacatagtcattcacagttctttcataccttagggtataaactctcaacacaaatttatttgttttgtttactggagtacaatgtccagtacatagtgggcaatcactaaatatttgtgggatgaatccccaaccatctcttgcttctcagctcatttccatcaggcttcatatgccataatattctttcactcaaatgtctaatgatctgaaatggttcctctgccaggaagccttgccagatttttggagggaatggagacagcttgttttgcttacatagaatataaagttaaaatttccatagggtctactcccaatttgtttgccatgaactgtggatgaagtaagtatcaatccccttagctcactactgtctttgttttgttctccttgttcagctgtctttgtgtcatttctgttggcctcatccaagtgtctaaacgaaattgtaccacaaggtctcagttctccagcatattggcagtgttttccttttttttttttggcagtgttttccttgatcattcaggttatccagcatatagcattgatgggaagaagcagctgaagttcactagggtgtaaaagttcctatgagctcttcaaaaataggggaggaaatccctatgaagggggttggaaacaagaacattcttctccagttgtcattaccccctgtaagtcctatccagtgaaatttaacaaccagttttctgtggtacaaatgctctcaccatggctgatttcaagctaatcaatgtggcatcactgagcatgaggttgagaagagatgtgcacacaccatactattatatatacaaatatgctatttctaccagacagatacaataaaggtacatgacttcatgagcatagtaatgtagtataataattgggaaataatgacttttgagtatttttaccattgctttaaatgtaatttagttcattgtaagctaatataatgtttaatgatggctgtgttgccaaaactgctgaaaatttaacaatttagggcccttgaagacaggtatgcactgatgccagtatactactggtctcatctccccagcagcccacagcccttccacccactacctcccttgccccagactttccaagtctatccttgagtctctcatcccccgggattcaatgaattttacatgcctactataggctcagcagctctcagaggtccagtccctagtttccattcacactaaatctcactttatgtgtccccttcctgctaagtgctgttcatgaaggcttccttctaacagccggcctcacttttacccagccactcaggacttctcatccaggcaataagatcttgaattaggataggttttcagccccatctctgcctcagagggtgggtcccctccactttgactacttgatcctcttgaactgtcctacttcctgctcttccccaggccctgcctaatgggatcatgtcattctccacttttttgtacctcctgacctctgctttgtaccctcctttctgagttcaagtattctgcctacagctggaaaaacaacaagccacataccctgcccttgcccagcccagatgatactataaagactttctcttaaagataaagaggcgacatccttttttttttttttttttttttaaagattttatgtatttatccatgagagacacacagaaagagaggcagagacgcaggcagagggagaagcaggctccacgccgggagccggatgcaggacaggatcccggaactccaagatcatgccctgggctgaaggccggcactaaactgctgagccacccagggatccccaagaggcaacattcttttttttttttttttttttttttttttttaagaggcaacattctatggaggaaaccaccagcaactccactctgcaacccaggtcctccttcctgtggttttcttcagattaaggacccattctttggagactcaaagtcccagcactccagcctcagatcttcacctttctctcaagatcctccattgttttgtttttttccccttttccttctaggtcttagttatatctgggacttgagagccctcctctctaggcttcacaggcagattatctcaagatgaaggaaaagtattttccttgcatgctggctgttgtttcaccttcttctacttttaggaaatggtgagtgattttgtttaaaaaaggatattcttggagtttgaatagaatttggggagaattttgacaactcttgagatgcacactttgtcttgttagttcccattttccaaaaaggggtaaaggccattattttgctctattctctccaattcaactcaacatttattctctattcttttcccagtagcagctcttctgcacagaagcctggcctatttcctctgtcacaagttaatctcaaatggagatacattagagttggcagagatcttcaagttaatatctgaccactcacagtaggcagggatccatctccaatatctatgacagcagttgccaagcctctaaatgaatatgtcaggaataatgctgttccacacttgcatagctctaattttttctagaatttgctccaccatagctttggctcatttgttttatgcctttgaataacacaaaataaatctattctcgggatccctgggtggcgcagcggtttggcgcctgcctttggcccagggcgcgatcctggagaccccggatcgaatcccacatcgggctcccggtgcatggagcctgcttctccctctgcctatgtctctctgcctctctgcctctctctctttctctctctgtgactatcataaataaataaaaattaaaaaaaaaaaaatctattctctctccacaagccagatttgcatctcaatgtctcacttagtttctctcttaactggacatataggcatatgggagaccaagttgttattgggatggaaaataagagatagaggtaggcatgagatagggggggaatgcatggcctcatactgactttaactcactaaccaaggaggtttagtccctttcgcatcctaggatatcttatctatttgagctacacgtggctagttctttgctagactaagtactaagtacatttgggaacccttaatgggtgggtcccaaactgtcatatgcataaaaattacctgatagtagtaaaaatgcccattactgtccctccccaaactaattacctttgactatctttctcctagaaaaagggtacaattctttttggagagcacctcaatatgtacacacagtcctactttctcttttacattctttatctggtgagtatcatgaatagtcagaggaggaataataccaacctcctgggacccaggtcacatgactccccaatatcttggatgtgtaataatatatgggctaaggactgactctgcgtcaaactaccttggttttgttttgtttttttttttaaagattttatttatttattcatgaaagacacagagaaagagagaggcagagacacaggcaaagggagaagcagactccttgcagggagccagatgcaggactcaatcccaggaccctgggatcacaacctaagctgaaggcagacactcaatcactgagccacccaggcatcccctgctagctattttaacctgggactacttgtttaacttctctaaacctcaaattccctatgtataaatgtgagtaataacagtccctatctcatggaaatacggtaagaatttgaaatgctaattcatacatggcacctaacacaatgcctggataaaatgcattagtgaccactcaataagtgatagctattataactaccattattattagttgtaggtacagaataaacgtttccagagtaactaacaagtcatccttccttaatgtgctgtaacttccaatgctaacattatagtcatccacactgtatcaaccatgccacccagtgggaccatcacaaccactctccctggaacaacctcgctattcagtgggaggacaagtacaaccacccatcctaacaattccaccatctagcaggacagctgtaacaaccacccaccctggaacaaccccaccatccactggtatgatcatcagaaccatctgccctggtacaataccaccatccaatgggatgacagtcacaaccacccatcctggcacaacaactatcacaaccacccaccctggtacaatgccaccatctggtgtaatgattgccacaaccacccattccagcacaaccgcaccatccaatgggatagctataataaccacattacctggaacaaccccaccatccagtgggatgactgtcacaacaccttagaacaacctcaccatccagtaggacaaccatcacagctacccttcctggcacaatcccaccatccactgggatgattgccacaactatctactccgaaacaaccctactatccaatgggatgacagtcagggccacctatcctggcacaaacctatcatccagtggaaagactgtcaccaccacccatcccagcacaacctcactatccattggatgacagtcataaccacacatcccagcacaaatgcactatccagtagagcaattgtaacaactactcaccccagcacaaccccaccatccagcgagaccatcacaaccaaccccctggaactaccacactatccagtgagaacatcacaaccacccagcctggaccaaccacactatccagtggaactaacacaatagccatggcctctaatgtcacaagtgcaagcactacccctctgtggaatgaggaaaaaagtaatagatacttcaggccatgggaaattgctctaatcattctagtctccatcgcaatggctgtgattctcttcactcggctccttttctgtcttgtgagtgtctggtgtacaggaaattatttttctaagaaaaagagagcaggaaagtgataaaggaagtatggtagagagagcagcgtcactgtagggataatagagaatgagaaatcaggaattacaaaacaagatccagaaatagcatgttagaaccagcaagacaaacagaaaagtcaagacatattcagaggaaaatgatgagaggaagataggatctttaaaaaagcaatgggaaggaggagtgctgacagggaaagaggatgcttgggactggagagccctggaggagggggcataactcaaacaattcatccttttgtttactagagaaactctctgggcctaagaaacctcttcatcacatctctaccaccctcatggctccaaccttagtctacacttcacagctattatggagtccatgcagatctgtgactgagttcaaaggagactactcttcccctgcagtcatggaactgactgggagacaccaatggatctgagtagccctgaaggcagaagcatcaccaggtggagggagggagctgatctggatgtatgggggtctgagtgtctcccataagtccccaggctactcctaccagccctgaccatcctccctcccccctggtttttcctgaccataaaacagaggctgtagatgtgaccgaattattaaataaatgtgtctaatacatgtgaaagccagactctatgtgttagtgtttatatgttgctgtgaatagaggttccctgtatctcagacccctctttcctgtatcctttcagctctcaaatccctagagtgacatccagagatttttatctgtcccattttcttccctgtcctacgtccatccccttgaggcctctgggttgatggaagaattcaatcagggaaaatgggggaaggtagatattggacttcacagatttatgttgcacaatcaaaaagtgaatggaacttagagtgtgaaggggtgggggtactgcaaggcagagaaggacttagctgttaatggggctatccttaggcatggccactttcgctggtcactcatgtctgccctgggcttggactctactgaaaagacaggtgtgagttgccacctttttcttctgtgcgcttccacccccaagagaggtaccaggtaaggagaccatgctcccagtttctgcaaggcgggcccagcctgccttgccagaccttccagcagggacacgatgcccaggtgtcagtgccatgctcttagtgaagaacatagccttgtcaaggcttctggtgcaacttgctcctaacatacattcaactaacccttcccggctacaaaatcactagccttaaccctgctaactctcttcagcttctacagttctcaatgtctggatctttgccagagccttcttaacagaatcaaagctgttcatgtacattttataacactgttaacaaaacagttttaaaaggctatatagaagccaaattcaaaagaatacatactgtatgattccatttgtatgaaattcaagcataaacagaactaatctatagtgacagagattagatcactgagtttccatgggtgtgagaatttttagaaagggaaaatttctgggtgatagaaatgttttatatcttggctggtcttttgattacacagataaatatatctatcaaaactcatctaacttaatacttaagatctgtgcatttcacagtctgtaaattttatctaaacaaaatgataggatagagttggttttttgccacataataatttaatactatataatttttaaatatattatactacataaatactttaaagttttatcaaataatagttttatacttgaaggtagtaactagtcagttatttcctcttcagttttaatagtccccagtcttttgttttaaaataattatcacagggcagccccagtggcccagcggtttagcactgcttttggcccaggacatgatcctgagtcccaggatcgagttccacgttgggctctgtgcatggagcctgcttccccctctgcctgtgtctctgcctgtgtgtgtgtgtgtgtgtgtgtgtgtgtgtgtgcctctcatgaataaataaataaaatctttaaaataaataaatacataaataaataaaataattatcacatttctcattcatttcttcatttattcattcaccatatttactgagcacctgctgggtgcctggttcagaaaagttggggagatgaggataaatatgtaggtcaccatttagtagaggagaaagacttacagacaggttaagtttaggccaatgcatcaagtactactaattaaagtagcccaggaaaaaacatataattcaatcaaggggggaggagctgactcacctagaaaatggctatgacttgaatcataaagagttagcaggcatttacaaggaggaaaaggagaaatgtcaagcatgcaagcacctcatgcaagaagaggtgtggcactgccagtgaatgatcaaaagagctgtgggcccagataagacagcacaagggaaatgaagccaaagggttaactgcatggttttagaggccacaccaaggaggtgagatttccttctataacaataggaattcaacagattgttttaaggtattgtgagatggaatattttttccaagcaagaacgctctgcctgagtgagtaggaaatagaggctgggaatccagtaaggattggaattcaaaggctcttgtaatatcccagcaaagaaacaaacaaacagatccaaggccacaaaaacatggaaatgggaatcaagaagaaaagaggtgggcagcccaggtggctccgcagtttagcgccaccttcagcccagggcatgatcctggagacccggaatccagtcccacgtcaggctccctgcatggagcctgcttctccctctgcctgtgtctccgcctctctctctgtgtgtctctcatgaataaataaataaaatctttttttttaaagaggcttttgcctagtagttttttaaaaatccccttctctgggatccctgggtggcgcagcggtttggcgcctgcctttggcccggggcgcgatcctggagacccgggatcgaatcccacgtcgggctcccgatgcatggagcctgcttctccctctgcctatgtctctgcctctctgtctctctctgtgtgactatcatgaataaataaataaaatcttaaaaaaaaaaaaatccccttctccacaacccatggtgacttttgtcaagaagtcctgtttcaagtaggtcctcctctaacagctataggcaattttcttaaaataatcaaatgattaattctctaaattttcttttttctttaaagattttatttacttttttttttattttatttacttattgagagaaagagagcacaagcagggacagcagcacagggagaaggagaaccgggatgtctgctgagcagggagcataacacagggcttgatcccaggaccctgagatcatgacagccaaaggcagatgcttaattgactgaaccacccaggtgccctaattctcttaattttcttattgtctttaaacaataatcaggggatccctgggtggttcagctgtttagcgcctgcctttggcccagggtgtgatcctggaggcccaggatcgattcccgcattgggctccctgccttgagcctgcttctcctccctctgcctgtgcctgtgcctctctctctgagtgtctctcatgaatgaataaataaaatctttaaaaacaaaaacaaaaacaaaaaaacccaataatcaacatgtctccctcctgccataactacagactaggggaaaggcagaggggagactgaagaatatcttgttgctggagcacctaggtggctcagttggttaagcatccagctcttaattttggctcaggccaagatctcagggtcatgagatggagccccgtgtccagcccctcagtgagcccatgtcaggctccccactcaacaggcaatctacttgagattctctctctttctctttctctctctctctccctctgcctcccccctaggctctctctctaaaataaataaataaaaattttaaataatatacttatagtcaagaatatactcaagaaaatatatttatttataaaaactttcatttaaaatactatattcaagaacatatccaagagggaatataaataatagtgaaagggaatagaagggaagggagaagaaatgggtaggaaatatcagaaatggagacagaacatgaagactcctaactctgggaaacgaactaggggtggtggtaggggaggacggcggggggtgggggtgaatgggtgacgggcactgaggggggcacttgacgggatgagcaccgggtgttattctgtatgttggcaaattgaacacccataaaaaataaatttattattaaaaaaaattattggaaacacaacaaaacaaaagaacatatccaagaaaaatattttatgcttgactgataattgcaaatattatttctatggataatatatagattatagtaaaaacaataaggctacagaccgtgtagttccattcattcaacattctggatatcgcaaaattatagagacagaaaccaggtctattttgccaaaatctgggagtcagggtaatcaggtagggttgactattaaggaacagccaggaaggggttgggggtgatggaatgtttcagtgtgctgaagacgtgattcaatcatttatcaaaatctatacaactgtaccctacagagagtgaattttactgtgtggaaatttagcaaatcatccagggtatgtggggagaggtagaatgcagactctgacaaatgaatcacatcaccacatcaaatgggataaggaaggagttgatctaagtgactttgaaaaacagtgttacagggacaactgggtgactcagtgggtttagcgcctgccttaggcccagggtgtaatcctggagtcccaggatcgagtcccacatcgggctctctgtgtggagcctgcttcttcctctgcctgtgtctctgcctctgtgtgtgtgtgtgtgtgtgtgtgtgtgtctcatgaataaataaataaaatcttaaaaaaaagaaaaaagaaaaagtgttatgactgttaggccgaagataaaaagaactgcacaaacactactctcgttgacaaatttgtttctcacatgggtgtggattagcaactctgaaactaccatctgttcaatagggatgaataaataagtactagaaatattgtagggacacctggctggctcagtcagtggagcatgcaactcttgatcttgaggttgtgagttagagtcacatgttgggtgtagagattactaaaaaataaaatatgaaaaaaaaaaaagaaattttgcagccatgtcagaggaagaaattacaaataagagaagaggaaaaactagaatgaattctgtgttgctgaactgcagctgtaggattcatacttacgtttaatataaatacagatagataatacagaaataaatacaggtatgtgtttatgcatgagtgagtatacatatttcctagctctaacttctatgatggacaagaagtagcaacacccaattaacaatgagcatacctcaatgagtgcccagatcttggtttctaaataccattctctaataaatagaatcagagttacatggagaaatggttgattctagggcctgggcagagaaaatacaaaatgagcatggaacatcttgtgatgtaagaaaatactttgagtatggagggggtgccagtgtggctcagtcagtctgcctctgctcgggtcacgacctcagtgtgctgtcctgggtcctgggatcgagccccatgctgggttccctgccagcagggagcctgcttctccctctccctctgcctctccccccaccttgtgctttctctcaaataaataaataaaatctttaaaccaaacaaataaaaaccaaaaatgtcatcatgaaaaacaaagaaagccagaaactgtcatagactgcaggagcctacggagacccggtgagtggaattctggtgcaggtcagagaaggagggaatatgggcattccctctgcaggcctgacggaacctgtggacaggagctactttcatcgagcaattgaggaaatcttggtagggggagggcactcaaacagtaggaacagggaggtgggcctgcgggctgcagataagccaatgagaaggatctgggtgatgattgagagaagagagtggttttaaaatagcgagattaggtgttgatgtcccctcgtgccgcctgacacctacttttcctagatagtcgccctgcaccgtccccccaggcccacccggctttcggcctcctcgggaagggagcccgaggccctcgctgagcaccgagacaccgaggggagagcggcccccaccccccggggtctgcaccgcagcgcgacccgcccaagctgcaagctccacagctctagggttgcgatctgggctctgcgccccgttgcgcctggacaggtgtcttctcccctgccgcccgctgcacccggcctcttcccctgggtgacagggaccagcaggctgctccgccctgagagaaggacggaggactcgggctccctgggccgcagcacataaatccgcggccaccggggcttaagaacaggagcgacgcggcggcgggaaggaggaggaaagcgcgccctggcttccagcccctgcgggttctcttgagatggagagaaggaattgctccgcggcatcccttctcttgctgctcccgcttctgctcgggggttcagaattgggtgaggaaacgaactttggagaagatgcaagggctgctccgggctcgccgaagtgggggtcgggacccatggaggaaaagcatcctgggactccggcaaggccagtcgtttttgttttgttttttttttcctttaagattttgtttatttattcatgagagacacagagagaggcagagacacaggcagagggagaagcaggctccccgcggggaccccaatgcgggactcgatcccaggaccgcggggtcgcggcctgagccttaaacagaactcaacggctgaggcaccagggcgtcctaggcaaggccagtcgtaagcaaagctatggagtaatggaatgaaccttggccagctccggaccctgctacctgccccaaacctcggtcacaggtgagcagggctgccagagtcccgttcattctctccctcacatcctcttttaaggaaattatcttcttttgatcacttatatttatttaagtttttctatctcaattttccttaaaaataaaggatttgagttttattagaggaattttgggaatcagctgcagatacagaggaattcctttgaacagaaggatccaaaactccaaaatttatgccacataggctgcatatattcataagaataaatattctcagtcttgatgtcctgcgggtggggacagtgggaggcacagaggcttcacatcttcctctacttaacacccaactcagttttgctatcaacctcaatcagaggttgattcctcacgactcatgctacccccaaaccatcttaaattttacctgcctccgatcttgctacttcagcttcagaacagaaccaggaactgtctcattctagatcatacaccaagccgtgtcctgaatttaatctccagtatgaatcacagctcctgcctcatttgtttaccccggacataactagatgagaggtgacatatacaattatggagtaagaatacccaatatgctgaactactaactggggatgcgagtgggaggggcagtgatgtttagaaagagtcagttttagtgtttcacagaaagagaccagaactgcaaaaagtggactcaaaggctggtgagccagacctcctaaggttatggcttagctctagagactccatattgtagtacaagaggattccttgtggaatatgttttatcagaattaaatccaaaataccagatgatccttaactcgaataaatccaaccacatcatatggggagaccagtcatataaatgggaaggataactattgaaaatattaagcagagcagatgatgacaggctaccaaagatccacattaatagagattattttcgaataggaacaagccaaaatgtacccactaaaaacccattgagcagcactgatgactcacagacaaaacaaaactataccagtggtggccttaggatcaccaaaaatcaagtaattgacaacctaggctccactgaggactacagtactgaacaccgggtaacctctgcagacccggccaccaccgaagacaacgcctctgcagacccggccaccaccgaggacaacgcctctggagacctggccaccaccaaggacgatgcatctgcagacccggccacctctgaggacgatgcctctgcagacccggccaccaccgagggctcttttactgctgtcctgggaaccaccaagaactatatcactaaacatccagacactcgccctaagagaacaattgcaataacctcagtgaaacccactgggcagttgacacctacggtgttgacatcctcatttccctggctgccaccacaatggcagttgcactccttgttggacttggcttctttgtggtgagtattggcccagaatgtaaaggacattatgggcaaaggggtatctgaggaggaggatgtgggcatgaagagttaagccatgataaattgtcagaggtggggaaacctacatagagagagctttagaaagacagacagaagcagatgtggaaaaggagaggaacaagaaacataaaaaatgagggcagcactaagggagagaggaaggtgttagagacaaaagaggatggagagaaagagggaaggggaagaaagtatggagaaagataaagcagacagaaaggaacataaaaacacaaatacagtaaggcatggagagttatggagaaaggcataaaccattaagtacagatagatgtaaaagttctgaaattttcataaaagacaggaaattggtggtaagaggaaaagaggatgtagaaacattttggcccgcttatgtcaaaaatgatgttttgtattgattgccagctctgagattctgcaaaagtttttttaaaaccaggcttgggggatccctgggtggctcagtggtttagcgcctgcctttggcccagggtgtgatcctggagtcccgggatcaagtcccgcgtcaggctcccggcatggagcctgcttctccctctgcctgtgtctctgcctctctctctctctctctctctttctctctctgtctatcgtgaataaataaataaaatattaaaaaaataaaataaaataaaaccaggcttaggtaggtttttatgagcatggctactctatattggtgagacaattggtaagagctctcaaagcagggctctagctatttttctgcctctaagggaagcattgtttctacaagaggagataaagaaactccatgctagccttgtggcttgcccttattgacttctggtctaagacccataccttcaaggtctgacttctgctggatggggaagggctggttctttttggtagtcctgactaaagattaagttctcattggaatcttaacaagtgacagcttacatgactagccagctcatgtaggacattaaagcctcattaattcttgttggtcattgatgccactatgcacggacctctgccccaggaggcaaagccacagcttgagatcagtttgtaagtgtgatttaagccaaaaggaatgtattattcagctgaggtgttcatgtttaattcaaaatcacactatgaatctagagcattctgatggatagttgacaagaggaaagtgggaacagtagcctctatatgtacttgacacacacacatgagtcacattcagtattcactggtagaggaaggacctcttgacgtcagtgttacacagactagtggatttctaattatgtggatcacgatgaaaaatcggacactcttgctccaggctggtggatactttcctccctccaaaccagacctctaagtactgatacagagcagtcactagtaatcgcaccttcttaatcttttataaagactgaaaacaagagatggctcaaaagctcaggagtaagaggaaagttgtgtttccaacgtgctaaatttttaacttttaaacatttaactgaaaatgttgaaaacataagaattatctatattttcatcttccccactaattccatttaccaaatagttttcttttccctacatgacttcaagattttggaaattttgtatctctaggggtaagtgtcaagatctaaagaaaatggtgacataggaaggaatcacaaaactgggaagaggagctggatagatcttgataacttaccacaagagttaagagaagaactgtcttaaaaccaaaccacttttttctcctctagaaaagttgtttcctgcagccattaaatccatccaccggggttgtttattttccccatgccatggattggagtgcaccatgaaaaggattcctgcagtaagtaactgtaatgggttctagagccaatcggtccaccatcaggctctgcaggaccatgaatcatgacatgtaccctaagacctccacttttctcccccactccagagccctggaaccaccagatgagaaaggtagctggccctgggaacaagcatatcaggaacacccaaaaggatgcctgcctgctccgagtatctcctaattcggtctggccatagttacctcctcaggaaaattgcctttacctatctaccaggtttagtcgtaaaaactatttgaaggagacagacacaattcaggtataagagatattcattaattctgatcaaagaaataaagctgatgttcatctgcttctgtctagatgtcttcattcatttaacaaaatggaatgcttagcatgggccaaacactctatgcctttctgtctgaccagtccgagtccgtgtacctgaaggagatagctttctcgtctttcaagaacactacacccaagtcctctccacaccctggccaaaggattatgtttacaggaagtagctaactggtcattcaacaaatatctagtgaacatctacagtggaaacaggccactgtagcaaataactgagtttcatctctgtcatggtgtgaaatgagggacaaagtcctgatctgacctctaacttaggggaatatctgtgcatatatgaatcacacaggaaggaatttccttgggctgtgtgttagaagacactaatttcaaagtcataaagaaaccaaaacttacatgtatacaaaaataaaattgaatacagtgaaatgaaggcaaaaataaagactataaaatgtaaatgtaaaaaatgaaagtttaaaaaaagacaaaaagatgggggaatccctgggtggctcagcagtttagtgcctgccttcggcccagggtgtgatcctggagtcccgggatcgagtcccacatcaggctccctacagggagcctgcttctccctctgcctatgtctctgcctctctctgtgtgtctctgatgaataaataaataaaatcttaaaaaataaataaataaataaaaattaaaaagacaaaaagagttgataaaataagaaactagttgaggcgggaaaaaagaaagaatattggaaaattttaaactgaaagataagtgaatcctaagaaaaaaacttcaagttctacatactattttcccccagtcctggagttttacagtcctgtttggtccctaaacttgctgttcccctgttcttccagctggtcttctgggggagggccgtgccctgctgatcctcaggtatgtgtgcctgggccgagatgcaccaccccttgcggggtgccgggctcagtgggagctgtctgctgtgcatggcttttattccctgaaggctttccctgactctttaggggtgaaaataaaaactgtccactccctaatctctagacctggagctgagcggtgggggtatgtgccaaactctgcagactcctatggtgtgtgcccactctgatcctcccaggggaaggcagaggggtcacccagcttgtttctgtcttttacagggcctggcatggaaagtattcatggggtcagtgtgcacccactctgccactcccagggggagctggagggttgctgcattctagtcctttgcagggactcaacatagagcgagcagtcacccagtcaggccgctgttcccagtttatggcagattgaacgagagcctcctccaccctccagggcttgctgacctaaacctgcttcctgctccagtgctcaggaactgccagctcaggcacctctgttctttttgtgactctggggactttgagtgtcccaccagggagtctgcctgcttcaccactgagcaccttttaggcaagggaaggctctcatgggagcagatttctgaagtcctgattttatgctccagggctatatggctttccagaagccagctgatgcagattccctcctcctgctgtttatcttccaatatgtcctctgtgcttctctttgcactcctaccttgcaaactgtggtcgcttttctatttatagaataccagccactcatttcttacatcccaggttgaattcataggtgttcaggatgatttgacagttacctagataaatttaggggaccagatgaaatgaggaccccctcttcttccaccatcttgccccctccagagaggagcacctcttgaaaactgcctacttctgagtgcctctgaggaagttggcttgccttacaggtcaggtgtcacacccaggtcacttctcatcttgtacttgctaagggctaaggttcatatgtccataaacaactacaatttttcactgaatctaagactccattagctagtaaacatatcattatttctttttttaaaaaaagattttatttatttattcatgagagacatacagagagaggcagagacacagcatagggaggagcaggctcctagcagagagcccaatgtggggggctcaatccccagtcctgggatccgggatcatgccctgagctgaaggcagacactcaatcgctgagtggtcattcaacaaatatctagtgaaatatctgagccacccaggagtcccaatatatcattatttcatgcaacattgagaaagaaaaacagtccaaaaaaaaaaaaagaaaaaagaaaaggaaagaaagagagaaaagaaaaacagtcaattaaatgatgacatgccgaaaacttctgaattcactctgtgaggccagctttaccttgatcccaaaaccagacaaagacgccaccaaaaaggaaaattacagaccaatatacctgataaacatggatgtaaaaattctcactaagataaatacaagtccataggatccaacagtacatcaaaaggattattcaccataacaaagtggtatttattcctgggctgcaagggtggttcaacatcagcagattattcaatgtgatacatcacatcaataaaagaaaggacaataactatatgatcctctcactagatgaagaaaagcatttgacaaaatacagcatcctttcttgattaaaactcttcacagtgtagggatagagggaacctacctcagtatcataaaagccatctacaaaacccacagcaaatatcattctcaatggggaaaacctgagagattttcccctaagatcaggaacatgacaggggtattcactctcaccagagtagttcaacaaagtactacgagtcctggcctcaggggtcaaataacaaaaagaaataaaaggcattcaaatgcaaaagaagtcaaatgttcattctcacagatgactcaattctctgtgaggaaacccaaaagaatctacccccaaatcactagaactcatacaggaattcagcaaagtggcaagatataaaatcaaggcacagaaatcagttgcatttctatacactaacaataagacagaagaaaaaaaaatcaaagaatcagtcccatttacaattgttcccaaaagcataagatacctaggaataagcctaaccaaagcggcaaagaatctatactctataaaccagggaacagggacaccgggttggctcagtggttgagcatctgccttaggctccgtgtgatccctgggttcaggatcgagtcccgcatccggctccctgcaaggagcctgcttcttcctctgcctgtgcctctgcctctttctctgtgtttctcatgaataaataaataaaatcttaaaaaataaaaaaatttttttcttaatttttttatttatttacgatagtcacagagagagagagagagagagaggcagagacacaggcagagggagaagcaggctccatgcagggagcccgacgtgggattcgatcccgggtctccaggatcgcgccctgggccaaaggcaggcgccaaaccgctgcgccacccagggatcccaaaataaaaaaaaattaaaactacagaacacttatgaaagaaattgaggaagtcacaaaaaatggaaaaacattccattctcatggattggaaagataaatattgttaaaatgtatgttacctagagcaatctatacattctctgcaatccctatcaaaatactatcaactcttcacagaactggaacaaataatcctaaaatttgtatggaactagaaaagaccccaaatagtcaaaggaatgttgaaaaaaaaaaaaaaaaaaactagtgacatcacaattccagacttcaagctgtactacaaagctgtgatcatcaatgttgtgcccaagattgcgaatccgagaaaccaccgaggagccgtcaccgatgcaaacacaagagggttcatttacaagctcgacttgggtccaagtgcacccgacgcagcggagcagggacttggaccccgagactaagaggcgtagcagctttataggggccagtggcccatgggacacgcagaaagttgcacagtcatgtcggttcacacgcaggtggccgattgaattacaccttaccctataggatccacttgagctggcctattactttggtcagaatcggtgcgcagtttgggtggacacaaagcaggggtacattgttatgagccgatttccgattagggtgtgcccagtggctcaactagggtggggcagcgccttaagccataagcaggtcatgtgggggtcataggggaggtggcgggtgtagcacaaaatggagttagtcctgctctgcttgtccaccggtaggggatttttgttaaatttcctgggtcccacagtcaagacagcacgatactggcacaaaaacagacacatagatcaatggaactgaacagagaacccagaaatgggcccttaactctatggtcactaatcttcaacaaagcaggaaagaaaatgcaatggaaaaaggacagtctcttcaacaaatggtgtttggaaaattggacagctacaggcagaagaatgaaactggatcattttcttgcaccaaacacaaaagtaaactcaaagtggatgaaagacctaaatgtgagacaggaatccatcaagatcctagaggagaacagaggcaataacatctttgacctcagctacagcaacttctggctagacatgtctccaaaggagaggtaaacaaaagcagaaatgaagtgttggaacttcatcaagataaaaaggtttgcacagtaaaggaaacagtccacaaaactaaaagacaacctacagaatgggagaagatatttgcaaatgacctatcagacaaagggctagtatccaagatctataaagaacttaccaaactcagtacccaaaaaacaaaaaatccagtcaagagatgggcagaaaacataaacagacatttctccaaggaagacatacaaatggccaacagacacatgaaaaaatgctccacatcacttgccatcagggatttgcaaatcaaaaccacaatgagataccacctcacgccagtgagaatggtgaaaatcaacaagatgggaaacaacacatgttggtgaagatgtggagaaaggagaaccttatatatataaatatatacatatatatttttatatatatatttacagtgggatattactcagccattgaaaaaagaatgaaatcttaccatttgcaaggacaactgcactaacattctgtgactcagtaatttatgaccagatgaactacagaatgaaaatagacaacagaaaagaagtcaggaacctgggctctgatctagggctgccctttattattgttttttaatattttttacttatttgagagagagagcacacaagcggggtgggggttagagagagagggagaagcagggcagactcttcactgagcaggaagcttgacgtggggctcgatcccaggaccccaagataatgacctgagccaaaggcagatgcttcaccaactgaaccacccaggcacccctagggctgccctttaatagagtctgtgatccttctcagccttagtttgtccacgtattaagtggggttattattgtctgtttagactagatctgttaaatcaagaagtaactataattttctcataacacagtcctttaaaatacatgcagtggggacgcctgagtggctcagtcagttaagtgtccaactcttgattttggctcaggtcatgttctggggctatgggatcaagccccttgtttggctcctcactcagcagagagtctgcttctctctcttcctctccccctccccctactcatgctcctatttttcttttctgcccctgggccaagaaagttccagtttttgtcaccttcaggtattaagcagtataattttctgcatataaatgtataatctggaacaatatcagaactttcctattgttcagtatggagcttcttgttccccagtggacagcctacagtggactggtatcttgtctttgcctggtaaatacagctgcctgggggtgggaggataggaggcgatgctggggtgctggttcctgagtttttcagggcaaaggctattaagtgtttccagtggactagctgtaaaccaggctagaaagagagccagtgtggggctgagttactcctgtacagtctggccacctacaggtgtgagtaagcctcaatgtaaagaagctgaagttgttttttaaattgttttaaatttattttttgtactttcaatcttttttattgaagtatagttggcatacaatattatattagtctcaggtgtacaacattgtgatgcaacaattatatacattatagatgctcactagaataagcgcagttaccatctatcaccctacaaagttattacaatattattgataatattccctatgctgtgctcttgtgacttgtctattttgtaactggaagtttgtacctcttaatccctattttattcattgcttcctcccctgagctgaagttattgctgcatgcccagggatctatggaagacataaattatagaaaaaaggctttacctgcaacaaggaactatagctgagtagtcttcagcaatgactgtggaagaataagggatctcagaagaatctatgaaagcactcgagaatcagctttaagcatctgccagtcccagagcgtacaacaccctctcaccatcctgccaggcaagaaagaacttgtgccccactatctgtaatccttccccattctactcaaccttggagggtcagaaattatcattagcaaactaggagaaggggatagagacttaaagtagagaaaagaggaactgtgtgtgcatttcctcatcttcccacactcggaaaacactaattaaagaagatttaactttggagctggacatcaaatttccaaattgacattgtatttggtaatataaaatgaccataggactttcatcacctaagagagatcaggtgtttaatactgttcctgttttcatcttggaacaaggaaaactgatcccactgagcaagctaaggagacagtggagaatgaaacagagtggctatgatcgcatccttcaagtcatgctcgctcctcatagttgtgtgcaggcctgggtgtcacttcaggctgtcactggatctggtctgatgcagtttgtgatagactgatctatagatgctcaaaaagtctattactcaagactaacttgttcttgaggaatatgattcaagacaacacatgttgctatagtttcctcattaaaggttctatgttctccaatatggtagccattagctcacatgtagcaataaccacttaaagtgaggccagtccaaattcagatgatttcttaatcatacaacacacaccagatttcaaagtcttagtaccaaaaagctcactaataatttttatatttattacactttaagattgtatattattttggattactggtttaaaatatattattagggatccctgggtggcacagcggtttggcacctgcctttggcccagggcgcgatcctggagacccgggatcgaatcccacgtcgggctcccggtgcctggagcctgcttctccctctgcctgtgtctctacctctctctctctctctctctctgtgactatcataaataaataaaaattaaaaaaataaaaaaataaaaaataaaataaaataaaatatattattaaaattacctgttatttgggtgcctgggtggcttagtcagttaagtgtccaactcttggtttcagttcagatcatgatctcagggttgtgagatcaagccccacatcctgatggagcctgctccgtgctcagcctacttgattctctcgctctccctctctttctccctgtgccccttcccccattcatgtgtgcatatgtgcacatgctctctccctcaaaaaaaaaaaaaaattacctgttgtcttctatcttattagaaacttttaaattacacataactcacattatatttctattgggcaaccctgtcttaggccataaagcattgaggtcacaggtcatataagactgggatatttcccattcagagtggttcatttccatttttaattatcttaaagcagtcagatcctagtagatgggccggaatctggattaagggaagaaatatcctctcctttttggaccagcgtaaaggtggtggtgcagcttgtattttgggttaggagagcacattcaagggtacctccaattgtggggaggtaaactggctcctgaaactcagagcatgctggaggtaaagcagagaagcgaccagtaggagaactcacataggaagggtcttgggtttgtgaaatctgatcagctatatctaatttccagttcaaactgtttctttaattctcttcctttctcccacactccttagtaaagacttcttaaaagtgagcctggaggcaggggagggaagctgaaggaggggtctggcattgcctcctccctgcaggtcctggcatctgcaggccagcttgctgatgacgctgctgttctcccagtgtgtcttcttagcctaagaggcagtgacctcacttctgagaatctataaaattctcaattgtgggaaaagctttaataaataaaaaaatattcaggggatccctggctgcctttggtccagagcgtgatcctgaagacccgggattgagtcccacatcgggctccctgcatggagcctgcttctccctctgcctatgtctctgtctctgtgtgtgtgtgtctctcaagaataaataaataaaaatctttaataataaataaataaataaataaataaataagcaaacattcattactatttataatcttaaggggctcctggctggctcagtgggaagagtatatgactcttgatcttagaactgtgagttcaagctccatattggatatagagattactaaaaaatataaataaaccttgaaagaaaaaaaagaaaaatattgtaagcagcataaacactcaacgggaaaaactataaattgtggaccatgcacttcatacaccattgtggagctgcttaagtgacatttattaaaagtttgtattaacaaggaagatgaaaatgtcataataatcatttcaaaaaggaataaagatggggcacctgggtagctcagtcagttgagtgtccaactcttgatttcagctcaagtcatgatctcagggtaatgagatcaaggccaacaatgggctctgcactgggcatagaacctccttgagagtcttactccctccactcttcccctgcttgttcgcacgtgctctctctcaaaaattaaaaattaaaaaaaaaaaaatggaggggcacctgagtgcctcactggctgaatgtctgcctttggctcaggtcatgatcctggggtcctgggatcgagtcctacatcaggctctctggctgtgtccctgcctttctctgtgtctctcattaatgaataaataaattctttaaaaaaaaaaagattaaaagaatacacaattaaatacacaactggtgacaataaatatactcctccctccaaagaaaaccaaaaaaatctagccataaagactagaaaaaatgtttttaaaaaatggaaccatgattgttttagtcagccttctccacaaaaatggaaccaatatagagagaactggttcaggcaatcgtggaggttggcatgtctaagatttgcaaggtagttctggcaggctggagactcggagaagagttgcttctagtggagaagcagttgagaggcaacattccttctagttctagtggggaagcagttgagaggcagcattccttcttcctccatggggaagtcagcctttttctattaggaccttcaaatgattgaatgaagcacacccgcattacaaagggtaatctgctttagtcgaagtccactgatttaaatgttaatttcatctaaaaactaacttcacacacaaaaaaataacttcacagaaacatctagaaaatgcttgacaaagtatctgggtactatgggcctagccaagctgacataaaattaaccatcacaatgacctaggattcaatctctaacttactttcaaatattttactgttttccaaaatacatatggtaatgatgtacctttatgatagaaaaagacctgtaaacatttaaaacacaattttcctggagtagggcaagggtgtcatgtgctgggtgcttttctcaacctgccaatgcccccccgacaccttccataactcttctcacctcctgtcactgttatgcccaggatgtgtcttccaatgctaaatggtaaacccttagaggtcagcaactaagtcctactctcctttttcttttttttaagtaggcttcacacccagcatggagcccaatgtggggctcaaacccacgaccaggagatcaagacctggactgaggttaagagttggatgtttaatccactgagctacccagacatcccaagtcttactcctttttgacttccctcatcatagggagctctttcatcagtaagtaattactttcccattaaattaaattaagaactttgagggaatgcctggctggttcatttggtagagcttgagacttttgatcttgaggtcctgagttcaagccctacattgggtgcagagatcactttaaaaaaaaaaatgtttttttcaaaataaattaaaaaaaataagaactgtaggagataatcttcaagaggattttaggacctgggattttagttaatgacagaaggaagatgtggaggcaatgagaacctgtctaactgcattcatttcagctgcaggtaatatgctgattcctaaggctgtacccttcagagaggcttagttatgggtgagcacagggaacttgtgttctcgctttgcaaagttaacttgataagattttccctacctctgctgcaattgtttaaaaagtattattgattttctctaatgttttctggaattcctttaagttttaatttattgctcatgctttaacttcctttttacttcttcctaaatgtaatattggtatatctgctttgcttatttctgatatgttcccataaatggagggaatttctataaactaaatccatctttctttgattttcaatatgtttggaaataatttcctaaaggtgaaaaatgttgctcccaagacacaatgaaaattttactttaaaatgatgtgtgggggcagccctggtggctcagtggtctagcgccgcctgcagcccagagtgtgatcctggagacccgcgatcgagtcccacatcaggctccctgcgtggatcctgcttctccctctggtctctctctctctctctctctctgtctctctgtctctcatgaataaataagtaaaatctttaaaaaataaaaaaataaaatgatgtcgggcagcccgagtggcttagcggtttagcacccccttcagcccagggcgtgatcctggagacccagaatcgagtccggcgtcgggctgcctgcatggagcctgcttctctctctgcctctctctctctttctgtgtctctcatgaataaataaataaaatctctaaaaaaaagaacttatagtcagccaaacgcaaaagaaacttatttttgtggagaggatggagtaattgggtaatgggcattaaaagggcaggtgatgtaatgagcactgggttttatatgcaactgatgaatcactaaactctacccctaaaaataataatacattatatgtccactaaatttaattaaaataaaaatattttaaatcttaaaaaaaaaaaaaaactgattttttttttttttttttatgatagtcacagagagagagagagaggcgcagagacacaggcagagggagaagcaggctccatgcatcgggagcctgatgtgggattcgatcccgggtctccaggatcacgccctgggccaaaggcaggcgccaaaccgctgcgccacccagggatccccaaaactgatttttgaaacaatatccagaggagaaaataaagatgtgccaagtgttgtctggcctttgaatttggttggtggttctaggtctttcttggagagcttctcctctgtggtatctcagaggtacttgggattctgagaaactcccactgaaagcaagaattttcttcattacatcctacatagtggctttctagtccctgcccaaacacagaaggtggaaactgaaggtggagaaagaaaaaaatttgtgaacctgaaagtctggttgcccaaagagaaaagacattcagaatcctcaaaaggaaggggtatctggagatcaggaaactataaaactgggtccagaaaaggttttctatcaggagagagaatatctgatgagacatgcaaatgtggcctaaggtggtaggttacgggcacatgttataggcagatactcttcacaaatgctccacagttgaactcttaaggcttttgaagaatcttaaataactggcagggtttttcctgatgactcaatgaacttgctcaatcagccagtctcagcttacccccaaaaaagaaaaattaaattcactgctccccaactgcccgtagctttccctctcccctcccccttccctcttttatgagtcctgtcttgtctttatatgtcagccatcagagtggcctggctcttctccatgtgcactacttttttctgctaccaccaacttactatacaatttctctatgtcctatgtctctacgtcctaacttttgaactgtgcttcctcattccaaatcaaggccctccagtctcacaactaatcaccatcactgtcatcaccaccattacccctgcacattgattaccatcagcagcaccatcattattaccatttagtttccatgagagcaaaaagtacatctaatcctcacaatattctcaaaaatgtattgtgactccccttggaggaaatgaagtcaaataacttgtaaagagttacgcatttagtaagtcacacaaccaagatttaaacctgtttgtttgggacacctgggtactcagttggttaagcagctggctctttcagctcaggtcatgatctcagggtcatgggatcaagccccacaggctctgtgctcagcagggagtctgcttgaaaattctctccttctgccccttattccattctttttctccctctctcaaaataaataaatacatctaaaaaataaaaacaaaacccaaaaacctagctttgtttgattccaaagcccaaagtcttactcattatgctatcctgctttccaaattctctttctactaccaaccactttaaaaaaaattatttatttatttattcatgagtaacacacagagacatagagggagatgcaggctcctcacagggagcccaatgtgggactgaattctggacgggggatcgcaccctgagccgaaggcagtcgcccaaccgctgagccacccaggcgtccctcaaccacttctttatagttctgtttcttttctttctttctttctttttttttcttttcttttcttttctttctttctttctttcttttcttttcttttgattttatttattcatgagagatacagagaggcagagagagagagaggcagagccacgggcagagggagaagcaggctccatgcagggactgatggatgtgggactccatcccaggtctccaggatcacacccggggacaaaggtggcgctaaactgctgagccacccgggctgccctatgcttctgtttcttaaaagaaattcttttaatttcttaaaaagaattctttctttttctttatgatagtcacacacagagagagaggcagagggagaagcaggctccatgctccgggagcccgacgtgggattcgatcccgggtctccaggatcacgccctgggccaaaggcaggcgccgaaccgctacgccacccagggattacctcttaaaagaattcttaaaagaaagaatctcgttggtttgacgcaatttttagtaccatgccacattactggtcatctgccagcttattgattggctgaccatgaatcaggtacccatctctggaccaatcagctgtggcctgaggatgcagggtgccttgggctgtgctctcagcagagcggctgtttgtggaaaaagcgccataattggcatgaacagtgtatgtgtaggtgtctgaacccccctgagagtttgctcaagaaaacaaattgtaatgtacattgatttggacttcatctctttccacagattatttgaaatggctctataacaaaaacacaattatgcagtaataatgtacatatgaaaacatttaaaacctacaaactgaggcaaaacatttaaaacctacaaactgaggcaaactgaggtttggaatagaaatattccaaaccttagggatgaaaatatcgaggtatttaagaaagttagtgttttaaggtttctggggcaatctgtgcagaaaataatatatagacagcctatagtatgtatgaggaaaagaaaagtaaacaacttctccaagcagtaaattctaaaataaatttctcacatgacatccttaataagggacactaggtaatataaaactaaaagtcttcagcaaattttctggaacaaattcaataatcaatttcacatgcttgtccactatagcaaacctagccaaggagaagagagcatgaagacaaagggcaatggaagcgattccaggaagggctaaaaaaaaaaaaaagtcatataaagatagagatatccttgatccagggactgagtttgagaacttagagaagagaaaattgcatgctccttatataatcatctctaaaatatcctttatctctgttgaactattatgaggagccatataccagaaatcctagtttatactccctgttaggtaactttaggatatatgatttccattggttatcttttctttttaaaaaaatttatttggggatccctgggtggctcagcggtttggggcctgcctttggcccagggcgatcttggagtcccgggatcaagtcccgcatcgggctcccagtgtggagcctgcttatccctcctcctgtgtctctgcctctctctctctctatgtctatcataaataaataaataaatctttttaaaaaaataaaaataaaaaaaatatttattttgggggcagctaggtgacttaggtgtctgccttcagctcaggtcatagtcccaggatcccaatatcgagccccacatcagggctccctgctcagtgggaaatctgattctccctctgctcctcaacctgctcatgctctctctctgtctcaaataaataagatctttttattttattttatttttttactgggacgcctgggtggctgagcatctgcctttggttgagagcgtgatcccggggtcctgggatcaagtcccaccttgggctccttggagggagcctgcttctccctctgcctgtgtctctgcctctctctgtgtctctcatgaataaataaataaataaaatattttttaattttattttttattgaaatatagtaaacacacaatgttacattagtttcagatgtacatttgacaagtctatacattatgctgcactcaccacaagtatagctacatctgccaccatacaactctattatcattgcctatattccctatgctataccttttatttctgtggcttactccataactggaagcttgtatctctcactccccttcacgcattttgcccatctccccacctcactcctctagcaaccatcagtttgttctctgtgtttatgggtctgtttctgccttttgtcttacttaccttttcttaaaagctcagttggacaggtaacaggtccacattgctccatggaaaccaagggcctcagcctatgctcctacctgggtggaaacaatccaggaatctgtgcaaaaataccaaagccaggatgtccttcaggaaacttttttggattgctccaattcgtgaactgcagtgaaccagccacattatgaagcattactacagcaagaccaatctggcccctaaaaccatgttgttcatagtagagctaaaatggttattttgaaaaaataaatcaaagcaggtactaccagtcacctactacaaacagaaagacctcagaaattactcatcaaatcctctaagaatgacaaggaaccctaccaaatgtatgtaattaattttctgtatacttacttgaaatatccaaattaattgtagaaaacatctgccaaagacaattactttagtttatgtaataattaatactgtggctatttatttgttgttgtcgttttttgtttttttatattttatttaatttcaatttgccagcatataacacccagtgctcatcccatcaagtgccctcctcattgcctgtcatctagttaccccaacctcctacccaccttcccttcagcaacccttcatttgtttcccagagtcaggagcctctcatggtttgtcttcctctttaacttttctccacccagtttccctcctttcccttatggtcccttttgactatttcttatattctatatacaagtgacaccatatgattgttgtctttctatgattgacttatttcatttggcataataccctccagttccatccacattgaagaaaatggtaagtgttcatcctttctgagggctgggtaatattccattgtgtatatatatattttttccattccatatatggaatataaaatggctattttatttagttatcacgatcattcatctcttaaaatcaggatccatcctggttaaagttaatgaaaccatatctgcagcccacttatatccttttaaaaaattttttatttaaattcaatttagttaacacatagtgtattattagtttcaggggtagaatttagtgattcatcagttgaaaaaaaaaaaaagaatttagtgattcatcagttggatataacacccagtgctcattacatcacatgccctccttaatgcccatcacccagttaccgcatcctcccacccacttccccttcagcaaccctcactttgtttcctatagttaagagtctcttatggtttgcctccctctctgtttttatcttttttttttccctccttttgcctttgttcatctgttttgttttgtttcttaatatccacatgagtgaaatcatatggtaattgcctttcactgattgacttattttgcttagcataatagttccttccacattgttgcatatggcaagatttcatttttttttaagattttatttatttattcatgagagacacagagagagagagagagagagagaggcagagacacaggcagagggagaagcaggctccacgcaggaagcccaacgtgggactcaatcccggactcccaggatcaggccctggactgaaggcggcgctaaactgctaagccaccagggctgcccgatttcattctttttaatggctgagtaattatatacatatatatatatataatttaatatatatgggtatatatacatatatataattctcacatcttctttatctcttcatctgttgatggacatctaggctcttcccatattttggctattgtcgacttacattctttggcagttccatgaatctaggctatttaaaaccatgtttgagttgttgagatagtggtttaaaaaagaatttgaaattttttaataaaggaaatgattcaacttttagagattgtggtgagagggccccatattatattaatgggggggggctgctatctctttggaaatacttagataacattcaccaagagttaacacataccaaaacatcttttgtagacaatgtttatggaagcattatttttaacagtgaaacatttgacaaactcagtaaaagagaatgtcatatggtattatattagacagctatttaaaattaatttatgaaggaatgcctggatggctcagcggttgagtgtctgtctgcctttggcccagggcatgatcctggggtcccgggattgagtcccacatcgggctccctgcagagagcctgcttttctctctgcctatgtctctgcctctctctctctctgtctttcatgaataaataaataaaatcttttttaaaaattattttatgaagaatttttaaatgtaagatattgttcataacatagaattcagttgaaggagcagatgcccattgaatgaaaaaatatccaaatgttagcaatatttatggattgggttgaagattattttttattttcttatatacgtataatttctcccttaagattccaaattcagggcagccctggtggcccagcggtttggcccgccttcagcccagggtatgatcctggagacccaggaacaagtcccacatcgggctccctgtgtggagcctgcttctccctctgcctgtgtctctgcctctctctcatgaataaataaacaaaatctttaaaaaaaaaaaagattccaaattcaataaatgttattacttttttaatgaaaagggaagttattgaacaaaagagtgtctcttctacaaaattttttttgagagaatgcgactgtgcacatgactggggtggtgggggagtcagggcagagcaaggagacagaggatcttttttttttttttttttaaagattttatttatttattcatgatagttacacagagagagagaggcagagacacaggcagagggaaaagcaggctccatgcagggagcccgacgtgggattcgatcccgggtctccaggatcgcgccccagaccaaaggcaggcgccaaaccactgcaccacccagggatcccagagacagaggatcttaagcaggctccatgcccagcttggagcccaacaagaggctcagtctcatgatcttgagatcatgatctgagccgagatcagagtcggatgcctgaccgattgacccacccaggcaccccatctcttctacagttcttaagatggctgtcaggtccatccaaatagcttttctgcagtccttgcttttggaagcaatataaaaaacaagtattttatttataagcatgaatggcagagaatgtatattagcttatctattttggctcagctttgcttccgatcattagaggcccactaaaataaattgaagattgtaaattcacattgttcctggaagatctctccacaggatgacatataattcagaattcttgactgtctcatcatgtagcaaaggatcttgttggaaatgcatcaaatcatacaccacagcaggggaccaggtgccaaagaaaatggaaaatagaaagaatggtttcatggcatttgcttctacatggcaaagctgatccatgctacgtagcttgaatccaacacaaccaccctacaaactcaactgggtcttctgacttgatgtggctgattgaacacacacacatttgtctctgctcccaccagacatctcactaaaatgtaataaaggttttttaaaaggtaagaacctacaaagaagaaaacaaggaaactataaaatctatataagtgaataaatcaagatctggccagtaaacagattagcagataaaagaaaaacaagagtaagttcacagtgggaaaatcccaaagcagcctgattgcacgaaacagaaccccagaagttgtaaggaatgaagataacaagtttgtctgaacgtagggatgcaagagagcctggaaacatacggtgaacatccgtgtaagaagccaatagaaagccccagatcccccaactcgcttgcatggcagcatgactcccacagtccaccctagtgaatgctttacttaccggagggggagatgcagagaactatctgaaaatggagaatttaactaaaagtctgcatacaaaatggcaagacctccaggtcttcctgcaggtcagttctgagaacttgcagccagacttgctctcagaagaataacagagaaatctcctccagaacaactgatcagaccaaaaaaaaaaaaaaaaaaaaaaaaaccctacaaatcacagcagtagggggggttgctggttatgaagctattgtcatgtggcttcaatcccactcatctagtccctcctttgccagctgttccctcttaggcagagagagccctcagggttggaggcagaagaagggacttgctccttcatgtttttttttttttttaagattttatttatttgagagagaaagagaggatgcttgagcggaggggagacacacagagagagggtgaacagactccccactgagcagggagcctgaccctggactcgatcccaggaccctgagatcatgacctcagccgaaggcagaccctcaacctctgagccttccaggcacccctgctccttcatgtttgctccccagtcctgtcaacacagcacagcagtaacagctggttccagtagcaggcgctgctcccaaggtgtagttcttccacactcccagcatgacccatcacaccacctcacagacaccaacgctggggctcaggccccactcagaggtctgacttccagctccacctggcctctgctccaagattctactatttcatgatcccaagcttctcccatgattcttcagcctgtctacccctgtggtccctctttgctcctttttgtctttttggatctcaatatatggttaccagttctttacataaaattatctgtttagaggcgcctgggtggctcagtccattaagcgtccaactcttgatttcagctcaggtcatgagatcaagccttgtgtcaagttccacacagagcatggagcctacttgagattctctccctttctccctctctttgcccctcccccctcactctctctctctcttaaaaaaagatctatttaaatatatggagtttttttctttcacttgactggaccctgaatgcagggccttctggagaaacccaatcacactatagtgaagcccactgaaaaaacccaccaacacatgttgttatcaaacagcttaacctacgagccgaagattaccataccagtcaaggtccaatcaggaaacagcagtcaaagccctaatttgagcagggtgagtttaatataaagaattattgacttgtaaggaggagtaactataaaaacataaagagaacctaaagcatacttttgggctgaggaagcgtaccgaaaggatgacaaccaggaagggcatctcccactccaaagttggattcagacctccttggagaggacgtggttgagccccttgtgtgacagataatctcactgggatgcccaggccataacagttgtgagaaggcaggaaacacgtcttcggggtggaacagaggcacctagagttgggcattaggagctcactggctgcatgcaaagtctggggcatgcactgtacctgccaggactagctcctcaaggaattgcacactctcagcatgtggctgagctggagcccagtgcgtgtccacaccagaaacactgatgggttgtgcagctggagctgcaagaatcaaaaactgcagcaactcggaaccagaatacgcttcctcccacaacgtccctcaagtgccccctactgacaaagcttaatcttgagcgggctgcaaagaagaaatcagagctcaggtaagaggatgcattctcagttgagaggaaatacactgataaccagcatagtgaccatttcgtgccactaaaatgaaagagggggattgagcatacagaaattgagaaacttcaaagagacagagacaattcaaagaactaaaaataaaacccacaatattttcataaaaataagagatactgtctccatgaaaaaatgaaaggctatgaaaatgaacagttagagatctaaaaagcagcatttttaattaagaatgtgattccaggggatccctgggtggcgcagtggtttggcgcctgcctttggcccagggctcgatcctggagacccgggatcgaatcccacatcaggctcccggtgcatggagcctgcttctccttctgcctgtgtctctgcctctctctctctctctgtgactatcataaataaataaaattaaaaaaaaaaaaagaatgtgattccaaaggcaaatatgcccatagaagtgttagaatttaaagttgatgaaatctcctaaaaggaagcaaagaataaagaaattaagtgatacagaaaacatatggaaattagattattaatctggatgaataacaggatttccaaaaagagcaaaggcagagaatagaaggaaggaaattatcaaggaaataattcaagaacattcctcagaactgagagtcatcaaattccaaactcagagagaaccttgaatatctagcaaagtgaatgaagtcaaaagcatatcatcatgagtcctaaaaatgttagggacaaagagaaaaactccaaaagtcttccaattgtttacagagaaaaaacaaaaaggataaagactcagtcaccagtgacaagtcaacaagtgacaaaggaggctatatataagacaacacagcaatgctttcgaaagtcagatgcaaattttgcaactgggaattccatcttcagaacaattattagccaggtatagcagtgaaataaagacatttgtagacaaagtcttaaaaacttctctctctctctcttgcccttacctcagggagttattggagtgtgtattccaccaaggtgaggggttagatcaagaaaaagacgtggtggggtcctccatagagtgaggtgggggcggccccagtggctcagcagtttagcgccgcctttggccccggggcgtgatcctggagacccgggatcaagtctctcgtggggcttcctgcatggagcctgcttctccctctgcctgtgtctctgcctctctctctctctctctctcaataaaataaaataaaataaaataaaataaaataaaataaaataaaataaaataaaatcttcaaagagtgaggtggttggaaatcctggtacgatactgagacattccagaaggcagctatgcaggagacctaggaatcgacaggtccagattgaaacaggattctggggccaaaccctcagaaataaagaggattcctttacttggctgaactcaattatcatgcatttgaatagagagaaaaactacaccgttggagaagaatttggtgacaaatcagtgataaaatcctagacacgcgatcaaaggaaaacctagtagatcaatattgtcctggctgactaccataagggtcagcttagaacctgctccttcagcccttctaaggttttcaaaagctccaaatacctttcacaaaattccttcctgttttatatacctggatgaatctctatagcctgtactgaaacccagctgatgcaactcattattaaaaacaggaagacaaggacacctgggtggctcagtggttgagcgtctgcctctggctcaggtcctgatccctggggtcctgggatagagtcctgcatcgggctccctgcgtggagcctgcttctccctctggctgtgcctctgcctctctctctctgtatgtgtctctcatggataaataaataaaatcttaaaaaaaaaaaaaaaacagaaagacaaaagccaattgagcactgcactgtttgcatccaaaagagagaagctgggaaaggctgtacgaaggaccacagctttttgttgttgcatagcatttttgtcttttaaaactatataatgtttaagtttggtaaaaatttaaaatagtcaagtaaacaaaaactcaggtgggagataacatacggtgaagcactaagacacactgagtttaaaagaaaacacttcacaccatctatgcagactgcattttcttttaaaaagtggcatctgaggggtacctgggtggctcagtcaattaaatgtctgccttcagctcaggtcatgatcctggggtccagggattgtgtcccacgttggggctccctgtctagtgaggagcccgcttctcccgccccctgtgcccctccccactgcttatgagctctctctctaaaatcaataaaaaaatcttttaaaagatggcatctggggcagccagggtggctcagcggtttagtgccgccttcagtccagggcctgatcctggagacccaggatcgagtcctgcttcgggctccctgcatggagcctgcttctccctctgcctgtgtctcggccagtctctctctctgtgtgtgtctctcatgaataaataaataaaatctttaaaaataaaaaaataaaaatataaatataaatgatggcatctggggaaccctggatggcgcagcggtttggcgcctgcctttggcccagggctcgatcctggagacccgggatcgaatcccacgttgggctcccggtgcatggagcctgcttctccctctgcttatgtctctgcctctctctgtgtgtgtgtgtgtgtgtgtgtgtgactatcataaataaaaattttaaaaaaataaaataaaataaaataaataaaaataaaaaaatgatggcatctgaaacattcctgcacctggaaaatttacaagtatgtagtagggacacagtggacttctgtcttcatttatcccttttccctagtatcttaagattggcatcctgactttttttgtgaacatggcacattgtgctcgctttggcagcatatatactaaacatggcacctcctatttcttacaaacactcaagtaaatttccaggccccacattccccaccattccaactgctgttctcctctctgatagctcatacccctgcagaaacccagggctcccttctccttgtgccaatgaggctgccatggtcccaatttagcctgtgcccctgggaaccaaggagatccaatagagtttcaatcgccctcagccttggcttgtgcccaggagataggcagctgctcctgaggtttcagactctcaagtgactcagctctccaacttgcaggggtctgtgcatatgctctcctccacttcatcttccagaccatgccagatgttggtcaagtcttcaaagatgagataaccgatactgatgtcctaaaatcctccaccagctgctggccagttgcaacagcctcctggggttctgagggagatacttgtggcagaccctacagccaaaatcactccttaaggctggtgccacgggaatcacttagcaccagcccctgctggtgaaggacacttagcccttctttcagaagccagaggacacggaggagtcagggcacatgtgacaggtcaggcaccccacaggcctgcctcctctctaggcagtcatcgggatcacacgtgatcgttggtccagctcattacgggagggagccacgacagagtttgggcccaaacctcaggaatagagtcccttttcctgggtcagccccaggctcagtccgatgccttggcctctggcgagaagtgaaggaaaacgggaccatgtggggtggaagcaggcgctgctgcagctgcctgcggctcggctcgggaggcggcgtccccgggagaagcggggggggggggggnnnnnnnnnnnnnnnnnnnnnnnnnnnnnnnnnnnnnnnnnnnnnnnnnnnnnnnnnnnnnnnnnnnnnnnnnnnnnnnnnnnnnnnnnnnnnnnnnnnnnnnnnnnnnnnnnnnnnnnnnnnnnnnccccccccccccccgctttactggctgcccagatgcgccccacggggcgaccccctcggagagggtccccgcggagcacgcccccgggcaggggcgagcggagcgcagggccccaggcgggcgccccccggaatgctcaccgcgaacgtgtgtgagcgcgggcgttcggcccagcctatggaggcgcctgagaaggagaggtcggagcccgtgggcgctgggcttgctgtcgtccgtgcgcggggaagaaatccgagggtggaggaggtcgggcgctcaggtctccagtcggagaagagaggccggtggagcggctttaggtgtccctgtgagcagagtcgtagggcaagtgccaagaccgcagagacctggcgctggacgctgggtcaggggcacagggaggggaggaggacgccgagccctggctcggacgtgagagtcgtgggcgcacaggtatccaaatccgagcacagctcgggcgcctctgccgctgcggccgccttcctgctgcgggcgctacgggaggtggaggcggaggcggaggtggaggcggaggcggaggcggaggcggaggcggaggcggaggcggaggtcgggcggccctgctctggcggaggagtgcgagggacaggcaggcgcgcaggggccagcccgaggagagatcctgatgacacgcttggcggtaatggcaatggcaggcgttgtagatccgtgtgaatcacctcatttaacccacacaagggggcagcccaggtggctcagaggtttagcgctgccttcagcccggggtgtgatcctggagagagtcccacgtcgggatccctgcacggagcctgctgctccccctgcctgtgtctctgcctctctctctctctctctctctctctctcataaataaataaataaaatgttaaaaaaaaaagatttaaaaaagattaatcagtattaatctttcccccaagccaaacatacttttacttcctccctcctcctatttccccccactggaacctcccaacttcccaagttttgtcaaaatcttctgaaactggactctcctgtggttgaatagcagacagaggaggaggaggtggatgtgaagcaggagcaaggcctcaggatggccacgggcttgaaggctgggcaccataggtgggctggacaaggggctggtgtgtgagctcatgaagtcattgcttctgcagaccctctctgagtcccactctgtgaggaggtgggggaagaggaaggcaaaatccagagaggcagtggccacacagaaatgaccttcagcgcaagttccaggctctgcagcagctgataattgagcaaggaagtgttctgactagaactgactttttgtgtgtctattaaaatacacataaaacttactgtcttaaccatttttgagtgtagagttcagtaatattaaatccatttacactgctgggcagttgtcaccaccatccttccccattattcttttcatcttcaaatctgaatgcctgtctattaaacaatagttcccactagcccctccctccagctgagaggatgagctggagaaaagggagctcgtgcgtataatatcaattaggacattactgtaactacccaggcaagaggccatgaggatccccatgagaaacaagaaacagaaaacaaatttaataattaaacaaaagcacctccctgtacatgagacaggcaagataccagccctgcagaggagtcatttcctgtcagggtgacttgcctggctgaagtcatcccctggcaaatgtaaagcaccttaacttactgtcagtgctccaaacagcccttttctgcacccatttctcatattactgaaggtccccagatgctcaacatctatctcttggggcacctggatggctcagtccattaagtatctgctttaggttcaggtcgtgatcccagagtcctgggattgagccccacatcgggctccagctccatgggaagcctgcttctccctgcttctgccccctctctctttctctcttatgaataaataaattaaatctttaaagagaaaaaatctatctcttagctcattcatgccattccccttttgttccttctccatccagagaaaatatgatcctgttactcccctgctttaaattctaaattcccatggtttttcagatactgataaggctgccataacaaagtaccataatctgagtgacttaacagaaatgtgttgtcttaccattctggagctagaagtctgaactcaagttgtcagcaggattcgctccttctgaggcctgtgagggaaaatctgttccatggctctctcctagcttctggtagccttgggtattcattggtttgtagatgaccttatccttgtgtatttacttttcttccatctgtgtgtacttgtgtccaagtcccccttcacctttctaaagattttatttttaagtaatctccacacccaatgtgtggctccaactcacaacccaaagatcaagaatcatgaactgaaccagccaggtgctcttcctccttggtataggagcacctataaatgaggtcctgatgacctcattttaactcgattgcctctgtaaagatcctctttccaaataagatcatattcttaggtactggcagttaggacttacacatatattttttgggagacatagctcaatccataacagggttgaatatggtctcaccccaaatgagtatagctcaaacaggccctaccaggtagaaatatccctgagcacttcattctatcccagtctgatgacttcaaaatctctgcagtgaattggctcccaatcctagcctcggtttacctgaatgttgcctaattcacaccctctaacccttcccccaacctacatgagctttcacatgtgccttcacttcattcttccacacaacctgtccagagtatgttcccctcccttagtctcggtgatgttaaaatcttcatggttaatggcacgcatatctgataaaagtaggaaacaataaatatgtcatgttaagttagcgaactcaatgtaagtctatctaaaaactggccaacacatcagggaaatacaaatcaaaaccacaatgagataccacctcacacctgtgagaatggggaaaattaacaagacaggaaacaacaaatgttggagaggatgtggagaaaagggaaccctcttacattgttggtgggaatgtgaactggtgcagccactctggaaaacggtgtggaggttcctcaaagagttaaaaatagaccagccctacgacccagcaactgctggggatttaccccaaagatacagatgcagtgaaatgccgggacacctgcaccccaatgtttatagcagcaatgtctaaaatagccaaactgtggaaggagccccggtgtccatcgaaagatgaatggataaagaagctgtggtctatgtatgcaatggaatattactcagccagtagaaatgacaaatacccaccatttgcttcaacatggatggacctggagggtattatgctgagtgaaataagtcaatcagaaaatgacaaacattatatgatctcattcatttggggaatataaaaattagtgaaagggaataaagggaaaggagagaaaatgagtgaaaatatcagtgagggtaacaaaacatgagagatacctaactctgggaaatgaacaaggggtactggaaggggaagtgggtgggtggttggggtgactgggtgatgggcgctgaggggggcacttggtggaatgagcactgggtgttatgctatatgttggcaaattgaacttcaataaaaaaaattttttttaaataaaaagtggccaacagaggaggtagcattttttaaaaagattttatttagttatttgagagagagagagcatgcatgtgcatgagaggaggggagaggcagagggagaatcagactcgctcctgagcagggagcccaaacccaagaccccagaatcatgacttgaacagagaaggcagatacttaaccaactgagccacccaggcatctcagaaagtaacatttttaattgactctcgtatggacacccaacaccttgcctttcttcaaatactactcttacctgaaagaaactaggaccccttagaatgcaaggcttggatgataacagattccatatcttagggaagagaagaatcaggacagaacttgaatgttctattattaccagaaagcgaggatgcttcaagaatagcaaggaaaggggatccctgggtggcgcagcggtttagcgcctgcctttggcccagggcgcgatcctggagacccaggatcgaatcccacatcaggctcccggtgcatggagcctgcttctccctctgcctgtgtctctgcctctctctctctctctctgtgtgtgactatcataaattaaaaagaaagaaagaaaaaaaaaaaaagaatagcaaggaaagtgttaaaaaggacaaaggaaagtgaagggatggaactcttcaataaatggtgttggggaaactggacagcaacatgagaaagaatgaaatcgggctactttctcacaccttgcatgaaaataaacaaaaaatggaacataacactccttgaagaaaacataggcaataacccaaagaaaatgaaacctctgacttgaaaaaatacatgtacccctacatttactgcagcattctttacagtagctaagatatggaagcagcctaagggtccatcagtagatgaatggataaagaagatgtggtaaacacacacacacacacacacacacacacacacacactatggaatgttactcagccataaaaaacaatgaagtcttgtatttgtaataacaatgatggatctagaaggtataatgctaagtggaataagtcagagacagacaaatactatatgatttcactcatatgtggaatttaaagaaaaaaacaaatgagtaaaggaggggaaaaaaaagacaaaccaagagacagactcttaactatagagaacagctaatggttactggaggggaagtgggtaggggaatgggggaaacaggtgaaggagattaaatgtacccttgtcatgatgggcactgagtaatgtatagaattgtcgaatcactatattttacacctgaaactaatataacactggtattctgttaattaaaattttcaaaagaggttaaataaaaaaaattaaaaggacaaaggagtcaacttaaaggagctctcattgttcacctgaagacagttgaacctgagaagaaaggatgagaagaaaaatgataattggggttcattgaattaaattaaggctgttgaatgctgtgagattttacaatactcaaagataaaagttaatataaagtgcacaaaagatggcttgtaatagaaaagaatattctgaaaattgattttaataaaaagggaattgttcattttgtctcttgtatcaattatgtgtctgtttatgaagcagagagatgtgcactttcatctaggtaagcagaaaagaattctcagaaagccaagaagccccactgtaaatatgagcttggcagaaatgagaatgtctgacaaggggtggggtcagacgcaacaatgaaagagaaggtggtttcaataggaaaataaatcaaccaaaacatcactgaaaaagagagctaataaagtcaagccagttagatccttatcttctagaagattctagatcgccctgctaattataacaaaatataaataaagaatgcatcagatttaataatgctaacagatctagtcagtatatcataatgagaggaaatgcattatgcaacattgcataatgtcaagagagatttgttaagcatgttatattaaggagagaaaatggattgcaaaattctaaaatccatgcattttgaaagttttactcatcactgagatacaatttcacatccatagtcccggctatataaatagagtaataataagtgctgacaagaacatggaaaacttggaaacttcatacacagctggggggaatgcgaaacggtgccatgggtttgcaggacactcaggcaattcctctgaagggggaggaatgtgagcagaaagagtagcagctcatactggttaccaacagcccagatttgaattgtaagctgtacaaccagcctcacttccagcccaagtccaggtagtcaaaatgcagatcctaagattattgaaacctcagggtgataggaaaataaaacatactgatgtcctagaaaggtaaaccaagaatggaagagtaaagagaagaatgaagaagtacatttaaatccatagaactagctttctgatttttagtggaaatgaagtgatcagttttataatcgttaaaatttgtgcacttgtttgctttattagggatttaagatatttaagagcatcttatatatcagacatatgattttcattaaatatataaattagtctagggatgcctaggtggctcccaggcatccccttaaataaatttttaagatgtatttttatgggtggctcaacggtttagtgccggcttcagcccagggtgtgatcctggagacacgggatcgagtcctgcgtcgggctccctgcatcgagcctgcttctccctctgcctgtgtctctgccccaccccctctctttcatgaataaataaataaataaaatcttttttaaaaaagatgtatttttatctcataaataaataaatagtctaaatgtgaaccaatattaaatgtctgcataaatttggtttattaaaccataagtttttacaccgtagttgtgtaaacagcacgtaagcaggagagtgtgttttgatgcttaaatatgaattgtttaataaattcataagggtaacaaactttaaacagaagtgcctttttttaaaaagattttatttatttattcatgagacagagagagaggcagagacacagacagagggagaagcaggctccatgcagggagcctgatgtgggactcaatcccaggactccaggatcaggccctgacctgaaggcagacgctcaaccgctgagccacccaggcatccctaaataggagtgcctcaagtcctttagacaaaggcagtcccaggagtggagaccctgtagttggaagctgggagacaggcaggtaagggtgcactaacaaacaaggttggttttcttcctaaactcatcacgaacagttagctcttctgaattcagcattacagtgtcccagtgaacagggaaccccaaagcaatgggtataaggagaggtgggtttgggtgggcaaagtccagtgcatgggatgggcagtcagacccagccagaggtgagaactgatgggtggtcctgggaagccaggagcagtttgagcacaggagtggagagggaggggtagcgggaaaatgctacaggacacagcttcccctctgtcagtcatgagtgccatgctgaggccaagaaggacgaaatggcctggaaactctttcacaatttgtttctcccacatttccacaagtgacgcttgcctaggtgggcaccgcctgggatcaaaacttatttcacatcagcacagtctgctcctttagaatgaacaactcccagagcagagcgccagcttactagcagcttgggataaaccatatccacccccttgatctctgtctatgcgggcctggaaccaccctagagcagccattgctcctgagagcgtgaaggtggctgttcctacatagccacagccacacctctgagacctccctgcatcccactaccccttcactgaactgtacctcctccaccaccaggatgctctgaacacggaaggcctggtgtgtgaccgaaattcctggcagctcgtgtgctcactctcccgtgtgacagtatgggttagtaaagatgtccccagggtgtgctcaccagctttccgcagcaaaagggaaacgctgacctagaaagagatagggcaaagataataggggacgtctttccaaccgaataagagaaacacaagaggtaagcgtttgatctagagagagaaagaaaaccaaaatctaactgccggtcttcaggtgacatgaaaagatgggtggatgtggatttgttggagaaaggactaaggtggccaggtggctctgggggctagagaatctctcacctgccctgtgcactctgcccacctgggtttgcagtttctaaagggtaccgtgaccatgctccactgcgtatcggctatgtgacgttgggcaaattacctacccttgccgagcctaaggttctttgcctggaaggtggaaataataaaaccttatctctttatttactactttatccaagcacatcctacaattgttggaacagaaataaccctgcaacacatttcgtctgtggtaaatacacaataaagaggctattcctattaccgcccaacagtatgtgtgtaagtcaagaacatctgcctgaacaccgtttgtgaaatacttaaataaaaagccaactctcctttctggatcttggaataattcttgagtgtaattcccattgggaagcaccacgccagccccagccatcaactgtgaagtcagctgcggccacgtctccagaccagcctcctgctggggcccagagccgtccttctgtgcggtctggccaggactgcctcggagggactgtggaccgcactgtaatcagtgctttgcagtgcttgggtttctcagtctctcctgcactttgtcatgatcttaattctaccagtcaaacaaccctgtgagacagatagcatatctgcttttcgtgctctttagagatgcaaaactaaggtccacagagttaagtggcgagctcccatgacagaggccatgtggacacacagaggggaacctcgacctcctggcctcttaacgggtgcacttcatgccacagcaccttccttcctaggagcagggaaatgacgcctgctactccagccaccacatctaccaatctaccaatgaatgactacaagacgcagaaaactcattacactggcagcaactgctcctaaaaaccttgggaccttcatcatgtcaccaattactgacttttccctgtttagttgttctgttctttttaagcaacagctggccataaggctaagaccactcaagtggggctggccgcaggtaccctgggtgaacctcactcccttggctcagtgttactctgtgaaaaccctggctctcttccctctctgggcctcaggatctccacctgtgcagtgggccgagcagtgcctacctgatggaattgtggggattggctggaggggtatgtgtgagagcaccctatccagagtctgacacatagtaggtactcaataaaagttaggtgggtttttgtttattacatattgtacttgaacactccctgcacggataatgagaaaaattcggttagagtcactgactctgtcacttgttagctacggaaccttatgtaaattgcttaagctggcagcccgggtggctcagcagtttagggccgccttcagcccagggcgtgatcctggagtcctgggatcaagtctcatgttgggctctgcctctgtgtgtgtgtgtgtgtgtgtgtgtgtctcatgaatgaataaataaaatattttttaaaaattgcttaaaccctccgggcctcagtttcttcatcttataataccttcctcacagatagtaatgagggtcaaatatggagtattcagagcattttatgagctgagaagggctatgtgaggtttgtaaggaaatgtcagagaggctctgggaaagccagataggagtacagattagactcggtacgcagccctgtggctcaggaaaagatagaagagagaacagggagtcagagagagggttccttgatccagccttggtccagacttgctgctaggggtgaagcagtgaacaaaatagacacatggtgtttacactctagagagtatggggagcagaagaggagggtactgacttggaagtcagaagtgcaaccagaaaaggggacagagagaactgagaccccaggcctgaaagaatgaacttggatttgtgggagagacaggtgctgaaaacagaaccatgtgccccaggacagggagaaaccaagagtccaaggtaggaaagaattgagggagcgaggttgaggtgatgtggaaggagtgtggttggtgatgggaagctgtcctaagaaggaattcctgacatagggaggagtgtagtagtagacactgggatgggaaaactttctctgagaacacccacctctcaggcaggcagctccccatccctccaattctgatatttattcttctcctacttcctcctcacaacctgaccaattcctatgacttggggcaatccccaagctatctgagggtacacgcacctggatcactctggtgaattacatgcatggcatagggaaagacatggcgtagccgctggagtgtgcccttctggaaagcccttcacctccagatggctcctgctaacttccatctgcacttcttacaatgaccatccccacttcactccacctcctgtacgggatgctgagctccagggaaaccaaagagtagcagagagacaactacgtgaccaaaagaggagactgtgccatcacttgggaataaaagcagcaaacgcagctgcaggtaggatcgttgactccaacgggttcgcccccctttccttctcccttttacttcattcctttattggagtctactattcattcagcaaatgttcaaagtcttggttctctagggcacaatgtgccaagtgatgcgtgtaagggaggagatcaatgcatcctctgtttctaagaggcttacatttctgaggaagaaaaaataagcagaggcaaatgactttctctgactctgtttctctgcgaatcaaaggctattcatttcccacttggccctggtactaacttcttggacctcatccttctcctcagccacaggtaccatctcagttggtcctgctgcccctcctcccctcttcagatttcaggacaattctagagccagctctcccacctggctagggtgagagcatggagctccaccctcaaacacctgggctttgatcttctccaaaggatagacgacagcaagagagcatctagagaccctggagagacaggagggtggctagaaaatggggatggacaaaatgcacttcactttgcacccagaaacaaagacactgcgaaggagcaaatttaataattgcttgtgttttattggatatcagcatgaggggagcaggggaggcagtaaaaagtagagaggatgctagaaaacacactcattgaatcttcatttagctcacactccattcttttgatttccaacttagggtgttcccctctgtcattctcctaaccccactgtgacccagggtttggaggactgaggaagccagctgggatgttccaaacagagccagtaggatgaagaactctgggaggaaattaattaatacctgggcgtagatgaatatttccccagctgcctcctggataccggttaacattcccccagctagtacctggataccggttaatatccccccagctagtacttgggtatcgattattgataccccagattcccacagagtgtggcatgagcctggtgccccatccagttccaggacctccacttccccaggacactcctggattcagggttccccaggggtgcccaggcataggtggctgtcgaatcctgttagtaagagaaggtaggtttcgggaaggatttctctgtgggctcccagcacattagaatggagtggctgtctaaacttagactcctggtagagtgaagcctcaggtatggggcctgcggaatgtgcagagggtcctgcgggcaagaaactgctgcccagagtgggggcaatggcaccagaaaggaaagactgtttttcacgcagcacttcacctatgtggtcctcaatggcagcagccatcatctgccaaggatcctcagggggccaggaatccatggagggcagtctctcagttgggggccacctctgaactccagaacctcctgcaggtaggaagccatctgatggagaaacgttgagcttcaaaggaacccttgttaaatcatttggcccagggtctggtttggactgaggaagttcagagttggagtggctggtcaagtaaggttgttcaagcagaggcaagttggctcccacgtgttcgattactttctcctccactgcaccaatgcttcggccaaagaagcctgagggaaaagaaagaggaggccacagaaggactggatatttggttccaatgcccaccttggattctctttgctccaaattccttcattttccccaaggacccaagggaccctcttgcctttacctcttccctcaattccagttcccctggagccttccagtttccacctgtgcaaagggttgggtacaacctccatacctgggagatgaagacagatcagaagaagcaggcccagaggaactccgctccctgccatgcagccctgcatcttgctcaactctaacatctctctctctctgccccaagacagccaaccctttatcctcttggtggggtgagggacagcagaaacaagctgagccagtggttgtgcagataataaggctgtacattccactctcattcctaattcagtctgtggcaacaggtgccacttgaatgtcctagggaagctgggtgtgtccaccccggtttctttcctaaagttccccaccccttcctgacccaggtgtcctggttcactgctggtcactgattgccagccctgccctgcccactctggcttcctacaccaggcacaggagtatcttcaatcttggggtcctgatctcatcattgccttttcagcaatagaaacattcaattctctttactttctctttgggatccagatcattctcttccagcactcttttctcatacatcgccatagctcctttaccttaaccacaacctgtaggagctcaggagtacggaagtgccccacattggagaggctgctcctggataagatcttgtatgtaaggaataggcctggttcccatccttaagagacgatggtgtattaatttcctaccactgctataacaaccacaaccttagtagcttacaacaatacaagtttgttaccttacaattttgaagatcagaagtgggctcccagcacattgttctcactgggtcaaaatcaaggagtcaccaggactgtgtttctttctagaggctctagaggagaacccatttccttgcattttctgccttttctttttaaattttatttcaattgtatttgccaacatacagtataacacccagtgctcatctcatcatgtgccctccttaatgcctgtcactcaggcatttcctagcttttagaaaccacctgcattccttggctcatggtccccttcctccatgttcaaagccagaaacagaagatcttcttacattgcatgactctgaccttttcttcttcttcttccctcttccacacttaaagatccttacgattacacattgacccatccaaataattcaggataatctctctactttaaggtcagctaataaccttaattccatctgcaaccttaatttcccttcactgcgtaacctaacatattagcaggttccagggatgatgtggatatctttggtggtgctagggaggacaccattcagcctaccacagacggttaaatgggtccacagaatataagaaatactgagagggagtagacgttcccaactaataatagaggaagatatttaaatgctattgtcagggactcctgggtggctcagtggttgagcatctaccttcagctcagggtgtgatcccagggtcctgggatcaagtcccacatcaggcttctctgcctgtgtctctgcctctctttctctgtgcgtgtctctcatgaataaattaataaaatctttaaaaataataataaataacaaactctgttgtcaaatggccctgaattgataattgttgaatctgtgtgtgggagcatagagattcattaattcttttgtctactcttaaatatgtttgaaatttttacaataaaaagtgtacaaatgccttcattttccctgttgcttccaggaggcacccagactaggcttcctggttacatgaagtctaaaataagctgttagattttccttttccatcctcatccccagctccagattgctagctactggatgagtgggaagcttttttccagaactgggcaggggagggcagtgtcctttttcagtgacatccaccagatttgcaaaaatttttgaccttgaccataccagagactaaagactgctgactaaaggaattcccacatcagagtctgtatccttcctgtaaagcctataattggctgaaatccagggccagatgcctggccaagtgtgactcaccagtggtaacaaaaacaggactattctgcagcctttctctgtcttcaatcaaccctgcaggttggctcagctgccaggtcatttttgatcaacaatagatcaaaatttgggaccagttaataccatccaataggagggaatagattagatcctagggtagggataaattcctttgtagtcaaacagaggttctgagaggtagccttgctttggggtgaggcccttcctaaagggacaagcatagctcactctcctgtccttgggtgatgagaacttccttggcctcaccgtctcactaccactgcctcaatctccaggacacagtttgcctggcccttaccaccctctgctttctctctcttctcctatggaggccactctccttctccactatagtgctctacctcttacctcccataagtctctctctagaactgcagaagtagcagcaaaagtgtggaggtggagaggacacctggctctgttctgccataggctgtggcatttttatgtaggctagtgagtcaccgtgcttggctacactccctatcatgctaccatcctctctgtcttttattctctccacccgtagctcccagaacaacgcccacctgggctcccacccagtcaccaggaatctgatctggttgttgtattccagccttcccaaggttttccaagtgtcccggaaaaccaggaaatcaatgctcagattcctagagaggatggcttctagtaagtgaggcaaactaatggtagagaagtaggaacctgcatggggcgggaaagggaataattagggccctatatagggagagggaaagacctcaggtgaatggggaatagagacagaatggatttcctgagcagtgagagagaaaagaaatgggaggaaggatcttggagaccagcctctgctttcagttaaacaaatatttattgttttccctttgtgggtgtagctataaagtataagagaaatactgttctaacttacgagtgaaaatgagggacatggggatctctagagatataagagagcaccgtgcaggtcctaaggggagacccaggactccgtgcaggtcctaaggggagacccaggactccaagtcctaaggggagacccaggactccaaaagtctccatctagttcacacagtttattgaaccatctgtccagggtccagagagagtgggcgtctactccagtgtctgaggctcccctggtgtctccctcacacagggaagcatctgagcattgaaggaagtggcagccaggaaggggttctgagacagagaccttgagaggcaagaaggaatgttaggaacccacagagactgtagtgagctctatagggcagggtgggagtggaatcaggagtgtgagaaccccatggcattggttaaccagatagatggcaaagagatgtcagtgaaaagtggtcattgctttcaggcaacagtttggactatgctttatttggcaaataaagaaagggggaggacgacttgtccaggaaccagagttactatgggacatttcaggggtttcccagtcaagaatctgaatgggaagggttagctactggattgtaccatctcaaagacatgacagaggaaactttagagaatggttatctggcagggagggcactgtagtaccaggggaatctaagcagtaggagagaatgagaaaagggatttggagtctacaattttgggaagtaaagaaaaaagaggtgttacggggcgtctgccatattagagcaatgaaggaaatagagcagctctcttgggaaggaggagggaaactgagctaaccccatgccggcctctggactcccaactgagatgtgtttgcgtgtgtgcccacacatgcatatatgcaaaagctaacttatggactggtaagtgactctccctggggtaggaaaacttcagggtcggctagctggggccccagaggcttcacttgggccagaatgtcccggatactgcggcaggggagctttccagagccgcaagacttggcaccagctgaaggatcaggttgaggagaaccatccggacccccactcaatgttgaggagacagaaatgcaagggtgaccagaagaactggacttgctgccgcagggctgaaggatgattttgccactggattgggagctggagctgccgccaaaggtgccagtgcctggtggggaacagggcccctgtgaaacaccaccacagggatggaaagatgaactactggaaacactagaactactgtggactccagaaccagagagggagcagggccccttagagccacctccacagggctggaccccaccagagcccactggctggaacacaatggctgaggaagctcctgactggtagatgctggaactagaagagctatggctggggatgatgggattgctggagaagtatttgccctcagagatggggggcccagctgcaaaggaaggggcgcctggagagcctttgacagggttatctttggtgaagtagcccacagggtagattttgcccctactgtaggtcatgcctggcaccaggtaactgtcagaggagccacccaccacctcatagctgccataggatttgtctacagaggttatgggggggcagggcttgcccggaaggccaccagtgctgcagggggcaccttgaacccctccagggccaccagagccatgctgctccaccactaccaccacaggcctttgacctcctgacacggagtgggagctggaaatgtaggagccagaatgggagacaataggccccccactgcagggagagtcagggacatctgaagtacaggggcgtaagttgaccctttggccaccgctgctggatatccaagagcttggggaagcggataagctggagcctcctccagactgggaagagctgatcagtaaacgggaagaatcatcactgattggtagggctgagccagcccctggctgggcgctgctgcttcccgactgggaggagctggatccggaggagtagctgatctgggaatacccagttcctggcttaaataatgaagatcccaaagaaccaccctgggcgacactggatccgctggagccaccactggagccaccggaaccactaaggccaccgctggagccactggaactggaactgctggaaccgctggagccactgtggccactgaagctactggaaccactcttcccagttaggcaggggtcactgggggaggtgatacgcgtgtccttgcaggggtctgagagggtcgcgatgctcttagccaaggcccctggggaggaagtagtggttagtaaaggcagaatggcttggcctcctccctcagcttccaagcccgctctgtcgctctgtcttctgcttgggatctctcctgggagggacctgggaagagcgtggggtggcgagaagtgctgttgtctgttaaggaaaatgagtcagcagaggaagggctgtttcggtggaggcagggacagggaaaatgagactccaaaggaggggctgtcaaaggaagagaagaggggaccaagtggcaggggctcataggtccaagggtccagaatagaggcagggcatgggggagactgctgctcctcaagagggcacctaaatcccgaggggaagagtcccaggtaagactgagggacccaggaaagggggagacaagacaaaacaataagtggggaaaggaaaggaatacggaaagaaataagcggggaaggaaaggaaaggtagcaatggagatgtgaggaaagaggcatccaggggctgggggactgaggttagggttcgggtgctggaggactgagattccatcaccagccaccttgagagagtctgggcttgggcaaagggtgggagctctgatcccatctcagtgctgccagtgccaggaaagctgggcgggggccgggatgtgggggcaccgccggtgcttcagaacctgccagttcagcgcgacaggacaccgcacccaagccagccctgggtcctggcccagcccaggcaccctaggaggaaacctccaaggctcacaaccagcatccgcttccctctctccgcacccagccatcacacatgccacctgcccccggggctcccacccttaggtcctggcaggggtgagaccacttctttctgttaccaaccctgtgcctctcctcccaggctcacctcaccctatccttcctctgctccccatctcaactcctgcaggtcctgagcaagttctaaacctctccgaactttagtttatacattcggagaggccgaatctgtccccccacaagcagtgcctgtgatgtccccatcctctccccaaagagaagtcctgtgtccccctccataccaaagccagctctgtccacagcccccctcactcggcagcgctgctcacggagaatgcctcctctcctcctccgctccggccacggcccccgaccgggcaggctcaccgctcacctgctggtccacggcacaaccccagattggattccggctttgccactttctaagttgtgatcttgagccagtttcttttcttttcttttcttttttaagattttatttatttagtcacaagagacacacagagagaggcagagacacaggcagagggagaagcaggctccgtgcagggagccggatgtgggacgtgatccctggaccccaggatcacgccctgagctgaaggcagacgctcaaccactgaaccacccaggcatcccttgagccagtttcttaacctgccctagcctcagtgtcctcactggtacagtgggaataacgaatctcatacagtgctgatgatcaaaagtgctaacgtgaagtgctaggatagtgtctgacacatgaaaagtactcagtaagtggtagcagttattactattaaaatccggtcttcatcttctagtgctctgataattgacaagagcaataacaacagtaaccaatagttatagaactctctaggattcccaaagcacttgtcacatacattatttaatttgagactcaggaagactagaggtagtctggttgtagagtttcaggaagttgaataccttgcctggagtgacaaggcagggaggagcagccctcagactcaggcatcagatgccagagcccatgctctatgcccttgctgggtcgtcttggggtttctccctggatggtgattcctcccagctcccagcacccagagcactggaaccctccagcctcctgtgacctggtgtctgcatcctgcctccgccacagctccccgttctctgactcccacggtcccagcctcctacctggcaggaggagaccagccagcagcagtgccatcattcctcgccctcccacatgcccctcctggggtgcctgcgaggagcccatcttggactgtgcagccttctaacagcagctcgtggacacccagggcctttatgccagggctggacattctccgggcaggagtcaccaaggggaggggtggggaggtgaaggggcaggtgcccggggcaccttggtgtggctgggaggagctcaagtaatcagctggggcatctgcctactcagcggcagaggtggctcggtgcggggtatccgcggccacggggcctccaacaatcctgccttccagcccgctgacgggcctgcccatggctcgtcattgcttcacctggaaccaggcactctgcccactcaagcggccactctccccacagacccagtcacctggctcctgtcccactccccatcctcctcccatgcacagacgtggacattcaactttcccaggtacccgctctggccccccaccactaccccatggctaaccccacctggcttcccgtccatggcccctggatctgcccctttccttgggatctgtccctcagcctccactttcctcctgcagctcagagaatctgccctgcacccccagaaccccctgtggtcactgtccgggtcgcatgcctgccacatgcctagtatgtgtccagcaatgaatgagtcctctccctcctacccactaggaatctgcactccgaataccagctccctgacctctcccttccgggggcgctcctgggatagggtgaggggtgctgggtgccagggccacagcctggggagaggcctgggctgggagcccctgtcatagctgggtctgaggttactcacaggccactcatggcctctcccgcacagctggtgaccctgactcgtgggcgtgagccagaagctaatgaggctaattgggaaggtggtggccctgcagaccattagctggctccctggcctggatgaggggacaggaagcagccagccctggtctgagggtggtgaaggagggtcaggcagaaggcagacttcagggtcccctaggatgaaaggcaggactggccgaccagagtcctgagttcagctgggagggaggccggtcctcctccatcatgttcccctcctcctgctttggtcctggccccaccccagccaattaattgctcactggtattgcccagagtatcagtatcggagggagaggcctgggaccaagtcaagctgcctctcctcctcctccctgcacccctcacccagactctcacctccatacctccccacaaagactgcctatgccccagccctgattgccttctctctctctctctctctctctctctctctctctctctctctctctctctctctcctgtcctgcctttccctccagcccagtgctgcccctaggactttctttgatgataggaatgttctgttctgtatctgtgctgccaaatactactaagcatttgaaatggggctaatatggccagcctaaggaactgaatttttctattatacttaattttaatttattttttaaatattttatttatttattcatgaaagacacagagagaggcagagacacaagcatagagggaagcaggctccctgcagggagcctgatgtgggacacgatgggaaccgtggaatcatgcccctgacagaaggcaggcacttaaccctgagccactcaggcgtccccttaattttaatttaaatgtgaacagacatgtgcagctagtggctaccatgtgcagctagtctagcccttgattttaccagcattcaaaatgggattgggaaggaagaggggccaggagctagggagacaggaggtaacaggacagactccccgaagagggttgaggcagtgggagaaaaacaaaaccactggcttaggaccaggatgacctgggtaggagtctcagttaacttgcctccggcaagtctcccaacctttctgaacgtcagtgtcctcctctgtaaaatggagatactttgagtcaagcctacctgacagggggtttgcgaggatcaaatgggaaatgagggatccctgggtggcgcagcggtttggcgcctgcctttggcccagggcgtgatcctggagacccgggatcgaatcccacatcgggctcccggtgcatggagcctgcttctccctctgcctatgtctctgcctctctctctctctctctctgtgactaacataaataaattaaaaaaaaaaaagaaagaaagaaaacaaatgggaaatgatcagaaagattcggtgaggctgaagatgcagccctccgggcacaggagtttagcagatgaagccccacagcgccccacctgtgtcctcccctggggacagcgagcaggatggcccactccccagccccaggctttcccttcagaggctccagcccagctgacctggaggggacccagagtctccccccacccccgccccgccctccccacccctatggagcagcgagcagcgtcacccaggggtgctactgaacatggtgtcagttcctccagagcccatcccggccacctctgttccctccctggactcccagccgctggctgtctcagggaagaggggggcggggtgggctgggagcagagaggggagtgcccgaaagaagaggcacagggagccttgtgggtgggcagaaggggaggaacgtcggcaaggcctgtgggatagtctttcccagcgcaaacagaggtggcaacgtctgtcctgttttctctctcttcattcctcccagatgccgtcagaccttggccaggacagccagggctgggggaggcagagtgtctcggcctctctcgacagctgcagccgctcgcgcagcctggtgttcagcctccgtccttctcccacctgctgtgctcctatcctcctgtcctctctgtcacctttctccctgatcccaccagcgcgtctccccatgtgtgggccctcccagcaactctcctctctgctgttttactatgtcccttggactcatcatgaacacttctttcagctcaggcagtaaaaatctgaagctaatggggctgaggagggcaggaagggccattggctcggcacctgccaggccagggctgtcccgtgggacattcaccaatgcctacagaggtgaaggaggtctgctgtgctccccagcaagtgccccgtccaacacctggactgagggagagaacatggtggcccgaggcaaccccacacacaccagagaatatcaaacattttttaagactttatttattaaaaaaaaaaaaaaaagactttatttatttattagagagagagagagagagcacaagcaggggggaggtgcaaagggagagggagaagcaggctccccactgagcagggagcccaacgtggagctccatcctaggaccctgagatcatgacctgagccacaggcagaagcttaaccggctgagccacccaggtgcccctagaaaatcagacctaaggcacatgccttccaagggcaagggattgggagttggtgacacgtttatgaagaaggcaggttgtgtccactcaattgaggctgcctggggctgctcggggctgctgctgctgcgtccagcattgggcactggttcagtacgctcagcctacgcggtgctttagactttgcaacaaggagggcgatgaattgtccttgaccgtgaggagctgaggtccagctggggataaacacacagcccagagagaaggctagcatggagaaaagagaagcactttgttccgaggtggtgtcaggacattccctgggccttggggagtgctgaaggcagggagtcagcagctcagactccaggccctggctgtgctgaaggggtgtttggaacaagtggctggcttggaaagtataaatgggagcagcagagtggaggcacagaggggctacttgggccagcatcacaggggatgcgtaacagcaggtaagggaggaatatggtcagtgtaggaggatgcagggattggagggttctgaacagggggaacagcatagtcagaggggaggtttggggtagagaaccaccatctcctgagggccaacggtgggccagatactgtcccggctactccaactgctctggtgcttagacctcacaacagctcggcagggtaagagtttttctgccccaattcacagacaaggaaacttgagtttaaattggttgctcagaccagcgggtaactagcacgagagtttggaaaggacacacactcaagcctgttggactctagaggccgtgtaggtcccatctttcagctgacaccaggccatgaatcaatggcagtggtccacagacagatttcagaggttccttagacccagtaagggtgtgtgcaaaattccttgtgtgtcatcaaagtctcaaagctgagaggtcccaagcaagaaagtcaacagcacatcctgtccctcccactcaatcttgtctcctttgtgttttatccacggccctcaaagtcaggacagaagttttggaacaagtgtcccatgcaggggtgtttggtagacctaggacttccgcttgagagaaggaacggggaatgaaaacacaggggagaagaagcccaagagaggggcttgttttgtgggggcagagggcaagaggctgctctgcaccccagggcctgagcctctctgctctgctccagccaaaggcacttccgtctcctgccctctcttcctccctcgcactttctctgctggggtgggctcctctgtccagctgtcacccagggcaggctcacacccctggcccgctcccagaaggtctccctgggccattgccctgtagtgggcgtgggtgcccctgagtcacccacactctccacctggtcctcttgtggctgaggacacgggtccaggaagcagaggacgaatctgcacgtgggagttcctgcccgacccatgcccacctcagccccgctgtgcccacgtgactggctaagtgtcactccagtgtggtctctctcctccacctgcctctgtgctttcttccctgtggtagatgatgcagcccaggacccatgttccacatggccggccccctctgagcagacagatcccagggcagcttatgtgtgcagcccggcacggccatcagccccggatctcggatctccgaatgccaggcccgcgcccccagcaggcgctcggtggttcttcccccgctgccccacttcccctggatcccccctctcggccttcagcgccctcccagccgctcggcgcccggtgggatgtggcaacggctgaggccttgcccccaggagcaccctgtctgtccaggcacatgaactgggctcccatgtgaagcttctcagctccactgtgttgggggcccatccgtcccaccctcattcctcacgggtgactgtctccccgagccactcgtcgcccccctggacgttctctctcctctgggggatgcagcacacctccatttaaagagcagagctcacacggcaccccgagggagtcctgggaactcccctgcacccagccttactctggagccgagggtggagcaggacggggccgtgttccctaacaatcccttaggtgagttattgggaatcccacccaggataacacgccacccttagctaagaatcactggggagcagtctgcacctcatcaaaacgttcagcggtgtgctctatgctcagctccacctggtcctcctccatcagctccagcccacccgtgtctcctctgggactgacctcctggagtttggcctggtcagcctccacttctcctcttcccatgccccaccttcaccctctccgaagcctgccggcaccctcccagggacccagggcactgcagctggagtgaggactggagcccgaggcaggggcatctttgggcagtgagtctccgtgaggaagaactctgcccccagcctccctgctccccctcctgtctccaccccgcctcctgtaagcagcagcagggagtcagctgagtgcgggtcatgctcccagcctgagacccgctgggtttaagtcacatctgatttggccaccacctctcttgccttgtgaggaggtgactacagaggctgtgattagctgtccgagcaacaacaatatttgtcctcttctctgttctgtggaatgagcgccagggaaaccagcactcattgctcattatgtttacctttaaaacagtcgttctttccactgtagctattaatgcttctttattgttattggtcacccaggactagtgcctcccagctccctggcagtccaaaggatggagccagggagggtgaaagggaaggccagggtacagtctgaatgagcttttgggagcagcaggaaggcggaaggcgttgccccaagagggactcccaggccaggtgtggttctcgggctgctgggggcggatcgtgtgggcccgtcttctggacttctgcctggctgggagcatcactctcacagggagcttctcctgtcccccgaagtgtccatccctggcacctgatgcatcacccttccacacaggtggccagaaaagcccgaatcatgttggagaggctggcatccctagtccagctctgttctcctggaccccaggactagaaccagagagtagcactgagtcctcaacagtgtgtaacagatcctcacagtcacccacatgtgcggggttgattcggatcctctcagtgaccccaggagacagaaattatcacttgtcctttggagctgcagagggagctgcagacacaagtccagggaggtaaggtgatgctcaccctagtggcctgggcttcccatgcactcaggatgccctaagctgctttctcctcttcttcttgggtattcccatagcctgacttcctccttcacttcattcacttcttgtcacctgccatttcctcaagaggccccctctatcttttctatttaaaatcgcaccccaccgctaaatatgacccatcatgctccatttccttccttttcctgaattttcttcagagcgcttatcccagcctgacatcccattacttctgtcctgtgtccatccgtgggatgttcccttcccccaccacaagatgagccccgtgaggggagggccctcctctctttgactcaccactgcatccacagccctagagcaccgcctggctcatgggagggacataatcagagaacgaagaaataacgaatatgttaagccacaggccaagcagcctgtgcctgaattttcctgagggctccagagcctgcctcatctcacctcatgtgcctgactcacctcagagaggtcaccctggcgaccaagagggtactagtggggcctgagtgaggcctggggagtgtatgatgtcagaggcaaagggcaaagagaactctggatggaaacatcttggggggcctctaggccgccctctggtggaaaagcatagaatacccaacacaaggaaagcctctccacctggggtggaaatttggagattattacagaaatcccgaaaagtcacatcccaaggtcacacagaaaatatgtagcggagaagggacaaaaacttgggttacaatcggatgctttcaccactatgggattcggtcttcctccaaccacagttgagattaagctgtcaaaaggaaggctaaggatttttgaggctatggtgggggtagggggaagctgggaaggtggagttggtttaatccaacaagttctttgagctagtgccaggcacccagtgggcacgcaattgaagattagaggaagaaaatgtatagcaagagagcttaactttatactgaagcaagttttcaaatgaatttgaaacataaaattggcagaggagttaggtcttcccctcctcagctcctacagaggggtgtgcccctctgtaatttaacttttatcacattttatcgccatgatttacatgtttgtttcctccccagacacacagctccttgagggcagggaggactgaagctgcttcctgggattgtcaccgcagtctagcaccccacacagtagatgctcaataaattattgttgtatgggcaagtggatgaacaaatgagtgccttggagtttccctgcctagagatcttcaaagaagtgcagacaaccatctcttctgtctaatccaaagacatgattggcctgcccaaaggctgagcactgtgcccgatgccttctcaagttaactaggcttctataattaggttataccatgatacaagttctaggttcttctctttcattggccaagcatttactgactacctgccatgtccgaggtactgagctattgttctctaaaactgtgatcctgttctattatttaattctctgactccatgttgacataagatgcaacactgtccccaccgcattcactcctaggtgaggtcagtcaaagtagacaggaaagaagcagtattgtctaacctcaatgataggctggcacaatgggttcccctgtgttaatactccatacccttcagtaccactcaatctccttcccagctaataagcaccctgtgtttgggtgtcaatgcctgctgcctatcaataggtattaaaatctccaattacctcatgcctcccccttctctctcccactcacccacctgttgtgtcaaaccggaaagaactgatttggagccaagtcctggattgtcttcactttggcacttgggtgatgtctttttttttttttttttttaagattttatttatttattcatgagaggcagagagagaagcaggttccatgcaggaagcccgatgtgggacttgattctgggtctccaggatcacgccctgggccgaagttggcgctaaactgctgagccacccgggctgtccttgggtgacatcttaaacagatgagttacctctctcagagtagtttcctcatctgtgaagtggggctaataacttgctttcttgaacaccttcagagccaagtacgaggataagaagtaagacctataaacacagacaaggcaccatctctgccctccagaacctcatactttacaagaggagaaacatggaaaccacaataatgtggaaattaaataagacggaaccctaggtccttgcctgggccacactaaggactccgttcctttgcctcactttctctctcctttaagaatgcttttctctttcttttcacaacgaacttcatctcactggcttggggggttgctaggggtccatttgaggggtccagacttcttcccttccttcccatacctccctgcccgagcacacccaggcatgtgtgtgagcctccttatcactgggcacgactctatcagaggacaaagacttttgatatgagctcccaagcttggcttccctgatttccccccaactcacttgtccaacaatatccccttcctttccaggttataaagcccttcactctaatcattacagtctatttctgttgcccaaacttgctatttattaatgaattcagccactcataaaacatgtatgcaatggttagttttatctgtcaacttgactgggcaaagggatgcccaggtagctggtaaaacattattttggagtgcatctgtgaggtgcatcagcgaggcggtttcttggaagagagtagcatttgaatggtgaactgagggaagaagcctgctgtcactggtggggtgcaggtaggcatcatccaacctgtgagggctgaattaattgaacagataagaagaaggatgaacttgctctgtttgagctgggacatccatgttctcctgtcctcggacatcatcaacacccctggtttgctggccttttgactgggactggtacctgcaccaactgttcccctggttgtcaggcctttgggattattccactgctttcctgggtctccagcttgtagatggcagactgtggggattctcagcctgcacagtctcaagagccaattcctgtaataaacctccaggtatattccattggttctgtttctctgaagaaccctcatataaccactgtattcggtgtcagggttacacagatgaataaagggatgggaagctatagtgattaaaatcagagacattgctgtaggatagatctgagttcaaatcccaattttgccatttgtttctccttgtatgctcctcactgtacctgtctggatccaaaacggtgataaggggacacctgggtggctcagggtgatcccgggcccggacagagtcccacataggctccctgcatggagcctgcttctccgtctgcctgtgtctctgcctctctctctctctctgtgtccctcatgaataaataaataaaaatattttttttaaaaacggtgataaggatggggttattgtgcaaattaggtgagagcttactgtgtagacatttcacaagggtgtccatacagtacatgggggtcacaggtaactgcggtggcttgtagtaaactgtactctgcgtcttacgctgggttgcccagatcctgagacaaagattcaaaacaaaggggactcagtttaaaaaggcaagggggaggggacaaccggggctcggaggaccggagtgtgcacgccccgcatctgtgagtcgcccttgaggggctgcggggagctgcgggggagcgcgaacgccaggggacgccgctcaggtgctcccagcgggcagaggcggtggcgggctgccggggtgacagcactttgcgggcagaaggctctaggcgctaaccaggtccccgaagaagcgccccgcccgcggcgagcagcccgaataggtcatttcccgcccgagctctggcgcaggccccgctgcaccgcggaccgcaggcggcgggggacagagcagcggcgacgcggagaaccaccaccgggcagcccgggtgtgatcctgcggacacgggatcgagtcccacgtcgggctccctgcacggagcctgcttctccctctgcctgtgcctctgcctctctctctctctcatgaataaataaataaaatcttaaaaaaaaaaaaaaaaaaaagaaccaccaccggctgcggagagggaggcctgcgcacacggcgggcggcgcggggcacacggcgccaggtgcccgccaggtgcccgccaggtgcccgccgccggagctcgcaggggcagggcccgccctctgcgcctgcgccggagtcccgcagcccctcccccgcagcccccaagccccccgcagccccaagcctcccaagcccctcccccgcagcccctccgggccgggccgggccgatccccccgccgctaggaggcctccctggaccccctctgagcccgcggcgttgcttgcccaggctgtttgggttccttctcagagtgatttagtcacacacatccttcctatgtgggacattgtttaacttttcaggcaaaacctttcttcctcagctgaattttagacttcctgagagtgggaaccgtgtattttttactatattcccctgtgtcacgtggcactgacggacacactgagggtctataagatcatgcccgagggactgagggctggctcagcggaagagtcggccttcggctcagggcctgatcctggaatctcacagggagcctgcttctcccgcagcctgtgtctcttctctgcctctctgtgcccctcatgaataaatgaataagatcttaaaaaaaaaaaaaaaagatcatggctgaatgaataaatttcgtgaaccaggcccctttgaggcctattgaattctactaggcccacccctacaaccctgttactttccaggattatttctaaattctaaaactaggtttggtttcgttttgtattgttttcaaactggtcacctacaggttttgatgggagtcgccacataaacaaatgggtcctaagtggtgaatgttaaggtcatgcacattcaattgcttttaacccttctcagccccaccctggtaagccacttgctccacattaggtcagggtaatcttttagctcttgccttttgaactttcctgctcaaatactcctttaaagaatggttttaaattatgtatttatttttttaaagattttatttatttatccatgagagacacaaagaggcagagacaggcagagggagaagcaggctccatggagggagcctgacgtgggactcgatcctgtgactccaggatcacactctgggctgaaaacagcactaaaccactgagccacccacccaggctgccctgaattatgtatttttaagtcaacggctaacatttttaactataagttaaaatattgcaaagggtatactttccaggaaattgtacatacttacctgttaaaagccacatcactcaaatatagcagatggaacatagcataatatttttgtacccacaacaccctttcaataagcaagccctataaccagtccacaaatttagcttatatttctttttagttttttccattccactctccctacagttctatcctaatgaaatatatttccattgtgtcactttctttttgtatttattgtattttggggaagtccctttgtatatctccgtaacagaaacatgtatatagattgaaatgtatttcctgtgactagaagacccgaagcgtggaaaacagttattgggcagcgggtttataactacaattgctacaggacacaagttgtcaaaactacaaatatggacagtgattaaacagaaaagcaagtttgttttttttaaagatttttatttatttaaaaaaaagatttttatttattcaggagagacacagaaagagaagcagagatcaggctccatgcacggtactggatgcgggactcgatccaggaatttcggatcacaccctgagccacgcaggtgtcctgaaaagcaagtttttatttaagatgcctcccttggagggcctgcctttggcccagggcgtgatcctggcgtcctgtattggagtagcatcaggctcccggcaaggagtctgcttctccctctgcctgtgtctctcatgaaataaagtcttaaaaaaaaaaaaaaaaaaaaaaaaaaaaaaaaagatgcatctcttaatgagatgggggaaagggctgacttctgtttccccctgactcttgtttggcaactccaggaagggcactcgggtcctgtttagggtgaaaaagagagcccagcctctctctgtcaagagggagtagagtggtttgttaatggaggcaggtagaaaacagtacggtcctcggcagattcattttaggaaggggatacatatacttctggaaattgatccccttagaacttagtcttgcccacatgcccttgggaaaaagttttctttttttttctaaaagatcttatttattcacgagagagacacacacagagagagagagagagagagagagagagagaggcagagacagaagcaggctccatgcagggagcccgatgtgcgactccagaaccacaccctgggccaaaggcaggcgctaaaccgctgagccacccagggatccccgcgaaaaagctttcatgttcagtgcaaatcaaaagctatttaaaagagacttaagggcggccccggtggcacagaggattagcgccgcctgcagcccagggcgtgatcctggagacccaggatcgagtcccacgtcgggctccctgcatggagcctgcttctccctctgcctgtgtctctgcctctctctctctctctctctctgtgttgttgtgtctctatgaataaataaataaaatcttaaaaaaaaataaaagagacttaatatggtttctcattctccaaaataggggttccagaatgggagaaatgtgggtctgaatgtccttgtaactctgatggttacatttccaacttcctcctgctgagctccacgtccttacgcatatgggcaagacgggaacttaagagtacttccagatctccgtagctttgtgctctggggagggcatctcattattcaaagacctaatcatcagcaaagcagcagccaagattcaaaatgaagaaaacatggtttttatttttccatttcatggaagaatggtctccgtcttccgatagttcccagctgtcggccactagggggcagcagagaacacagggccaccaacctggccccaggagccccaggggtggggaggagggaccaggttggaagcaggtaggtgggtggactgggcatgaggtaggggtgtatgcttcagctgtcaaagaaaaaaggagggggaaagggggctggatctcaagagaggacagataagagaatgacgctttcagagttcagaaaaaaattgaagaggaaggggattgaggctgatgggagaactggagaggaatcagaaaggtatacttgggatactcagcctgggtatctaagaagcctctgggggagtccctttatctgtactcttcccggggtgggtcaagatctgggtcctcttgaggtccatggtccacttcaggggcaggtggccaggggttttctggaggctggggtcctgctggccaggggtcatcaggccggggaggctgaggggggtcggttctcgggggttcaggaggccaggctccggattcaggcaggtctctccagggacgactggggcctggaggtggagggtcctcaaagagagggggtgcccctggccagggatcaccagggactggggggccctgcggcaatgttggggagccctcctcctctccagtctctgtgagtgggggacgggggtgctctctgctgcctgagatgcctgtggaagaggaaggggaaaggtagaaggtggtgagggccagatctccctgccccagctggtcagggggaataggctctctgggatagaccacagcctgagcagacatcacaaacctacctcaaaagtcagtctcaaagagctctccacacattaacaacagaccgaagtgatcttaaaatgacataaaaaccttgtccggaatcattaacttgacctactttaaaccaacagagcgggcagcctgggtggctcagcagtttagtgccgccttcagcccagggtgtgatcctggagtcctgggatcaagtctcaagttgggctccctgcatggagcctgcttctccctctgcctgtgtctctgcctctctctctgtctctcatgaataaattaaaaaaaaaaaaaaaaaaaccaacataagttgacataagctccattcagccagggttgggaccctcactggcatggcctctgtgctggtctacacctccaaagccatctacaccttgggcccatgtggcaaccagaccccaccctttgcaaacacatccaccctccacaggcctcagtcgtgatgcatactcacccacacacctggattctgatctaaattgccacatggacctacacttcaaccagcaaaaacattctgagctaaaatgcattttcctgcatcaccttcaacttcttaactccctccttcatgtgaaaacccagaatcttctgaagtctcctccatccctaggcatctaattcacccttgccccacctgaccatcctccatcaccccaaattgcactccttgctctgttcccagattacctccagcacacaggtaaaggaccaggatccccagtagcttccagttgagcatcatggctgtctcctggcccccaaaattgggggtgggctgagtgtaggtgcctaggaaccccaagaggctttatagggattgagaggaggtgtccaatctctggggaggggccagcccagtgacacaggaatcccatcagaacctaactggttgaacccgtttggaaagccagggctaatgtgtaacctctgacggtggcgtccctcactttagtgccacccccccttcattttgggattcagccaccccagctctattgatgacctagacctcggtcaccccacccttgtgttcatgtcctcctccacacactctgcagccatcaatacctacctgtcatctctagtcacggggacttccacctttcattccttggcactactggaagccaaggaatggaagccaaccatgcgtggggaagcagtgtaattacaggggccagcaggcaggacgccgcggcaggagcaggaagagatgctccttctaaacatacggaacgcagctaggacggccccagccagcaccccgagcttcccccttgggactgttttgtccttggaactcccaatccccccacccctcaggactgggacgtgcagtagcacatgccttcatcaggcactcaaggggcctcccaagctatgacatcagaagaattacacccaggagccatgtgggagatggcaggccaggaagtatgaggacaccctgatttcttcctccaccccggagctagctccatccgtcccagcccagaggctcaggaggaaactgcctctgcttcctgtggatctccgccccttcctcctccctctggaatcctgctcactgcccctctggccactgcctggtcctcccttgcccttccccctctgcccccaaaaccccccaccccatcttgtagacctcagtctagttttgtctccgtctcttggagccctcaggaaggctgcccctggtctggaggtccagtaagcctctaggaagtaatgcctccctaacacatctcccacctccccaggctgttccccacctggtctgctccctcctggggagggaaccactgtccctctgtggttcactttgaagccttcattttgctccttcccccaaccctgccccaagcccagctcaggagcccatctctccgggcctcctcagttaccctgctaactggtctccccaccccctcttcttccctccccaacccaaaccccaacttccacagccagcctacctagctcttaagaatgtcagcctagggatccctgggtggcgcagcggtttggcgcctgcctttggcccagggcgcgatcctggagacccgggatcgaatcccacatcgggctcccggtgcttggagcctgcttctccctctgcctgtgtctctgcctctctctctctctccgtgtgactatcatgaataaataaattttaaaaaaaaaaaaaaaaaaaaaaaaaaaaaaaaaagaatgtcagcctaggggatccctgggtggctcagcggtttagtgcttgcctttggcccagtgtgtgatcctggagtcccgggatcaagtcccacatcaggctccatgcatggagcctgcttctccctctgcctgtgtctctgcctctgtgtgtgtgtctctctcatgaataaataaataaaatctttaaaaaaaaaaaaaaagaatgtcagcctagggatccctgggtggctcagtggtttagagcctgcctttggcccagggcatgattctggggtcaagtcccacatctggttccttgcacggagcctgcttctccccctgcctgtgtctctgcctctctctctctcataaataaaatctttaaaaaaaaagaagtcagcctaatcatgtggttgcatccctgctacaagtactccaagggctttttactgacctggaataaaacccgcaccccaccaggtccccctccatgctagcctgccatctgcaggactccagccaacgccgctgcttgcttccccacctcaggcaggtcctccacacagcccctcctcagggaggcagcatcgggcggcctctccctggtcaggttctatcaccttgtatgtcttttctcttcccaaggacgcccgtccgttcacttaggtacctgtccatcatctgtctctaccaccaggacagcagtgcctcggcagcagggacccactcagcaagcccaccactatggcccctgagcgaggacactgcctgactctgagcaaatgagcgatgttttatattcctcactctgggcagtggtcttcttccagaagtagagttttaaaacaaaagttgagaaaaagaaaacctggggcttgccagaaacttctcaagcagcctggggaaggggttttgagaaaggcactacctagagaaaacagctggggaccacctctcgcattttccgggtggatggagatggctgcaggggaattccctctcagtcccagagaaaacatggcacactgtaatcacctttattgagccacagcattcagacatcctggtggctggtatccacgagggcagctggccggccccccaccctgagcccccagaggcagagtccccagctgttcaccctgagcccccagaggcagagtccccagctgttcagccacacactggagcaggacagttcgggttgcctccttgagaaatagcttcctctttggaaatggcctcactcaggccctgcagatcactgagcaggacagagagggatcctaggaaagaagacccccagggatagcagccagacagacaaggctgttgcagctccggttgcagagaacaggactgccatcagatgggagggttatgagggagggtgttctctggcccaaggtgggcatggatgaggggctgtgggcctccaaaggtcatggagaaaaatgctcacaccattaagagcacctggaggagagattccttaagtcctgtacatccatccatcccttcctacctagaccattaccttttatggactccctggtggtgggtgctgccagaggcacagctgctgaagaccctgggtccctggggctggactccacagactttcccttatccaggagggaaggaagaactgccaatagtcgctgctgcttgtaacgggagaggagaccctcctgctgcaaggtggcctgggaaggagagggtcaaatgccacctagcccgggcagagccacccctccccaatgaggcctctactccccaggcagctccagggcccagtctctgaccccctaccagcataacgttcttgtccctctctagctcctgcaggcgctgggtcagccgcagcccctcctccttccgggcctcatcttgcaggcgcctgagctcctggttccgctccttctcccaggtggctttgcgctgcatctggcgcagggagaccactagtggaagccagggtacagagggcacaggtgtggggcaacccagaggtagtgaggcaccatgagaacagctggaattgtgggcagaacactggggggctatgtcttctgcatgctgggcacagtggctgatgctccacaaccccatccctgaaccttcctggactcatttagggagaatctgaatgtgtactgaatattcaatttggtgcaatcaatgtcttcttaatgtgtgccaatgacactgaggttagggacgcctgggtggctcagctgttgagtgcctgcctttggctcagggcatgatcctggggtcccaggatcaagtcccatatccggctccctgcaggaagcctgcttctccctctgcctgtgtctctgcttctctatgtccctcataaataaataaaatctttaaaaaaaatctttaacaaaaaatagatgaatagctgttgcatctagttagaggaagtacacaagtgggcactgcatgagtcttgtaatttggctaggtatttgaacttttccctactatgacattgaggggaagcctctggctgggtcagtcggtagagtacatgattcttgatcttaggtaagtttgaaccccatgctggttgtaaagattactcaaaaacaaaatcttttaaaaaaaaaagttgggagacggacacgtgcagcacagaacatcatgtaaagatggacacacaaaagaatgatgtgccaacaaaccagggatgccactgattgccagcaaccatgagaatgcaggagagaatcataaaatagactctcagaacctctagtaggcaccaaccctggccagcatcttgacttcagacttctagcttccagtactgtaagagaacaattttctattgctttaaggcaaaaaaaaaaaaaagaaagaaaaagaaaaaagaaaaaagaaaaaagaaaaaagaaaaaagaaaaaagaaaaaagaaaaagaaaaagaaaaagaaaaaagttgggggtaatggttggtgtgaggttgggatggccgtggccttgtggaggggggtggctgggcagggctcagggggcactaggctggccacctgctggtgctcctatgtgtgctggctgaaggagtgtgttcaccgcctcagaatgtatttgtgccatttcttggtaacttcattatttgcatacttcaaaaacagctttaagatccttggacacctgggtgactcagcagttgggcacctgcctttggctcagggcgtgatcccaggatccggaattgagtcccacatcaggctcccagtggggagcctgcttctctctctgcctgtctctcatgaacaaataaataaatcttaaaaaaacaaaacaaaaaacccttatgtccaacactgccttctccccggacgaccacagccacccaagcaaatctcacctgccttgccatgctccctccgagcctcattcagtctcctctctgtttctaagagctgttcccgcagcctggtttccacttcagccaccttctcttgcagagctgggggggggggggggggggcgggggtgcagatgggatgtgtcagaggaagctttgcttcttcgttcctcacagccctccgtggtaaacagactccgcatcctgcacaccttgcccatagagctcctgctgctgggtcagttcctgccggagattggcagcctcctctgtgctctcctgctggccctggcgagcagcctccagctgcagccccacactagccagggactcctgggtgcgttgcagctcctgctctagctgctgggcgacctcactcagctgctgccgctccgcctcccctgggaagagatggcactcaaaggtctctccgtggccagactccactcctccctccccaacacacccaactctggcccctgctccagctctgtaacgccaggaccaagcgtaccttgctcccgggcccggcccacctcctgctggatgatgtgggcactcagctgcagctctgcatccaggcggttccgttcttcccgcagctgctccaactcaaggctcatgtgtgtggctggcggggctggggggcagctgcagcagggaagggaaagagtcaggggcagtcacctagcctgatccctaagcccccatccccttcagtcctcactgtctggggtcccagcagacaccaccttaaccccctcccatccaccgcagtgccccaggcttcacctctcctggcgcagctgagcaagggccagttttcgagccatcaggcctgggggagaaaaggcagagagcaacggagaggagcttgaggagggaaaggggaagggatgcatggtctggtgacaagaaggcatgaggtcaaatgtgggaggcaagagctggggaaggcaggggcaggagtacagcgtgtctggcagttgccctacccaccccgaatcgtgtggaccctgcggacggcatagctgactcggctgctgaggcagggcagccgggctgcagccccttccacttcagccatggtgctctggagccaggtctgaaagctggagaaggcacacatcactgacccttccaccccactcatcccctgaaggacctgatgtgactcgtaggaacaactccttctatcctatactgctgaatatgcagggaacaggcagggaaaaccatagcagggaaaagagaagctgaggccgagggctggggcaccaactctgtcccaccagtcgcatctgagcccctcggcctcggccaatgaggaaagcctgagcgctcacaccctttagtgtctgttagataaaaatgatcccattgctcctaaggaccacatggctttgcttggtcccaaaacctacagcaagcttctcctctgggtcctatcaatcagtatctttaataagagccctgtggtaaaaacaagaatgagcttcatagggtcacacacctcatcctgacccagagcccataacacacagagttcagtacacatcagtacaaacaactctatgggggctgacaccataaggatggatcatctctagctcatttggactttttttgcctgcagtccctggacatgtctcctggttttggaaacctcctggcactgtacgccatgtgtgggtatatgaacttaggtacattttccctaaagaacaaggcacacagtttccaagaaggcatcgcctatgtatcttttatctttccaagcaacctgcagagtttatttctcataacctatgttttggtcactaatatgcattacagatcaaagctaccctcacaattccctgacactagtgaaggccagacccatgagcattatgggctggccgtgccccaagcggtacagcaaaggctcacgaaaactgagcagggccaaggcaagggcagaactctccaggagagtccaagtctgtattgactgaaaaacacgtagatgataaaggctgatgataaaggttgtatcccttgcagcacagcagaaacccattattcaaaaacctccaacacctcctgtggctcttattaaagcaatttcctgatgaagtttccagaccatctagagatagacaaacaaacatgattaacaatctgagtgtgggttgttttaagcctcacgaactttctggcaatcagtcattggcaaggaccatttcagtgatgtcctggtgccaaagtaaagccctgtgcacagtgcaaccttcccattctcctgggaacaggaggcatgcacgatgaggtgaagctgggtggttcattataagtctaagtccatgagaagtggaaatttttcatgattattttaaagtgaaattaatcctcaaggtacaaacccaacagaaagtgatggtggacaaggacctagccagcctcacaattttctacaccagtaattcttctgttatccacccagaacagcctcgtggtaacagtcaacattcagagtgcggatgacaagcgggcaccgtgccaggaggcctatgggggcccacctcagtattcccaagtccaaagctgacaaggggctgtcaccagcacaaagaagcatgcgttccgccttagaggccctcctacaggttgtaaaacaggagttgagaaggacacacctaggaagttggtatgagaggcactggcttgcaaatgattaaggaggaaattggcatacatgtcacagactatctagtaagccaggaggtgtacagctttaaaataaatacattaaacttggtgtatccacactctgcatcttccaacagctctgaaggtggagaacctcccagtgagcggcactataggaggaagcacggtctcacctccaaccaaacatgcatgggagttgtaacaagcgaccctcctgagtgtggagcaggtcgccccagggaaaaacaaacacagggacttttacagtaaagggctgggtacctctagccctgcatcccccaattgccagctttccagcccctcttgcctaagctcctaaacttccggctatccaggaaaccagggaagcaaaaatgctactccgcctaccctccatcccatatacctgctgacaaaattggccacaagcctcagctgctcctcggctgtggctgtgtgctgctgcctccggcgctgggcctcctgagcacggctgagctctagctgcagggcctgggaaggaggcagtgaagacaggggtcccctccccagggctcgtggggggcagtggtgaggcacgcccgaccccacccagcctcggcctggctcagccactaccttggtgctcatccgctccacctccacctctgcggctttgtcctgtagggagcgctgcaggatggcctgctcctggctctgggccacagctccctcctggagctctgccacctgggcagggtggggaggaggcaagacggggcacagctagggcagaaagctggaggggggcactgggaatggaggggctggtgtcaaagtctctgaaagaacatcatgcagggagacaagcttgggttcctgagatggagtctgagtccaggtttccttccagaagcatgttccacgtgcccacaccttgaggaaccacactgtgacataccaacaaggatgcaccacctcagcccatgccacccatgtttggactttgtcatctccttagaaaagccattcctgaccatcctgcctaaagcacgcccaccctggggtctctttctgtcacgcttttacacttttctttagcgcacaccataatcacttgacatcatctgtctgctggcctgctgtccctgctgcccaacgtaagctccgtgccagcactagtgtttgttcaggactatgttcccggtacatagggtaactcttcaagagatctttggtgggtaagtaccatcccttgtgtaaggagccaggagttggtggggggacgaacagggagagagagtcaagtgagagggtgtgtcaagtgacctgtcccttcagctgcgccacacatcctctgtgctccagctcttgggccttcagctgcaccatgagggcaaacaccttctcccgccagcgcttcagcagggcctggcacttcctgctgaactcgggctccagggagtctgcaggctggacctgcgttggaggaagggccagaagtgcgcccaggctttgtttttttgttttctttgtcccacccaagccacaagagccacagcaagaagagggcttcactgaagagaaggtcccagaaggttctggcagcacggcaactcttcccaccctcggggagttgctggaggcaaggggcctaccttcctggtcagctcctcctcctgcatggcaagaatgtgcatgaggctctgcacacgcacctgcagcagctccgccgtggtgtgcaggccatcccggtcctcccgcaagtgctgcaggaggaagtgcaaaggagggagcggctgctctgcaggccctcaagcctgatgccaccccttgtcagcaactgctttcaggggccacccgtctcccaggatctgatccctgagccttctcaccccacctccagcccacacagaggcgcactctctcacttgcactgtttctagaagctcctgtcgctccgattcccaggtctggctgtggacctcaggagggacttgctcccccacatatctccttaaattctcaaccaaggtcacttgtgcctctaagtcttcttcggtcttgctggggttgggatgggaaccgggcagccatcagtgaggcaccctggagacctgccacatccacccgcctgccggatcccatttgctgcccacccccactttacctcagctgcttctgtagcaactcggcctctctctgggccacagccagctccttggcttcccctgccctcctagtttccagactattcagagatttctccaagccctcagctttgctggtcaaactggaaagagcctcctggtgtgcctgtgtcaaggacaagagctgtggagagaagagagggcacagaggggccagctcactcccacatctggactttctgaatccactcccgctcagaccctgtccttgcaatcccaccttccataaccttagaaaacaacgtggcaaaatggagacagtccctggtgccccactgtcctccgtccacctgccattctgtcagcggtccctgccaggtctctctccactaaatgtatcttcacttctgtctccaaccttagcaagccaccctcctctctggcctgcacaataccaacaaactcctgaccagtcttcagaagccttctggggcaggggccgcatgcgtggctcagttggttaagcgtcagactttgactcgggtcatgatattggggctagagacaggccccgtgctcagtggggagtctccttgtcccactctgtattcccctccccccattcattctctatcaaatagatgaaaaaaatttttttaagattatttatttatttaaatctttatttatttattttttaaacttttatttatttatgatagtcacacacagagagagatagagagagagagagaggcagagacacaggcagagggagaagcaggctccatgcactgggagcccgacgtgggacttgatcccggggctccaggatcacaccctgggccaaaggcaggcgctaaaccgctgcgccacccagggatcccctaagattatttatttattcacaagacacacagagagaggcagagacacagacagtgtctatttaaaaatttttcatcagggcacctgggtggctccgcggttgagcagctgcctttggctcagtcccgggatcgagtcccacatcaggctccctagcatggagcctgcttctccctctgcctgtgtctgcctctctgtgtctctcatgaataaataaaatcttaaaataacaaaaacagagctcactgctctcaaggtaaagtacaaagttctgaacaggccccaaggactccccgtgcgtacaccatccagggcaccccccctcttctacactcataccccttgaccctctggcctccttatgccccacaggctgccaagtgtcgccagctcaccagccaactcctattcagctcaaatgacaacttatcaagatgcatctttcataaacctaaaggccatttttttttttaaactacctgctgtgtccattttctggctagattgctacctttcccttatcaacttctaggcacagagtatatgttagggatattagcctttttcacgatatgaactgtaaatattttttatcatctgttctttaattttactttgtcatttttactgtgtcattgtgtttgttcaggactattttcccggtacatagggtaactcttcaagagatctttggtgggtaagtaccatccgttgtgtaaggaggcaggagttggggggggatgaacagggagagagtcaagtgagagggtgtgtcaagtgacctgtcccttcagctgcgccacacatccttaattttaaaattataaagccaatgtatccatctttcctttaatgactggattttaactcataggtagaaaagccttcaccaatctgttataaaggaattcaccaggggtaccagactggctcagtcagtagatagagcatgcaactcctgatctcagggtcattttgggtgtagagattacttaaaaaaagaaaatctttaaaaaaaaaaaaaaaaggaattcacccatgttttcttccagtatctttatggtttcacttcttaacatgtcaactggttaggatggtctcccctaatgcccttgtccacattagggcttcctgtccttctccttcctggcatttctcccaattgcaattaattaattaggattacataaggtgttgaatgtgcaagtcccccagttgggtgtcagctccacccacaaggactcaggctgatttgcccaccccagagtccccacacagatctcagatggcaaaaggtagcactgagaaatgcttgctgaatgagtcctctcctttccccagtccacctcaggagacctctcccaccctcctcaccacccttacaatgctcccacatgaagtgggtatcctgagtgaagcaggaacacaaagtacttcctactgaacaaagaccaaaacacccaaattcgtctttcaccttccccagacatcttattactccactggtcatggggacttttctgtgaaacttgctctttgctaggaagcttctggccagttcctccagcaggaactgaacccttctcacccccatattcacctgctcctggtgcagcctcttaatctcttccagttcccgctggctcccttcttccaggttctttcggacaacctcagccccagccaaggcagcacgcaggccctcagcctcagcccgaccagccttctccgcccgtgccagagcctccagctccatggcctgggcctccagcttcatcttctgctgcaatgaggtctcccgcaggactcggacctcctcctcaagccgccgcagctcttgcagctgccgagagatcagctcagcctgctggctcagggcctgtgacccctctatctccacagaccttcaaagaggttagcacaggtgagacctgtctggtgctgggagggtggtggaggtcacaaacagagagaggaggaggatccttctgctactgtatgaggagatggggggagggaggatgaaggtgggccaggggaatctctgcatttgcatcatcactgtcatttatcatggcagtcctaagcatattaggctcactagtggcactcacaggacctaaaggctacttgagttcacggaacatgatctcttttgaactacatacaggcagatgcatcaaacacgcacatcattaggccccacattctgaaatagagattggaagacacccagagacttctgaattctgatttaagggtaaggaaaagttggaggaagtttcagagaaagacaggtcatcatggcttctagtatcaatacagtgagaccaggcactaattaaaagcctttattgagtgttagatatcctgtatctatcctgtatccaggagtcgacagcacattaataagttacatagaccactggtgtcttgtaaagtttaaacgagcttacgataacatggatcttgacacacctcctccactgaggcccagaaccacaggatttttcttttaaaatggtggggatctacagcctagagatatttttttttttttaagattttatttattcatgagagacacggagagacagatgtagagacacaggcagaagaagcaggctccatgcagggagcctgatgtgggactcgatcctgggactccaggatcatgccctgagccaaaggcagacacttaaccactgagccacccaggcgtccctacagcctagagatattaactggccaaaggaccctagttggtagccaaactagcatcagagtctctgtctcctgacacccactctggggctctccccttttcatcatcatgctcctttctcttggacggggtccaaggcagacccatctgcagccccactctagagcaaaatggcagaatgacattccagtacatttgagaagagacacatgacgaaacatcaagagtaagaatcacaatttttatagaaaaacattggcaaatagcacggtcagctctaaaggcaagtcctccatcagaatccacgctaccacagtacagcctatactcctggtttgtacttctttctctcaccctatatgttgctcattgctatcagctgctggtcaatctacctcttcccttagggcttttaaatcattgctatcaggatctcattcattttcattatccccatttgtagcatcgagcacattgccttatcctttatgccttatcctttatccttaagctccaggagttgcttatgcaaaaatgcacaagttagggaactaagggctgaaacagggtaaggaatctatttcagtgaaaaagggtcactggcaagcaagcccaagaaaagagcaacaatgaatccctacctgcctctccgccccagctcctgcccattgccagaaacatcctgttcccacgtgatcacttgaggtctctggttgtctggccgcctctctgagacatcttgatgggctgaggtttggaccaggggaatgtctgaaacccaggtgggagccattcttggtacagttggaaggggatgagcttggaagtgggatgggggaatcaacccagtggaacctgaggaatcacaaggacacagatggtcagttttctaaggaaaggcaatcaccagtccccttgcctgggcccactgacctgaaggttgaaacatctccacattatctgaagtctctagattctgtgtccagccatctatgtttccctggacaataggagaaacaaggacaccccagttcaattttcaggccaccttccaaagagaaagcccctacaataacaaaagtcataatcctttagtaacttcgcaagagaagtaggaaatacccgaagatcacttgcttgacccaacctggttcctgatagaactatggcaataaccatgagatggaggtaattaaggcaggccgagaggaagctcttagactttactcctacttttagaattctgggaagcctttaccctcttctttaagtttctacggcctctgcctttccttgccggaggtgagaaaggaggtacgcagtgcaggggctgtgagcccaatctccagagttttctccatggctcagcaaggccttctggaagcccatccagacaccaccaagccatgactcctgggtccttccctattaaagcactggcccaaggcctgggcccagatgaatgtggccacatgtagggcaggacacctgcccaggtcccctgggaacaggcagcctagaccccttggccgaaaaaacaatttcctgacatctcatccagagccttccggccgctgtcctcagtttccctcttctatgccctcagctgccattcctgccgcctaccgtcctctctccagggtccagaacacgagaggtcttttcaaggtctccctaccctcccaccagaacgcacctagtctccctgcctgggattcctatcaccctccctacagcctcatctgctccttcctgaaagcgttactctagtccctcacggccgcatcccctcccaactgcacgcctgcaggctcccagctctttccactcccgcgtctcccccgatacccgagccttcccctgctggacccggggctctaaggccgttgggaccacttcatctgctccttcccctggtccctgtgcccctcttcccctatggacccctgagcccaccccgaaccccctgtcggccccttcccgccccccaaccgactcttcccgaacgccccttaccgagcgcgaggccctccgccctccagccaccacccctggccctcgccccgggcgccgccaccgcgcctgcgcagagcgggcggctcggcgggccgccgggggaggggggaggggaagggcacgcaggcgcagtggggtctaaagccaggccccaggccccaggccccaggccgtgggggacgcctccgcgcgcccgcggcccctcccaactccgggaacccgggaaaacaggagaactaatcaggagaggcggaaggcgggaaatcggagctctccagagcgccggccaatggagcggcggggggcaacggaagcggccaaccaggagggccggtgggggctcgtcgctccgagctcgggcccgggaactcggaaggcgggccaggcgctgcccgcgcgcggaggccacgccccccccccccccggcctccccgctgtcaccccgcggccgcgcgcgagctcgggcactgcctgcgggggacggcacgtggaggctgctcgcggtaggtgggcaccaggccgggcacgggagggaaggcctggggcggccctgcctgaccgcgggagccccttcccctttgcgccgcgcccggagaagccgggaagccggggcttagcttcgctttgctggagaaccgagggaccgtcttcactgtctgttgggggacagtggattcgcctcccgctggggttaaagggaactggttgtgagagggattggcctgaagggcgaggcggcgcgggcgagcaggacggttactcgatttggataagcaagtctgataggaagcttcttttctacaaattacagaggtgacaaggtagtgtggtacagagcaggaatcccacacacccatctacagaccgcatttccctgggaggcgcctaatgtgttgttgccttgcacagattgagtctcctgaatacctggggcagcctgaggatccggctccaccaaagtgccacaggacgtgttcctctctgcgctgcactgggaccttccccgaattcttcggttgcaaagctgcttgacagttttgtttgtatcccgtgcctaggcgccctgcactctgaagttgcactactcaggcctgggttctcctctgagttttaccactgatccctggtacaaattcaagcctgtgctcaaagttgaaaaaaagcacaaagcacagctcaaatttgcatcagacagaaagtgaacttagggcagcgtgcatggctctggtgtgggacaggtgatagactcctgaagtggaagaggtggtgcagagagggcaccacccatgctgccctgcttccagctcctgcgcataggaggaggcaggggtggtgatctctacaccttccacccccctaacggggctggctgcacttatcgcttgggctgtagggccgacctgtgtgatgtggccctgcagccccagagggagcctggcctcatctctggagtccatgcggagctgcacgctgagcgccggggtgatgactggagggtcagcctggaggaccatagcagccaaggtgagcagcaagcagggcagccttgcacctgggcaattgcagttctgggctggaatgatcaaggggcttcacagggaccctgcctgcctcccaaacgccctatcagattggatggacagttgtcttgacctgcatcttcccactcaaggtgtgcagtgtcagaagctctctgtgggactggcccccaatggtcgctgcctagctggaagcatctaaacaggggctgggaggtagatgcagggcctgccatcatcagggaagtatcatagtggggatgatctggggccttgggagccaaactcagatgactcagtttccaaatttgttgaggcaccttgtttttgtctgaaggcggttatatgttgcattatgtttgaatgatcagggcataggtcttgctccttgactggcaggcatttgtagtcaacctcagaaggcctgggctttgctgctgtcccttcacgtctctgggtctcgagttcctcataggtataatgtaaggctttgtaaggtcggtttcaggagtgttgtggagataggttaactatgggagccaacattcatttagtgcttactgtgggcaccaggtactgttctaagcgcatcgaatgtcggtgaacactaatacagtccccattttacagacaacaaacattaagcatagcttaattttcaggtgacatagctggtaagatagagccaagatctcaacccagacagtccatggtatgccattaactgtttttgtgttagagctgggtgagaaacatgtctgaggatggcacctcagcagagtgagggaaggagtccattccttccatatgccttgtgggacggcataaaaaataaacttgttctcaactcactaggagcttaatatctggtgtcacctgccgagggacttcaggtgttgagaagttgatgacaagtgtcatgttctcctccctcatgttccccagaaaagcgaaggaggccagatttctcctctcctgactctggtcatttctgtttttgtcattctctgtatctgtctggtgccctgccatcaacagggactctggtcaataatgtccgactcccaaggggtcacaggctggagttgagtgatggagaccttgtgacttttggccctgaagggcccccaggaaccagcccttcagagttctacttcatgtttcaacaagtccgagtcaaacctcaagattttgcggccattaccatcccgaggtctagtggtgaagagggaactgggactggcttccagcctatgctgcccccacaaggggccccaaagcgccccctcagcaccctttccccttccccgaaagccacgttgatcctcaattccatcggtagtctcagcaagctcagaccccttcccctcaccttttcccggagtgggggtgggccacagaaactgcctgttcccactcctcctagggaggtggggagtaccccttctgacccacccccaagaaatcggaggaaatcagctcaccgagtgttggcagagctggatgatgagggagagattcctgaggctcccccagtctttatggagcccagaaagaaactccgtgtagagacaaccccacagacacctgctgggtaagtggagagaactttctcaattttaattccttttttattcttttttagtgccctgggctggaaggtggccctctgctctggggataggaatggggatgggaataggaggtggacagaggtggaacagatgttgaattggcaagacctgggttagctctactgttgaggttcaccactggtccagtgagtctatctaagttccctctaggattacccaggggaaagttctaggctactacaggtttctagtgaccctgattttctgtgtcactttcttcagcaatcgacgtggatgcccttggaagcacccagtgagcactcccagggctccccctgcagctgggggcgaggagccctgtgcagccacttgttgctacctaccccaagaagaaacagttgcctgggttcagtgcgacggttgtgatgtctggttccatgtggcctgtgttggctacagcatccaggctgccagggaggctgacttccggtgcccagggtgtcatgtaggcatccagacttaaggcccaccaccggggtaccagaggacagggagccagcacctccaggccaggggtagacagtggagcaccgatggatcctaagaaatgctcccatcttcccttgcctccctgggagggaatgactacaggggatcgtgcccattgctatggacactgattcaaggctggaagaggccctcatggccaaggtgacagaagagatggtttcctgccaaagatattgttgcctccggaagttgcaagctggaaattccattacaagctgtaggtaggtccttgtcgtcagaggcactagagtgtctggtcagagcacccgtcaattgcagaggcaatgcctgggcagacttggaaacaaacagcgcttaatgttcttggatggcatcactaaggcatactgggaaaacccaagacatgacctcaaagcttttacattgtgggtaaaccactgacacagaccatgatcttgaactggcttttcagagctttgcttctatttccaaataaataagcagcttcattcaatcctagacatttattctttttctaggtctgacactcctggctttccagttcttgaaagaatgatatggtctggaaaactaactgacttttttttttttttttttttttacaatagtcacagagaaagagagagagagagaggcagagacataggcagagggagaagcaggctccatgcaccgggagcctgatgtgggattcgatcctgggtctccaggatcgcgccctgggccaaaggcaggcgccaaactgctgagccacccagggatcccaactaactgactcttaggggaagagatgagcaaagcacagagaaatgtgaacctgctcacttgaaatagaatgggctggaggtgggagaatggaaaagaggtacctaaggttcctattttaaaggaaaaacagggaagccctgtggctcagcgggtttagcactgcctccagcccagggcgtgatcctagagatccgggatcgagtcccacatcaggctccctgcatggagcctgcttctccctctgcctgtgtctctgcccctctctctctctctctatgaataaataaaatgtttaaaagaaaaatagatccactgtcttaaagtagatgaaatttggtcaagttcttgatggtggaacctttacaaatttcaccagtactattatagaagagagaaaacctggtacccaggtagagcagatactgactttattcagcatgaatgagcctaacccatctacagttagccaagccaacatattgtcaatggtgtagctcttactaggaaagctttatgttgacctattagcaatctttgtccatttccttctatccctacttaaatcagcccaaggtttggttggttttttcccacatcaagaaaaacagctccaggcaagagccccaattaagtaatggcagagccaggacaaaaacatgggggtttggggagttgctcatggacgactaggccaaaacctcaagtggaaaccaaatggactttggtattaacaaagcatataacaggggatccctgggtggcgcagcggtttagtgcctgcctttggcccagggcgcgatcctggagacccgggatcgaatcccacatcaggctcctggtgcatggagcctgcttctccctctgcctatgtctctgcatctctctctctctctctctctctctgactatcataaataaataaaattttaaaaaattaaaacaaaacaaaaaacaaagcatacaacaaaacaaagatggagtttcgggatccctgggtggcgcagcggtttggcgcctgcctttggcccagggcgcgatcctggagacccgggatcgagtcccacatcgggctcccggtgcatggagcctgcttctccctctgcctgtgtctctgcctctctctctctctcactgtgtgcttatcataaaataaaataaaataaaaatttaaaaaaaaaaaaacaaaaaaaaaaacaaagatggagtttctagttggggcaatagcagaaaaaaggtatctaaagatcattccttagtataaaaacactaagaacacttctagagtagagagaagaaagcaaaaagccaggtcctaataggcaatgagctataaaaataaggcatgccagggatgcctgggtggctcagtcaggtgagtgcttgactcttgatttcagctcaggttgtgtgatctcagggtcctgggatggagtcccaggagtctccaggctgcttctctcctgtccacccccatccccactctctctaaaataaagtaaaaataaggcattctactcagatttccccaggctctgaagaactagttcacttataggggcactctccaagtaagtgggttccaataccggctctccctcggacaccctgtggctaagcagtttgaatggcaccttggtttcaggtgggatctaagagctatttatatctaactattgggtatccccaacccctcttcagtaaccacaggaggacaaaccaaagacaaaagtatctacttactgtgtcccaggcttctttatttaagaaagtgatgagtgatgtggggattaaaaacaagagcatccttgaacttcacctttcctccaaccagccacccccctccccgaaactccctgcctctacaccctttgtgttcccagatcctttcttagtgaatgaagaacttaatcccaaagccctgctacaaaccccaggttctccttccctagcgctccttcttcctctggcccccattcctgggaagggccagcacctcaatttgaatgcatgggagagcccagagtggtgacagacacagagggaaagccttcaccctcagggagagggactgaggagtagagcgtagtgaagtgagggcccccatagcctggggtaccaaaatggggccctggcgccagaggaaaggatactggtgcccctgagaaaggggacccagcagcctcaaaatcctctcgttgcgaatagtcactgcttgatcgtttgcccttctgccgacgattgcagaaccacactcggaccacctgggatggaagacacgaggtacagtgacacttgatctgaagctcagggaaatggggctggctttgcttagtcatttgacccaaagccaacaggtctagagcggttggaggacaagaggcagagctagggacagggaggtggtgacgggggaggagactggaggacacggacaaggcactcacatccttctcaaggccgagctgctgggcaatgtggctgatctgctgcagggtgggcttcgggcactgcaggaacatgttctccaggttgcctctcactcggttctcaatacttgttcgctttctctttcgggcctgcacgagggtctctgctttgcatatctggggagatagggagtgagtggcaagggaggagaaaatggaatggcaggctttggatctcttgagcaccatgagggtagtgactccagagctcgttgctaagggtccccactgactagatgggtcaccagcaacagatggtatgaaatagaatcctggaaatgtgggtctagacaaggcagttctggacccctttcccaacagaaccaaggaattctattccatcccgctgaggattactgcccccaagaaggaaagtgacaaaccagggacagaagcattgaaaactgggccaagagactggggcagttcactgagcctccctccccaccctcacctcctgtagattttcattgttgtcagcttcctccacccacttctgcagcaggggccgcagcttacacatattcttgaaactgagctgcagagcctcaaaacggcagatggttgtttggctgaacaccttccctggggagaccagttgaaaaaaatacaaggtgaggcaggaaggcaggaggcagtaacttccggaccccaagacccagggcctccccatcttttccctcccaagacctcacaccagggttctacttcttcccacagggaactcaaggtccaggtattttttttaccctccctctctaccctatttcatgtgtggaggtaaagcctgcccctgccccctgcccccaaaacacccttcccttgctcccctggtgggaagaaaagcccaagcccaggcgtgttcttccagaggtgtgttccctgtgtactgtgggtcaggacaatactgagggagacccaccaaagagaacccccagggtgagccccacatccgcctgagtatatcctagggtgatcctcttctgcttcaggagcttggcaaattgctccaggtctttctgcagggctttgatgtcttgggactgcatccaaaaaaggcagaggatacataagaacataagtgtgtaacttgtccgtcccccttcccacctggaccccaagaacctgactgtggcctcaaggaatggtccatggagtatctgcacccagattatccaccaaaaatctagtgatgacctatctacaaacgtcattcaccccagaaaacaatgcatccagtccacacagagctccatgcatgcacagacggaaaggcaggccctggcctccatgagagcaaacacccatccagttattaagggagctgctgcctgtgagcccactaatacaaaagattttatgagtatgaccccaacttgaggcggttttgagactagacaaagtaaagggcaccatgtctctaattgtcatttcaatatattctcccccagtgtgcttccacagtaggacagggtatgcatagacacaaacacacaacaaaatgtatttctgaaaaggtgtgaattaaatgataggtagacagctggtgctcatttttaaaatcaaactattccttatttttactctatctttttgcaacatacaggcattctccttgatgaattcaacagatttagtgctctttctgtaaaccagtggctacacaactggacagaaagccctggcctcaaggggcttccattctaatatggagagacaagtaattatccagtatgttactaggttagaagcactatgggaaaaggtacagcagggtagattatgggcatggggacaattttaaataaaagaaagtgatgctcgagcaaccccatgcggtgagtggtgcagggtgaaaggctgagggctgggaagggatgagaggagctcacgaaatccaagggggggtagggtagattctgtggatactgtggtgcgtgaaacggggagctgctgaatggatgtggagtaaaatgatctgattttgaaatgttcactccagttgacatgttgacatcagactaaggaggcaacttcagtaaacacccccctgcctcccgcatcccaccccatcttaccccccatagacaggggggctgggactagggcggtagtgattgcttcagggtgtatttccaaggcaaagatagcttagtttccaaaagatgggatgtagaatgtgaaaggaatgaggacaaccggttggggccttgagccgctgggtgttagatagggtggagcagttcatgtcgccatcccagcaggagacagaaaatgtggttgtcctgtctacaaggcatgtgagcttgaaggtagatgagaggaaactaaggtagacagagcaggtgatggacaggcactccaatgagggcaggtggccaaagggaccagtagagcagctaaaacttctgtgacgtcccggaggctttgagaagtattccgagggtgatcaatcccatcaagctcaaagaggccaacttcggctcagttcatgcttcagacctttaaatgtcttccgctccccatcatggctaggtgatggggagtggagtaggtccaaatcctactttggggatttgaaatacagtaacctctgctcagatcctagcttcatcatttagtagttaggacccgtgaaacaggctaataatgcctccccgggagattttgtgccagttaatgaggtaatgatgtaggcactgagcacacagccaggcacttaggaaatggacaattggcatccattatcattcaaggcccactcgcctcctacaaagtctaggactcggctggctgaagcgctcgcacctccttctgggaggtctaatggcttagtacttgatctctaattgcttacactggtctctttggagggctggaagctacatccttaagagtccttggcagggggacgcctgggtggctcagtggttgagcgtctgcctttggctcagattgtgatcccggggtcctgggatcacaatctccccgcagggagcctgcctctccctctgcccaggtctctgcctctaggtctttcatgaataaataaataaaatcttctaaaaaaggaaaaatccttggccagggctggacacataagtctttcaggccctcagcagaccctacgtttggggaatggcctggcggggacatccaccacttcagtttttgtctcatttacaacttacggaattaaggccgatatcagttaaagttctctacgagggggtgccagggggtgcacttgcgtaatggtgactcactggccccaaggcagaggtcaagggaaggcaagccctaaacttgacggcaggtaaacccagccccacgcttccacacacagcccaaacaggagcttctggcagaaatcagtcacaccctacacttgcaggaacaataaccctaggataagcacggtttttaccctcaggccgtacttaacccgaaggccaaggtcctgagtcccgtagggatcaaattttcaagaagggttaaggtgggaagagggtctcaaaccccaagctgggtctggtactgggctggtcatcagagtgatgccaccccagtcagcccaggcctggaagtgggaaggggctactagacgcgcaggggggtgggggaacaaggccagcctggggcagcttccgacccggggctgcccagcgctctgcttgtggcttctcaggccgcacacccctctctgcccgggtggccgccccagcccggtcccctgtcgcgctccgcgcctaggagcctaggccaccgcctccgcctcccgcggccgccccccaacccggcgccccagcccggctgcagctcactcgcctcctcggggttttgctccagcttctccttgtccggcttcacgaccccgggcggggcggcgcagggctcgggggaggccccctcggagctgccctccaggccggctccccgctcgccctccggctgggaggtgtccaggccgccttggggcagcagccccactcccacctgaggtccacagtacgccatccccccgcagaactcatagggcggggggcacggggggagcccccacacctcggcgccaggtccgaccccgggcccgagggccggcccgcccggaggccccgggaagctcagccaggcccgggggtcaccccagccgggatccggccctcccggcccgtcgcctccaccgcccggcgagggcgagaaggccaagtcggaagccaggtgtcccgccatggggaacagaggcgccccaagccgggggcctggaaaaatgagggctctcctaagggctgctcaacacctctctccctccccaatcccacccactggccttgacctctggccccgccccctggatgggtggaggaccagggcggtgggggtgggagaaactgaggccaagggcgctggcctgaaggtggcggtggtcggtcgctccagctaggcacccggtcagagccgtgtggggtggcctggacactcctccctgtgtnnnnnnnnnnnnnnnnnnnnnnnnnnnnnnnnnnnnnnnnnnnnnnnnnnnnnnnnnnnnnnnnnnnnnnnnnnnnnnnnnnnnnnnnnnnnnnnnnnnnnnnnnnnnnnnnnnnnnnnnnnnnnnnnnnnnnnnnnnnnnnnnnnnnnnnnnnnnnnnnnnnnnnnnnnnnnnnnnnnnnnnnnnnnnnnnnnnnnnnnnnnnnnnnnnnnnnnnnnnnnnnnnnnnnnnnnnnnnnnnnnnnnnnnnnnnnnnnnnnnnnnnnnnnnnnnnnnnnnnnnnnnnnnnnnnnnnnnnnnnnnnnnnnnnnnnnnnnnnnnnnnnnnnnnnnnnnnnnnnnnnnnnnnnnnnnnnnnnnnnttccaattttcagcctgggagtggaccggcttctgctctcatttgcacactgaacctgattaccatctgccgaacccaaagagagcttggccgttcagggcttggttgctttgctttattctctcctgtagaattttgtgtagctcccccaagaggaatggtttgcaaagctccaacattattatccataatgtataaagccctcaaacatatattgattgacattaatacaacatgtagtaaaatggagggtcattctctcacatgggtgggaatgttctggatataaattacctttataactatcaggcggcaaatgcctgttaacattacagtggcctttcatcagcctgcaggctatgtagcttggagtcttcacttctatttgaggccttttggttttatctacatgttttgtataaaacattgcctttgaagtccagccccaatcccccccccacagaatccccctcaaagcagctaaaagaactccagcaacaccacccccctttcccctcaaagcctgagcctcagacggggccccccattgagaacctaggtatcctgctccccttcctctggaggactggggcgtccagcctcctcatccacccctcccccagagccccaggccaagggatgcactttgtttagtggggctggttgaaagaagctgaagaggtggagagcgatttggggagggggtgcaggaagcctgccctaaactctcccgcccagggtctattttcctgggccttcctgacagtcctgggggcccatactgttggcttagtacttgattctgtttgcaagagaatagctctcaggcatcctgtctatgaaggaggatgtctgctccccaaacctgccttaaatggaggctctagagtaaattgggagatgggatcaaagttccccacagcttgagaggtgagaatcctgagcttagggacactgacctctgccaactttgaggcctgtcttcagctgggcccatctgtggttgtttgctggggcgagtggctcagtgtctgcattctgaggggctaggcatcctggtggggccctcctgaaagtgccctgctgtctgtacctcagtatctagaaggcttttgagcctgtttttcttttttcttctgacctgtataacacagccctgttcatgtgcccatctctgaattttttggacaactaactatatgcgtgatttcaatacctttccataggtctgttgaaagatctaactgcattcacctctaagccactaactgcccaaaaggcagatagattaagaggccaggtgggggtggagagacgagcattagaacaggagggggcccctcccaagcaattttggcccccccccccccccccgccccgggacagggccatcacggcacctttgtcatgcatctatctgctgtctgccatgaaggcagcctcctggaggagggggaagggcagccctaggtcttggctgaaatcccctacaccattgcttcccagaaagcgtattctacgctcccagaaccctctctccccatgccagtccagggtgcccctgctgcctaacttcccagcgactcctcaaacatcttcccagcttccctactcaacaccaccctcttattttttagattacagtttgcaattgctctaggtgatgtttctggcctgggcaagaggcccattccagagagacaaccggaagagaggtgggtgctaggatccctggtcagcttgtagtgggacacctgagccaggtcagccccatgctcccctggagacctactcagaaccttaatgacaagttaaatttgtctagaccccaagcctggcgttcttgggggctgacccaggctgagacatgctcccctccccatctccatcctcccattgagcctgggggagggggggctatccttgtgccagccagctgtctgcaggacagcccaaggttgtcggcctagaggagacttggaaatgagattgagtcaccagacctgactcaactttcctgggtcataattacagaatcactaaaaaacttcaagtcccccaaaccaatttagggctgggctcacaaactctccacatatacctttattatatgaccttgcaatgtcaaggcccttcacagagacaaatgggagtatctgattgcaaggcactcacaggagactcagggagggcaggcaaggtccacactccccatgtgtggctggctgggtggctgcaaagcgaggtcagccaaactgtccccttgctggggcatcggggtgaaaaccagctgaaagggctcagatggagaccagtggagacctgccctacaccagtgtagcagaccacttatcttgatttctgggttctatcaacctgtaggcaaaagaaagcaaggagggctgaggtgagaaggttcaggctttgccttctctgggagattatcagaagtcagaagtcaggagtaaaatgtccatagaacagggttcttggtcctggctctggctccctagcacctcccctatcagtgcctcagtttcctcacttaataaggaggaattggattaaatgaactctacatttccttccagcctcaacataaaattgctgccccgttcctatattcccctctatctacctttgtcatgcgtttgccatgggaatatagatttctctctgcacactggtgaagagaaattggggttggaggagtgggggggggcacagtgagaggctggcactgggcttttctgcaccccacctccccacccccaagcaaccttcctgggagatctggcagatattcccaccaagtctgatcaaattacatatgaggattttgagacgccagtgtgctcttgattttcagtgcttgggaggttacaagaaacaccaggaggtaaacttatcatggaaaatagagcccaggtgtgtgtgcacaggcacctgtgtctactgggaaggagcacccaggcaaaaagcctgagaggaaacaaaaatcctaactgactccttcttcttttcatattgcttcagttgctctctttaagtctctgcctcagggatgcctgggtggctcagcggttgaatgtccgagagagagagagagagagagagagagagagagagagagagagatgtcagaagatccctagggtcattcccggctctaagattctaagcatccctgctgtcctgcccttcttccagagaaaggtgtacggtagcacccacagcgatcaccgcagaaggcaggagcccacagaagatccaaactgtgtgtgtgttggaggggtgcttagaacaaggagctctgaaaggtgaggccacgggggcccctgatggaccagctagactctcccctcttctacctttacctgggccaccctgactgctcatctgagctcctgcagagacccagcattggccgggtgctcccccaagacaggagggcctctgctcacttcaaagggcatctcaggctgtaagcagtcccatccctcaggggatcaggtggcttgaggtcctggggattcagggttcagaggcagcctgtctgtcagctagattagttgcagtactgctggaggacagaggcaagggccccacgtgttgggatgggctcctttccaggggctttacagagagtcacacacactagtgggacagggaggagcagtggaaaggagaccaaaaggcctggaccagggaacttgctgcctctagtctggccaaaatgtcatgcatgcatccatacaggccatgccctaccctgagtgctcttgagtgctaagccctggtggagagcccttgaagaccaggtggagaaagggttcaccaaatacatgggagagaaggcaagcagaatggctaggctggtcagccagggaagtatgctcagaaagggcgcaggtaatatggaagtaatgaaggagtgttggctgagaggcctgcttagccgggtctccccatcccccctcccctccctctgacactgatcagtccacacttgtcactccaaccgagtccgggccccaccccagctcccaggtatttctgaagagagtagatgcagctctgggtcaggaagccttgctctttcctcttctccccacatgcagttctgcttttttctcggcttgctcttgctggagtggaaaaattcccacatgctgagacgaagtcctggcctgtgttctccgatgctctggttccttagcgactcacaaactaccagtgtctggaggccatgtgactctgaaatgccaaaactcctgaacaccaaagttacaggagagcaaacagtggctttctccacctccactcccaccacttcccaaaatgcctggaattcccttctccaactgattaaccttcgctcattctcctagacctgtctccactctcctgcatcccagcaaagtcacgctgcatcccatcctccatctcttgcagcaagtggcttgctcatgccacacttatggcactgatgacactgggtcttgtcacctcaccacgctgagacctgttgagggtggaaagccattgtggtccctgcacagcatcctgctgacatccagatctaaacgctattgcagactgtatggcccaaggctaatgtaaatgagcctctctgagcctctctgagccctactttcctcatctgggaatccgagataaaaatagtaaggactgggcagccccggtggtgcagcggtttagcgccgcctgcagcccagggcatgatcctggagtcccgggatcaagtcctctgcctgtgtctctgcctctctctctctctgcatctctatgaataaataaataaaatcttaaaaaaaaatttttttaaatagtaaggactatttttttttccaaggtaaggaccttggaagtaaaaatccaatgaaagaatgtatgccagtgttcatgtaaaacccacctataagaattcaaggactaaaaaaaaagaaaagaattcaaggactaggacacctgagtggctcagtggttgagcatctgcctttggctcagggtgtgatctcgggatcctgggatccagtcccacattgggctccctacctggaggctgcttctccctctgcctgtgtctctgcctctctctttctctctctgtgtcttgtgaataaataaataaaatcttttttttttaaataaataaaaccttaaaaaaaaaaaagaattcaaggactggtagctgctactgtcatgtgtattattggtgatgcacaatgaacagcattttcatgaccctcagatgttcgctagataaaaaaagaagatgtaagttagaaggtgcttcacttcagaccccgaccagtctccagggttcctgtgaactactggtgggggtagggaagtgactgtcagaaaaaggccagttatttcccagactctggatttgaaaaagctggaattgttttttcacctgaagagaaggcttgggagcccagaggcaatggggagttctattcctattcctctgctgggctaaaagtggggagttacacttacatcctacatttgccaatactcaacacctaatatgcagtcttttttttttttttttttttttaatttttatttatttatgatagtcacagagagagagagaggcgcagagacacaggcagagggagaagcaggctccatgcaccgggagcccgatgtgggactcgatcccgggtctccaggatcgcgccctgggccaaaggcaggcgccaaaccgctgcgccacccagggatccccgcagtctttttggcatcactgggtacataatagggtttgggttcagagatataatcccttaggtggaaggaagagatactatccaatctcagtggaggatgctatgtctagagcacccggcatatttatttggtgcccaaactgaataaatagttgaatgataacgaatgcctggttccgtatctttaggcctgtagtgagtcttccaccaagactgccccctccccacccttccaccccacccccagtcacctttgttgtaattgttctgcttcatcaggtccttggcatgatgataaggtgctgagctctgacattcagtctgagagtcagcttctcccaagctctgggaccatggcctggcatgagaagccccatgctctccttgcagcaccataagaaaggctagtcctccaagtagtttgagattcctaaggagcttgcccagcactgagctgggaaagagcaatgaagttctatcgcagagtatacctggctgagggaaaataaatggtggtcagggtttatccctcacaggcttcaacatacgacatggccctacaaggttcctgtacttttagggcaccaaagggatagtaaaggaaatggagagtgaatagtgggaaggaaaacttttgtttctcaacaggctctcacccaagctcattgctttaaatagtaatgaccaccagtatctaaatccctgtacttcacatcagtatgaacaaccacctgttggccctcttgacctagagtcctacactgcctcaaactcaacacatccaaactgagtatatccttagcctccccccaccatagaacaaccggaccttcttcctatattcctgataggtgacatcaccatccagtctacccacttactcaagtcagagctgggttgtggtgtggggaatgaccttgatgctatagtagcctgctggtgcagtaccaggaagtcatcccagaagtcacagaataaaaaggctcacagactagggcacctggcaggctcagtcattggagcatgattcttcatctcagggtcgtgagttcgagccccacattgggtgtaaagattactaaaaacaaaaatgaaatcaactttattattattatttaagattttatttatttactcatgagagacacacagagagagaggccgagacgcaggccgagggagaagcaggctccatgcagggagcccgacatgggactcaatcccaggactccaggatcatgctctgggccnnnnnnnnnnnnnnnnnnnnnnnnnnnnnnnnnnnnnnnnnnnnnnnnnnnnnnnnnnnnnnnnnnnnnnnnnnnnnnnnnnnnnnnnnnnnnnnnnnnnnnnnnnnnnnnnnnnnnnnnnnnnnnnnnnnnnnnnnnnnnnnnnnnnnnnnnnnnnnnnnnnnnnnnnnnnnnnnnnnnnnnnnnnnnnnnnnnnnnnnnnnnnnnnnnnnnnnnnnnnnnnnnnnnnnnnnnnnnnnnnnnctctctctctctctgtgactatcataaataaataaaaaaaaatttaaaaaaggctcatcgaccaaattaagatgcttgacacatggtttattggataagggtaaagcacacagtgaggagcaagaggaaagcagtggggtacaagttggatggaaggatcatacagcctatattctaggttattcaatgtgcatctgtcctgtcagacagacgcctcctgaatttcaagtgcctcagatcatatatttagggtatcatgaatatcatgagcacctggttggcctcctctccctttcttttttctttttaaagattttatttatttatttatttatttatttatttatttatttgagagagagagagagagagagaacatgagcagggagaggggagaagggagaagaagaagcagaccccgctgagcatagagcctgacacaggggctccatcccaggaccccgagattatgacctgagctgatagcagacgttcaaccaactgaggcacccaggagccccagccttccctctttttctatctcagttcacaggaatacattctacttacttatcaatgtctaacatgtctcacaaattaccaatttacttaccctcatgcaacacttctgataattacatccatcccatttgttttcctgcgttttttttttttttttttaagattttatttattcatgagacacacagagagagaagcagagacacaggcagagggagaagtaggctccatgcagagagctcgaagtgggacttgatcccagaactccaggatcatgccctgggctgaaggcggcgctaaagcgctgggccacccagggacccctgtcctcctgatacaatcagtgatctatctggaaacacatatcttactgcataccactctgctgctccttcaagaattccctttgttctcgggatgacttccaagctccttagcaggctaaacaaggcctctcaaaggctgacttctctaccctcatcaccaattactccttgccttcactggaccatcttggaacaggaatgtttgagaatctctatagtcctgctgctgttctatgttccggaaaccgtccactatcaaagggagtttctttcctctgttctgctccccccaccagccacattaaactctgaccctggcctcaaatcatctactacagggcagcacccctttattagaggtgagctctccaacttaggggtcagtggctaatccataatacacacaccctccacactcctctacagctgtacttccctaaggggccatcctttttcttgtcgaaagttaacttcttggcctccctttgatccctgggctatgcccttctatccagcagggaaacccagtcctgagtggcacctcttaagagagatgcgaaggtacaatgcagtgctccccaagctcaccagagcctaagaatcacctgggttatttgttttctagtctttttctttttctttctttctttttttttttcttttctaggctttttctctccagaatctgactcaggagatttggaggaagcctaagaatatatttttaaaaaatatttattggggatccctgggtagctcagcgattgagcacctgccttcagcccagggtgtgatcctggagacctgggattgagtcccatgttgggctccctgcatggagcctgcttctccctctgcctgtgcctctgcgcccccgccccccgccctctctctctgtgtctctatgaataaataaaatctttaaaaaaaaataagattctaaacttttttttttccacttagtgaatacctatctcctcaaatcttgcttttgccttcacctaaacatgatatggcaaaggtcagcagccacttcctaattgctaaatccaccaactccttgcacctctaacctgaggtggtctctcagcagcctgtggccctggatctctttctcttgtcactgtcctgcttgggagccgactcttctcaagcctccctgacagccttcagtgcctaggcagtgatatcagtttttctgaatcactccctcaagccccaacctccaagcattttacaagttttgcctggagaaacccattcatctctggacttctcttgcagctcctaccatctctctgcaagtagctgctttgtcaagtctattcattttactgccttgcctgagacctttcaatgagaccctccccgccacccttaaaaatagtcaatttcttggcctggttcctgtgggggactgggaattgcctaggatttgtgatcagaaggtcctagattgacattccttactcacaaacacaccaacagcatggatttatgaaatagcctaacttccaggcttgcatctctcatctgtagcccaggaaaataagacctaaagttatatggctgagattcaagagtttattaggtgcccagacagcaatgacaagagcgagcacttgatttagttggtgttctcccagccccaggcaggttttcagatctacctgtggtttccagaatcccactccagctgtgccccaatctagtttgtctacccaagaccctgctcatctccaacagtcaatgttaaccacctcctctcaagtctttctgcacctccacaggcagaactcactcctctgctgggaagcctcaagaccctacatattctgctgtgatagcagctatgtctaatatttttttgcactaatctgctcagtagtatccatcaaattgacaccctttaagaccagaccttattcttcttttcatcactcatgcccagcaggaagtaattagtaagtggaggttgcaaaaaggaatttgacgtaaaattcattttttctcttcatctcctgccatgctgtaggacaaaatgtaggggttaagcttaaggttcctatgtgggggagaggattcagggtaatctattagttcgaggcagctagtttcagaggaaacgctacccctatgccaggcgttccgtcttctcagactccagctccccaggcctctccagcccggctccaggaagtggtcacaaagggcctcataatagaggccacagtttgggggcggtgggttggggtgaaggggaggggtctacacaatccagtctcctcactactcagcgcccaagtgtcaggcctccagcggtggaagtgcaacactcggcctcagtctcccgggaggtcaagccgccggctggtctgcggcgctgggcgttagaggccgcggtcggctggctcggaaggctcaacagggccccctaccgccggctcccgcagcgcgccgcccgcagcaggcactgcagccgcgaagggctccgttcagccgcagctcccaggcctccgcgccccgggcccccgcggccccaccccgaaggctcccattgggcggtgtctgcctgggaggcgggacttgacctttccttgtatcccattgggccaaatccaatcggaggcgggattctgcgctccgcaggtggggagaggtgcttagggccacttgaaattcgggattttgcgtccttggtcactgtggccctatgagtgttttaattctcggattcctcaccaattaaatatcatgttttcaaaaattcactttcatttctgatttccaagcctccgaccaacaccaacttgcattctcagtcacttgaagatgcatcggaagttttgtttttgtttttgttttttttaattttaaattgtggtaagatacacataacataaaaatttaccattttaacttttttttttaaagtagccttcacgcccagcgtggagcccaacaggagccctgaatgcaggactctgagaagacttgagctgagatcaagagcccccatgcctaaaaggctgagccacccaggtccccccccccccaccatcttaaaacgtttatgtatttaactaatctctacactcaagttgaggcttgaactcatgaccccaagatcaagagcgacatgccaagggccccctattttaaccattcttaagtatacatgaagtacatttacatgacataaagtatattcacattgttgtgcaaccaccaccaagaactttgatatatggagtataaaatttaaattacagacgtagtgcatgcttaacgttgtaggtgaacaatccaaaactttgtgaaagaaaagttaacaaatgcactgttttccactaccaggaggtagccactttaacagctgtgaaccctctctctgatgaccatacaagcagacagccacatatttgaggcttgctctttgtactcttacaaagataggatagtactacgcataatacacgtaaacttacagacatttctttgtatgcatagattaatcacctatttatctacctatctatttattttaaagatttctatttatttattcatgaggaacacagagaaagaggcagaaacacaggcagagggagaagcagactcccccctgggaaccgatatggaactggatcccaggatcccgtgatcatgccctaagccaaaggcagacgctcaactactgagccacccaggtgtcccaatcaccttcttatttatttgtttgtttgtttttcaccttttcaataacaccgtaatagtccataatatggacatatcaccatttatccagtgttttcactcttgagggacattttgattctttccatttcaacactacaaattctttccatttcaacactacaaataaaggtacaataaacatccttacagaggcacctggctggctcagttggtagagcatgcaactcttgatgtcagggttgtaagtgcaagtcccacactgagtgtagagattacaaaaacaaaaaacaaaacaatataaaacatccttatatatttataaccttcccctctatggattgctaggtcagcataagtgttttcatttatactttcagattatattcacaaaccatggaagcagtttccaatctccatagtttccattcttaaaaatgcaggccatttggatttgtaattaaatctgtaaagggggctgaaagtgccaagtttatctctgcctcaaggagattgatttagggtcagtgttacttcatttcttaacagtctggctctgaggctcgctgtggccatgatctctggggtgagcctggtggaatacagtcaaggggtatgagaggtttggaagaaggctgggacctgggtaaagtctgcgtaggcagtgatgaccagtggaacccaagtgtcctgagtctatgtttttaggtactggtctcttcactccacttgtcttccttgttctggaatgagtttacccatctctccagaagactgaaaggaatttagtcagaagggcattatttggaatgcctgggtggctcagcggtttagcgcctgcctttggcccagggcgtgatcctggagtcccgggatcaagtcctgggatctagtcccacatcaggctccctgcatggagcctgcttctccctctgcctgtgtctctgcctctctttctctctctctgtgtctctcatgagtaaataaataaaatcttaaaaaaaaaaaaaaaggcattattaacctgtgtccagacttgaattccagtaaagagagttccagccatatctggatgtgtcagctctgtccaggtccccttccctgcattacttctgtcctccctctaacgctggaagtgacacctaatttttaacacgggaaattactacgatatagtctagtgtctttgttcccatcttagaccctaaactccttgagagcagactatgtcttactcattttcttatccttagaggcaagcacagttcttggcatagaatgggcacctgattgggacacctgcttggctcaatctggtaagcatctacctgcatctcaggtcatcaaccttcagctcagggtcctgggatcaagcccagcattaggctccctgctcaacggggagcctgcttctccctctgccaccacccccccaccccagggctcatcctttttctctctctttaataagtaaataaaaacttaaaaagaaaataggcatttgattgtgaagtgaatggcctggtgtgggggaaaggtaaatggttgaaaggctgagattccagaaggggagggcccaagaaggacaaaagcaatttcttcttccatccttccctattcctccagtcattgtggggagagagagaagaaagagtgctgggtggatcagagaggatgattccagtcctttgaggagggctccaggggtacggagagagaacttctctacggttttagggaagatcagctcctgcattatcccccatctcataggctattcaaaatcttccccttcttaggagtattgaggtaagacgatggaaacggcacgattggaggcaggagtctcaggtatcaatccagctttgctcctggtgattttgtagaatgattatttaaacccttgactctcagttatagatctctaaaatgtaaggttcctcttcacatgaacattgtgaagattaaaagagatattaatataagttcccagcaaacaatatatgctacaagaagtgagctacttcccccatcagttcctttctctgcccccaagactctaattgctcttctggccgcattcatctttttctttcctgaaatcatacaaatcacaaaatgttggcttgcagatatatatgttcctatattgtcatcatgtggttgtttggtacattttctctcttttttaaaaaaagattatttatttatttatccatgagagacacacagagaagcaaagacacaggcagagggagaagcagacaccccacaaagagcctaatgggggactccatccagatcctggaatcaggacctgagccgaaggcaaatgctcaacccctgagccatccaggcgtacccattttctcttttctcttaaaatgtgaaggtaccagagatccggtgttttgagctctttctgcttctcttttctctgagctaatttgggtgtctggcaggtgtttcagggtagttatgaatctactcagaaaaaggtatttgtgcagcctcctcactctgtgggattttatttttttatttttgttttttaaattttttctttttttttaagatttttatttatttatttacttatgagagacacacagagagagagacagagagagagagagagagacaggcagagagagaagcaggctccatgcagggagccagatgtgggactcaatcccggggctccaggatcacaccccaggctgcagggggcgccaaaccgctgcgccacgggggctgccctctttttgttttttatttattttttatttttttaagattttatttatttattcatgagtgagagagagagagagagagagagatgcagagacacagacagagggagaagcaggctccctggagggagcctgatgtgggactcaatcccaggtctccagaatcaggccctgggctgaaggctgtgctaaaccgctgagccaccagggctgcccctctttttgttttttaaatagtaatctctacagccaatggggagcttgaactcatgacccagagatcaagggtcacatgtcctactaagagagccagccaagtgtcctgattattttatattcctataagcaatggatgagaattcagatcattccacatccttacaaatatttatagtttattaatctttttactcttagtcattctaatgagtacatactggtttcccattgtgattttactctgcattttccactaatgaccactgatgttgaaagttttttcatatatatattgaccattgaccattcacttatcttcttttgtaaaatccctgtttaagtcttttgttcatgttacttgttgttgttggttttgtttctttcactgtgaaattataggagttgtttatacactccacatccagatcctttgtcacccacctattgcattgcctggcggatgtgtgttgaatttggtgtataggtatgttttttactaagactttcattttattttatttcttgaagttaactctatgcccaaagcagggctcaaactcatgagtctgagatcaagagttgcatgctctacccactagacacccctttaccaagactttctaaaaaatccctttatttggcatgtttaagactttgtataaattgtttctctctgaatccatcattctgtagcttgctttttcggttaacattatatatgaaatgaatccatgtttatccaaatagttcatttatttttattatgagatgggatccaatatgctacaatttattccctctctccattgacctttagtttgtttctttctttttttaaagattttatttatttattcatgagagacacagagagagagagagagagagagagaggcagaaacaccgacagagggagaagcaggctccatgcagggagccctacgtgggactcagtgcttgatctccaggatcaggccctgggccgaaggcagcgccaaactgcggagccaccagggctgccctctagtttgtttctatagtgaatgttctagggcttctctctttggttccttgtgtaagttcccctaggatatgtttataggagtggaattactgcacatctctaccacatgatgctgaattgttctctgaagtgattgcattgttttatagtactcctccccctattgccccccttttaaagcttctgtgacattatatagttctggttttctttgacgccctttgctgactctctttcctctaaatactggtgtgtttaagaactgtatatgggctgcttgctctgtttttactgccttcttaatcactctactttcatctagtcccaggattttttttatagttttttttttaaagattttatttatttattcatgagagacacacagagaagagagagagagaggcagagacacaggcagatggagaagcaggctccatgcagggagcccgacgtaggacttgatcctgggtctccaggactaggccctgggccaaaggcggtgctaaaccactgagccacccgggctgctctagtcccaggattttatattttattttttaaagatttatttatttattcagagagagagaaagagagagagagagagaaaggcagagacacaggcagagagagaagcaggctccatgcagggagcccaacgtgggactccatcctgggtctccagaatcacaccccaggttgcaggtggcgctaaaccgctgcaccaccgaggctgcccttcccaggattttaaatatcatttatacacagcccgaaatatatatctacatcttatcatagtttaagaaatagcacacccaaataggtgctcaaatatattgtgcagatggaattgcaaactggtcatgtttttctgaaaggcaaaatggcaatttctatctataaattaaatttctatctaataatttttttaaagattttatttatttattcatgacagacagagagagagagacagagacataggtggagggagaagcaggccccatgcaaggagactgatgtgggacttgattccgggactccaggatcacaccctgggctgaaggcagcgctaaacctctgagccaccagggctgcccaatttatgaataaataaatctttaaaataaaaaaaaaagacacaggaagctcttaatacatctttatgggagggtgtccatggtatgtggttaagtgtaagaaagtaaggtgtaggaaagcatatgtcaaaatttgtgtaaaaggaaaaaaatatattatatattattacttgtttgcttgcataagcataaaatgtctttggaaaaataagcaagggactaatattagtggttacctgttagggatgggataggggtgagaaagagactttttatctttttgaagcttttgaattaagatataaaacaaaaaacaaaacaaaaacataatttcaaaggagacaaaaataaaattgaaaaactcaaagtaaataaatgaaaagaaagtgacaggaataattcctctactctttttttttttttctctactcttattaagataaaaaattggggggatccctggatggcgcagcggtttggcgcctgcctttggcccagggcgcgatcctggagacccgggatcaaatcccacgtcgggctccctgtgcatggagcctgcttctccctctgcctctgtctctgcctctctctctctgtatgactatcataaataaataaaaaaatttaaaaaaattgtctgaaaatgtattggttcttgaacaaggatgtttactaccatttaaaaaatatatattttatttatttatgatagtcacagagagagagagaggcagagacacaggcagagggagaagcaggctctatgaaccgggagcccgatgtgggactcaatcctgggtctccaggatcacaccctgggctgaaggcagtgctaaaccattgagccacctgggctgccctgtttactaccgttttaacttagcaggttattttctttttaaatgccgtatctgggcagccctggtggctcagtggtttaggcgcggtcttcagcccggggtgtgatcctggagaccaggggccccctgcatgaagcccgcttctctctctgcctgtgtctttgcctctctctctctctccctgtatctgtcatgaataaataaataaaatcttttttttttaaatgccgtatctttcttgatatatttgtttttcattcattaagaggtagaataagggcacgattattcaacaaatgcaattcgtttggtcaaggacatcgaccaagtcttgtttcagcaggaaagccccatctacaagactttttggttgttgatggttagacacaatctttgtagctttagaagtctcaggacgccctctagtgtccatatggattcaaagtccaatgattcaaaaataaatcactggtgcttctagtctaggacatcttattgtagccatttgccaaaatagcagaaccatcattattcgcccattgtgttatcctgttagttggcttgtcattgtcaggctatgctaccctatctttggattagaaagtgtgctcagagttcctcaggtggcatcataggtcccaatggctgagcaagggcctggaggtcaatgctgtgagttgacttaagtcaacttataagttcacttgtcctgggtgtccattgggtttctactcatacctcaaatgcagttaacatttgtgaggggtggaagggcctgaggggacaggaacgaatctttggaggcacagttgccccaggtgctgtgtgtaaagtgctgcttctggatcaccctctcagacctccatgtctggtgcctgcctggatgtctgcccattgctggaactcaaggcaatcagacaaacacgggatcactggggttggagcagggttccaggataagccaggtgtggttcagtttgtcctatactgccgccttatagtccttttccaagccacttcgccttatccttttaaaaaatattttatttatttgacaaagagagagagagagcacccaagtaggaggaggagcaggcagagggagaagcaggctcccacctgacaggaaacctgatgtgggacttgatcccaagaccttgagatcatgacctgagccaaagacagatgcttaactgacagagccacccaggtgccctccaggcctcttctgatattagaaaccaaaccagactgacttggggctatggttctcaaagtgtggacctgagacaagctgcattggcaacacctgggaacttgttagaaatgcaaatctcaggctctacccagaacctactgaatgagaaattccaggggtgagggtccaacacaccggattttatttttttatttttttaaattttatttatttattcatagagacagagagagagagagagagaggcagagacacaggcagagggagaagcaggcatcatacagagagcctgacgtgggactcgattccaaggtctccaggatcacgccctgggctgcaggcagcagctaaaccgctgcgccaccggggctgcccttttttttttttcttctttttttcacaccagattttaataagccctccagcaggattttgcttttcatttttttttttaagatttgatttatttattcatgagagagagaggcagagggagaagcaggctccatgcagtgagcctgacgtgggatttgatcctgggtctgccctgggttgaaggcaggcacttaaaaaaaaaaaaaaaaaaaaaaaaaatgaaggcaggcacttaaccgctgagccacccaggaatccctaggattttgcttttcaaatcaggctttcctctctcaagtttcaatatgcagtagctgtgactccggatagtcagaggtcaggacactttcttaccaggaagcacctggcacctgaatttaggcctggcctgggcaaagacactcatgtcctggattctgagccatgttcacttgtcctgggtgtccactgggtttctactcatacctcaaatgcagttaacatgtttgtctcttttatgaggttttgggactccttagtcagagctgatgggctacatatatatccaaaaagcccatgtgcagcttgcacttatcattcctgttaatgtttccttacccattgaaatgcaaatctaaccactttgagatgtcacctcataccaatcagaataactagtaccaaaaagacaagaggggcgcctggctggctcaattggtagagcatgccactcttgacctcctcgttgtgagtttgagcctcatgttaggcatagagattttttttttaatttttatttatttatttatgatagtcacagagagagagagagagaggcagagacacaggcagagggagaagcaggctccatgcaccaggagcccgacgtgggattcaatcccggatctcgccggatctccaggatcgcgccctgggccaaaggcaggcgctaaactgctgcgccacccagggatcctgagattactttaaaaaaaaaagaaaaaaagggacaagaaatagcaagtgttggtgatgatgtagaaagaagggaactcttaagcactattggcggaaatgtaaatcggtgcagccactatggaaaacagtatggagattcctcaaaaaattaaaaatagaactaccggaaatttcacttcctggtatttttgccaaataattttatttacttatttttttttaaattttatttatttgagacacacacagagagagatagagagaggcagagacacagggagagggagaagcaggctccatgcagggagcctgatgtgggactcgatcccgggtctccaggatcacaccctgggctgcatgtggcactaaaccactgcgccaccggggctgcccttatttacttatttgaggaggggagaggatgagggagagggacaagtagactctatgctgagtacaaagcctgatgtggggctggatatcacgaccctgagatcatgatctgagccgaaaccaagagtcagccacttgaccaactgagtctctcaggtgtccccccaaaatagtttttgacaattgagtccatcttctatctcattacatattctttttttcttcttaagatgttatatatttattcatgagagacagagagagaggcagagacacaggcagagtgagaggctggctccatgcagggagcccagtgagggactgcattccgatcccaggactccaggatcatggcctgggcccaaggcaggcgctaaaccactgatccacccagggatccctctttttttagagagagtgagggaatgcgcacatgtgtgtgtggatggggcagagggagagggaaatattaagcaggctccacattcagcgttgggtttgatctcatgaccctgagatcatgtcctgagccaaaatcaagagttggccacttaactgactgagccacccaggcaccccgagacgtttcttttttaatataggcatttacagctatatatttacctcgcagctctgctttagtttagtttttttttttaaggttttatttatttgacacagagagagagcacaagcaaggggagaggcaggcatagggaggaggagaggcaggatccccactgagcagagaatctgatgtggggctcaatcccaggaccctaggatcatgacctgagctaaagggagacgactgccgactgagccacccaggcacttgcagcactgctttagtagcatcctctaggtttgggtgagctctgtcttcattttgttaatttcaaagtattttctgatttccattttgatatctcttcgaccctttgattatgtaaaattgttctttaattctgcatatttgtgagtttccgaaatttctttcggttactgcttgatttctagtatcatggcactgtgctaagagaacatattttgtattatttttagccctttaaattcatggaagtttgttttatggcatagcatatggtttagcctcaagaaagctacatgcagggatgcctgggtggctcagtggttgagcttctgccttcggcccagggtgagatcctggagtcctgggattgagtcccacgtcgggctccctgcaaggagcctgcttctacctctgcctgtgtctctgcctctttccctctgtctctctcttgaataaataaataaaatcttaaaaaaagctccatgtgcattgaaaagaatttataatctgttgatggatgggatgttctataaatgtcatatttatagctggtttaaagtgtggttgaaatcttctgaatgtttattgatctctgtatagttctatcgatcactgaaggtgatatattgcagttcctatttttgcctttaggtctatttccctctcaagttctgtcagtttagttttcatgtatttggtgttgagtcattaggtgaatataagttcattatttatttatttattttaaatttatttactcatgagagacacacagagagaggcagagacacatggaaggcactgcacacttctccttgcagtctgaaataccggatgccctccttgatccctccctctcaccccccagaaggaatgccttaggaaatgctgcaaagttcacctgtaaacatatccagcacccactcatttcctattatcttcccccccacactccagatgttcagcccccatccccctcctgggacactgccctgggtcctacaggttccctactagttgctccccttcacctctcaattctgcacgcagcaaacaggtgctggtaaagaaattcaatgaattgatctgttcattcttataactccacatctcactcagagaaaactcaaaacccttctactgtcctcaggctccatgacgtgacgtcatgtcatcccccttgctctctgctccagccccaggggcctcctcaccctccctcaaacatgggacaggctcctgccctggagcttgagcatggaggttccctgcctggaaagaacttcccccagacatcctcctacacaattcatgtcctccactctcccaggtcaccttctcagggaggctcccccaatccctgcagtaaggtggccaccgtccctgtcctagagcaggttctctctgggtcaccttcctcaaggctcctacctacttccaatgtctacacctcccttacttactgtgcttacacacacacacacacacacacacacacagttcatgtctgaattacacgggttgggactgtgcgtgtgcacctgtatgaggacttttttactgtaagtactatccgcggtgtttcccttccttatgatttgctaatttattgcagcttcgctcatcgtaagaacacagtacacactacccgtaacacacagtgtaagcaactgctcatgttctccgtgaggcttccagtcatgagcatgctattagttggtatgctttgggggagacatgagctacatgtcggatttcctactacagaagggggtcactgccccaatcacccaccagcctgggtcaggtgtagtctcccccgaccactagaacatactctccaggagaccagcaggtttgcctcacctgagtctcactgagctgctcagatgcaaacagtgtgtcctgcatgtgacacaggacagttacagctgaatgaatgcgcaggaagagggtctccctcttctagaagcgcctggggcacagctgttctgtggcagctcctgccccccaccagccactggtcatcagtgccccctctctctcctcatggggctgcccccacctccctccctcagctcccacccccacaccgtttctcctgcacacaccacgcacagagttcactcctcaggcaccgtgcccttgggcttcctgggtcctcttctccagccacagagaaatctacgttacactctgctttataaatcccacagggatcacggggcccagggcggggagggagggcagagcagcaggggaggcagaaactcctggacgcttatgaggaggagaacctctgacttctcccctctctacctcaggatgtgaacaataatccagaaagcagctggggagggagggggagactggatggatctggaagttcatctctccaaacctcggggactcctgtgtgcaggggacgacctaggcctgtggggacgggagcccaaaggacacctgctgctgtaaccaatggggtcaccaggggacaatgggacaggaacttggacacaagagcaagagcaggcatgaggctctagaggaacaactcaaaaaaaaaaaaaaaaagaaaaaaaggaagaaacaaaatgggggctatgctgtgacccagacctgagtctagcaggctgacccagtctcaggaagctctggctacagaaggtcctggtaacaggtgacgtccaagtccctgtgatcacaggtcctggtgagacaagcttctatagaaggggcaaggacacggagaagagaggaccccgctgaggcctgaacacgactcacccagtatgtactgagcacctactgggcactggcaccgtcccccctaggctcctgacagctttcagcccccaactgcaactgattcagcacagcaaacatgaggattctggaaggttctcagggcttccatttatttgctctctcaatttcagaaatcttttattaccttagcagccccacatcccaagacttaggaaacacaaacccctatctggatccttattttttttatttttatttattttatttacgatagtcacacagagagagagagagaggcagagacacaggcagaggaagaagcaggctccatgcgccgggagcctgacatgggattcgatcccgggtatccaggatcacgccctgggccaaaggcaggcaccaaaccgctgcgccacccagggatcccacagatccttattttttttttaaaaagatgttatatatttattcatgagagataagagagagagagagagagacagagacacaggcaaagggagaagcaagctccatgaaaggagcccgatgtgggactccatctgggagggggagagtggatggatctggaagttcatctctccaaacctcagggactcctatgtgcaggggacaacctaggcctgtggggacgcgagcccaaaggacacctgctactgtaaccgatggggtcaccaggggacaatgggacaggaacttggacacaagagttaacagcaggcatgagcctctagaggagtaattaaaaaagaaaatgggggctatgccgcaacgcagacatgagtttaggctaacccagtcttaggacactgtggctaaagaaggtcctggtgacaggcgatgtccaagtccccttgatcacaaatccttatgagacaagcttccacagcaaggacacggagcagagagatgacccagctgaggggcacacccaggatgcactgagcacctactgggcacaggccccatcccccctcggctcctgacacctttcagcccccaacttcaacagactcaacacagcaaacatgagagttctggaaggttctcagggcttccatttatttgctctctcaacttcacaaatctccttttattacctcatcagccccacatcccaagactcaggaaacacaaactcatatcgggattcttattttcaatcgggtagtaagttattagtactcaacatgaaacaaagacagggatggagatggtccagccctccctctgctggacaggaaagcacatcagagaagagagtgcacatcagattagggacaggtcatggtgggcagggtgggccaatctccccacctcctcacattatgctcctagggacacaggcacatcctgacactgtttgcagagacaagccagggttgttgatgtcatcacgtgagatgtgaacacatcttgcatcgctcagtccccacagggcagctggtctcacactgtgagaaaaaatcaagtacaaattgaggtgggtcacataagtgctgacattctcaacagccccctcgcgctcatctggttcccagtgccccaaccctccccacttcagggtctctggggtctcacctctaggagctgtcagagacacatcagagccctgggcactgtcatcgcctagaggagaataaacaggacgtggtcagagctcacaggaggtgagactaaaggaggagctgtgggggtgagctccccatggggtcctgtctacactcccctggggtctcagggattgctccctgcatactcacgtgcagcatgagagtagcctggtccttttcctcctgtgggaagaaaacatcatgtgagaggccgggcacagggctgggccaggagatcctcaaggaagctcccagtcctggtgcagagtgagtctgcagaattctgactgaccgcccaggtcagggtcaggagacaagccatgaggtgaggggtcactggaccacctgacttgctggaggtctgtcctcagcaggggccttccgctctgtcctgtgacggctgggaatcagtccccgtcaccagaatcaccaaggcgaaactctggccttcattttcccaagtgtttgctgcacagtgagtgtgagtacacagctccagtgtgggagagtaatcgcgtatggacggcacctcccgttaacaaggcaggacagcgtgctccctaggaaacccccaacaggacaggaaaacacagagtattcagtcggttccctacccgagcgctgcttcctccagatcacagctccaatcaccccagcgaccacgaggagaaccagagcagcaatgctgacgatgactatggtggacagaggggaaggctctggaaaggggacggagggaggatgagggtccagcctctggcttgagacctgactctgctgaaattctccagaagagctccacttgccctgagtagaagctctaccccgaggccctccttaccccatctccgcgtgacaggctccgccagcccctcatgctgcacgtggcacgtgtatctctgctcctgtccagagggcaccaccacggccgcccacttctggaaggtcccatctcctgcaggccttgtgtccacaacctctgtgtcctgggtctggtcctccccatcccgctgccaggtcagggtgatctcctcagggtagaaccccagcgcccagcacctcagggtgacctcacggtcagagacggggtggcgggtcacacgtgtgctggggggttctgaggaagaagaattggaaaacccacactttggttaactgcgtggtccactgagactgcatttgtgtgaccatcctagggtggacagggcagttggttcacttggaagaagcacaaagcccagtcaccaacctagcctttgggatgtcctaatctttagaaattctagaatcagggagagagtccagggtaggaggctgcaggtctaaggtagagagcacactaatggtcctgaccatggtggaggctgaaggagtcagaaaactccgagttcaagctccaaatatgttttcattggagaggaaagccttgagggaaagtcatggtcctcacaaggcttccaggtcaaagggcaccactggcggttatctcaggatggcctccacctgcctcccggagaccctggattgctccattgcccttcgagaaaagcggcctctgggtgagtcaccctagtaggactatcaacacccaggcggatcccctgtccccacccgtgggaggggcggtgttctgaccctgagtccatattcccttcctggagggaagccctccctagtggaggcgagatcggggaggcccggggccccggtacctgcgcgcagcagcgtctccttccccatctccaggtacctccgcagccactccacgcacgtcgtctccaggtagttcctcaggtgccctgcatcacctgccgcctccctcttgcgccgggtgatcagcgccgccgcgtccgccgcggtccaggagcgcaggtcctcgttcagggcgatgtaatcggcgccgtcgtaggcgtcctgactgtacccgcggaggaggcgcccgccgggccccaggtcacagccgtacatggtctggatggtgtgagaccctggccccgccccgacaggccgccaatcagtccaaagagaaagtaaaacctcccgggagttcccgcgggttcgggacggggacgagggggaggggcgggggcctcggactcggggtgacgcccggacccggaccctcggggcgacccggccggtcggggggatgggggtcgtgccccggccccgggcccgcgccgctcaccggcctcgctctggttgtagtagccgcgcagggtgtccaggtccactcggtacagctgtgcggtctccttgactttccgcgtctccccgtcccaatactccggcccctcctgctccacccacggcgcccgcggctccatcctcccagtggccgcgtcgctgtcgaaccgcacgaactgcgtgtcgtccacgtagccgacggcgatgaagcgggggtccccgcggccgggccgggacacggaggtgtagaaatacctcagggagtgggagcctgcggagccgacgggtgagaccccgcccgaccccctcccgccgcggggcccggggcccaggggagatgcccggggcggggcggaggcgggagggaccggggagcccaggccgcggggggccgggggcggcggagaggcggcttcccggggtcccgcgtccccgcccgccggtcccctcgctcccgcccgcactcacccgcccgggtcagggtcacggccagggccgccgacagcagcacgaggagggctcgcggcatcaccacctccatctccgggctccggggacactggccgtcgccgctggactggggggcggaggcggcggcggaggctttagagcccgggacccggtgccgctgattggctcctccagaaacgctgcacccaatgggagtgcgcgctggggctgcgtcacgagtctccaggcagggggccctgagccaggttgggagacgcagaagtgaaacccggggaggtggggactccccagcctgagcgtccccgccccggacccgccctggggcctgagagcctgagaggcagtccggggtcccgacaccttgccctgactcctcacctagggcacacagggctcttgtcgcactgtctccctgagtcctggcccgggagttgtgtgaggcagtgagtctagaacattctgttcccacagggcatctacacagtgtcacagattactgaggatcccaggataacgttgtggctgtggttctggctatcgcatttaccagaataggaacaaagccggtgtaaaaattcattaattcctttagaatggtattaataactcacggcatgaaaacaaacattatttgtatgaaaaataactatttccgggaataaacagcatagtgagtgaagtggttttgtcgcatttcacatttttgcaagtctctttcttgtccgtctccttagaagatcactgctcgttcagttttacttcacttactgtcttgttttggttgaagtatatgaaaacatttatatccttgcataaattggggagaatcgtatatttcataaccttttcaggttttgaaactacacaagttttttgtttttttttttaagattttatttatttattcatgagagacacagagatcgagagaggcagagacacaggcagagggagaagcaggctccatgcagggagcccaagtcccacctcggtctggatctctgggatcacaccctagactgcaggcggggttaaaccactgtgccactggggctgcccccaagtttgttttttttttttttttttaagattttatttatttagtcatgagagacacacccagaaaggcagagacatagagagagggagacgcaggctccatgcagggagcccaatatgggactagatcccaggaccccaggatcacaacaggagccaaaggcagaggctccaccactgagccatccaggtgccccaaaactacacaagttgtactttctctaaggttcttggcaaagtggcacctgaagcagtatcactatgtccttctcattacattaaaatccacaggtccaacttgcacactgaatggttcttgtaccgctgtgggagagctaggttcttgtctcacgtatttgaaaaattaatcttggggatccctgggtggctcagcggtttggtgcctgtcttcagcctaaggcatgatcctggagtcccgggttcaagatccacatcgggcttcctgcatgaagcctgcttctccctctgcctgtgtctttgactctctctttctgtgtctctcatgaatacataaatgaaatctaaaaaagaaaaagaaatctggcggacaaaggagagtgagtaaggggatagaagtttattaagtaaggatacagaataaaggctctcaggagggagaggggtcctgtcagggttgccactgacagcttttaggctggtcttattgaaaacttgatcagagaccttgtggccttgagattcttgtgccattttgggtgaatgacatatggctttttttgggtctggtgagtcctgtgattactgtgtagccatcaaagaaagagactcccttaacatttgggacctggtggtttggtctatttttatctctggtttttatatttcagcgtccttgggatttcagtgagcctgattccatggtccccgtccatctctccgtgcctagcccctcctgtccctaactcattcctccccctggaatagtaaccctcactgtcgttggggagtgggacgatgaccactctggctgcttcaggctgacaagggacggcgcgaagggactctaggcagagtattctcagggatcggccaaggccaagagttcatggtgtggctcctgggatgtgctggaaggcatgaggccaccaaacaacaggcaccaacaaacacagaaagacaaaatccaacaattatttccatcagtaaaacggcatctctgaaatattgaccgtggtttctgaggcaatcaaacagtcctggagagaatgggattttgttcagttgagcttgaatgtcatttattaatcatgagaccttataagaattgtcagttacgttaaaacaacatatgtgtagagactttacaacctaagtgatgttcaagtaatgagtaataatagttgcctgattttccagaaatcttgccctaactttacttagttcttgacttagaacatctaatgcttgggatgtgtcatttaaggttctgctgagcaagcggtttgttttatctcatgatataagaccttccccagggctggaagagccaccaggggagggtaaggttggtgttcccctgtctgatatgagaaccatattatgggaattgggggcagatgaggcagttctcataagtaatgagttgctggggctgggaagagtaataatcctagtttgtctacagtacataaccccaagaatcgtttaggaatgatgtcataggccatattggcataaaataaggcccatcttcttggtacatgtaagtcattagttggggatgggaggtgcagggtaaagcgcagtgagggtaagctcattgcaggcgatgcgtgcagttggcttcaattatatgctttagagtatgtaatgctctctgtttctgagttgtctcaggtcttttccattcttgtgcctcttttccttagttgctttgattcaaacagatattttttgtttacagtttgatgctctagtgtctctttcactatttttatttcttacttttaattgaagttgtaggacttgaaacctgaatctttgacttttcacagtctacttaaggtagcattgagttccatccaggaaacaggaaacttgtagcaacggagttccacggagttccacgtaccccctctgtgctactattcgcacatgtgtcacagcaacacaaagtataagccagagaatatcttgttactccttaaaattttaaagttatacatcttttgtttttattttattttttaaagattttatttattcattcatgagagacacacacagagagagaggcagagacacaggcagagggagaagcaggctccacgcagggagcccagtgtgggacttgatcccgggtctccaggatcaggccctgggcggaaggcaacgctaaactgctgagccaccctggctgccctaaagttatacatcttttaaagaaattaacaaacaatgtacctaaacagaatagtaccgtttctgttgtgaagtattctattctgtatatgttaccatccagggtcatgtccctttggccataggatttcctttaaaattatttcatgacaggagagctggcaatgaattctcagtttatttatatcatatatttatctagtatccatctcttcatttatatttacctagttgatatttatcttcctttgccattttcccccaattaagactttctttttttatttttttaatttttatttatttatgatagtcacagagagagagagagagagaggcagagacacaggcagagggagaagcaggctcgatgcaccgggagcctgacgtgggattcgatcccgggtctccaggatcgtgcccctgggccaaaggcaggcgccaaacagctgcgccacccagggatccttccaatctcttttattcccgatattcacagagccactgcctcctcaggtcacagccgcccttccacctgcgattccagagtggcagtgcatgttggggtcacgacatccagtgggcgtgtttccgagcctctctatgcacctgctgacccatctttctgggacatgtagctgagtttgcggagggtcaagtcctcggcagcttctccctgggagaactgtagggctctagaggcctcttttcctttttctacggtctccgcccctttcccggaaaatttccaaccgtcctcttaacctctgtctcctacactctgacctcggagtccctccaaccccacccctgccctgctccaaagctcctgcctcgggtaaagtgcgcgccgccaggttccaaagtgtgtaagagttaccagtgcagtgtgacaagtgtaacacgctcacagcttcccgtgctgttactagggcaacacattcccgaggatcagacgtgtgaggcaggggagcgggtggcgccagctgaggttgccctcaggctgctgctgagatggaccaggagcccagggatgcggaggcctcgagctgcagggtgtgagcttggctctggggggcggggtggggcgagccccagctcctggtgcctgggggtctccgcaagtgaggctctttctcccatggtacccggctgcttcccaaacctgtggtctgagggagggagagagagaagagagcgcagaaaaccacacacaccatcacgtccccctcgttctgcccatgaggagtgagtcaccaggtccagtccacccacaagaggaggccaattctacttcttcttggaggatttcagtgaatctgtgagcattttacaaccagtccaccttgtgtggaaggcgtcattaactgtcattgctttgaagatttgtcttctgtttggttccctcctgtggacagggatgagcccaggtatgatgtgcttctgcttctcttctctggagagtcagggatgaggttctcggttcctgcactaaattagaagaattttcaaactggattcaaaccgattttttttttcctgtttcatgtttggactctgatcatctatttgccattttaacattcttacatggatatctgagttttattagtttctttccaatcttttttcttttcttttcttttttttaaaggttttattgatttagtcatgagagacacatagagaagcagagacacaggcagagggagaagcaggctccatgcagggagcccgacgtgggactcgatcccgggacaccaggatcatgacttgaactgaaagcagatgctcaaccgctaagcccccaggtgccctcaccctcattgattcttttttttttttttatttcttttcctcattgattctttaatctgcctttccaaagcttcagtggcttttacagaatttccgttacattttttcttttcagttctagaacttcttttttttttttttttgctttttttttttaaagatttttatttatttagacagagagagagagagagagagagagagggacacaggcagaggaagaagcaggctccatgcagggagcctgacatgggacttgatcctgggtctccaggatcacgccctgggctgcaggcagcactaaaccgctgagccaccggggctgcccagttctagaacttctatttgatgttctgtatacattcctctttttcattcagatttcctttctgttcatgctttaataacaagattttcttaaattccttcaacacttttattcaattctttctttctttctttcttaagattttatttatttattaatgagagacacacacacacagagaggcagagacacaggcagagacagaagcaggctccatgcagggagcccaacgtgggactatatcccgggtctccaggatcacgccccggggcggaaggtggcgctaaaccgctgagccacctgggccgccctattcaattctttcacgtaattcctgacaccgcgtgggagcctctggtgctgattccaacatctgggcgcactgggaatgcgttcattagagtcactcatttctgtttctttgtatgtctggtaataagtattttaaaagtggaatatgcatttaatgttttagcagatctggaatctattctcttcttttgaagattgcttttttcctagtatttcacttgcatggaccctgcagtgctgacagctgttgtctatgccctgttttcccacatccagtggctgcatttccatcctcagtcttgagagagctgccctccatctgtgtgatttagtggtcaatcaatgctctgtgcagtctgtattcagattttggcactcaccttctctgtggttgtcttgttcctgggatgtcccctaaatttccaaatgtcgtgccagcccagggtctgatatctgatacgtttgtccagtatggttttacttttctaagtaaactctatgtccaacgtggattttgcacacacgaatccaaaatcaagagttgtgtgctttacagactgagcccgccaccctcccccagtatgacatttttcttgctgttgcttgagccttgtgctgattgtaaaattcataagtcaaaggcacagactcacagattgggctaggacaatctttttttttaaagactgtttttatagatttattttaaagtaatctctacatccaatgcggggctcaaatttacaaccctgagatcaagagtctcatgctttgaagaagagcgagccaagtgcctgttgatcaggatgattctctctttaaagctagagctccctctggttctttctgctttttctgcagtgtctcctgagtgtcccccagccctgcagagtgtggtggttccagggattttgactgagcctgtattcagattttggatcgcgaccctctgctgctccctcactttcagattttccccatgaaatgtccaggtccttggcacctgctgtgactgctgtcatcggccccatgagcctgcagttatgctgggggaagggagagcccccacaggtgagaaggctgggaactagtgcttcttgcccatcatagtggtattcaggattaaagttctctcatgttcctgcctgccttcatttacttttcagtgagttcaaatactatttttatttattattattattattagtagtagtagtaaatttattttttattggtgttcaatttgccaaaatatagcataacacccagtgctcatcccatcaagtgccccgctcagtgcccgtcacccagtcacccccacccccggccctcctccccttctaccacccctagttcatttcccagagttaggagtctcccatgttctgtctccctccctgatatttcccactcattttttctcctttcccctttattccctttcactattgtttatattccccaaatgaatgagaccatataatgtttgtccttctccaattgacttacttcactcagcataataccctccagttccatccacgttgaagcaaatggtgggtatttgtcgtttctaatggctgaggaatattccattgtatacatagaccacagcttctttatccattcatctttcggtggacaccgaggctcctttcacagtttggctattgtggacattgctgctagaaacatcggggtgcaggtgtcccggcgtttcattgcatctgtatctttggggtaaatccccaacagtgcaattgctgggtcgtagggctggtctatttttaattctttgaggaacctccacacagttttccagagtggctgcaccagttcacattcccaccaacagtgaaggagggttcccctttctccacatcctctccaacatcaaatactatttttaatgtttttcattactgccttctgcgaaagaactgactcaaccactccctcctgccattactagaagtctcacctgagagaggattgggggtgaagaggtcagagcctatggtgtgatcttgtgagaccagtgagggttcaggcacctggcattctgtatgcaggtttctccaactgaaatgcaaggaggcctggggtctggactcacacctgacttgatataacccacagtgaccaagaaggatgcccccaccacacctccatctgactgcttcttaagtattggaaacatgttccacacgtgagaattttcttacattatctgcaccaagtccccagagaagcggctacattggatggaggactgggaagtagttgagttaaatctgaaacaagctgtctagtcctccatcctcgtcagaaccatgaagtgacagatgactgtccccaatctgacagatgctcgcagctttcatcaatgagatgcctgaatactcggggtgctctgggcatttgaactgaaggcttctcctcaattctgagcagcacaagcccttggagatgcaagtgcaccaggttatcagatcctactgagtaacacttgctatcatgtcaaagaacaacttagggtttctctctcatcaggagtcttctcacatcatcagagggatgaaaagtgcagaatttccttcatgggaagtggaaatggcacctcttcttggggccaagcatactgcacaaatgttaggacactgcacaggtcgttggtaggcagaggctgtgcttgtcggctgtcctccctgagccgctgaccgctgagggacttgacaacagatctgccacttgataaagaggcatgttcactgatgggacagctcctgtgttctggcctgggaattgcaaagagggcactgcagccatccactgtcgaagggaacatctaacagcccacaacattggggactctgtgcagttatgatgacaccacttcctgccaaaggacacacagagtgatgcagactgatgcacatagattcatgggctcttgtgcatggaactgctcaattgtcaggctgtttgactttggaatactggattttaaaaaaagaacttactatttgacagagagcaagcatgcagggggaacagcagagggagagggagaagcaggctccctgctgagcagaaagccagacgtggggctcaatctcaggcccacaggagcatgatctaagctgaaggcagactccaaccaactgagccacccaggtgcccctgaatactggattttgaagggcatgtcatgtggtgaaaccccttataaagaaggctaagttatttatttatttatttatttatttatttatttatttatttattaaagaatttatttatttattcatgagagacaccgagaggcagagacacaggcagagggagaagcaggccccatggagggagcccgacgcgggactccatcccgggtctccaggatcacactccaggatgaaggcggcgctaaactgctgcgccacccgggctgccctgattgtacaatttcttaataaagtgactctaagaggtttgataccactttcagctgctttggccatcttagccccacgggaggcccagacctgcccagtgtcatgctttccgtgcaaatattcagatacggtatttaattttctcagctgtttatttctttatatatatatatatatgtttttatatatatatatatatttttacaggtaactttgtgcaagttaaatgccatcattatacattttatttatcaattctcagacccagattagaatctgatatacataaacacttaatgtaaaatgtcataaagcaacccaaattgtactagcaaaattataaaaaatctctaaattttgagtataattggcacatcatgttccatttgtttaggtgtacagaaagtgatctgatgagttcacacagcatgctctactcaccacgggtgtactcctgcctgccccagtccagccctattacactatcatccacggtagccctcgtgtggcgcctctgacccccacacttcttcattctgggactggcagccagggttcccactgcccccctcctagtttcccagcccccacaccatcccctctggcaaccggctcagatgatcatttactgtatgagcaatacctgtgaacaagataatcgtgtgaataaaatgtgtactgaaataagttattcatttttaatatgctatttaaattattttcgccaacctagagtggaacagccagtgctcatctcatcatttgccctccttggtacctgtcacccactgaccccatctccccacccacctgaagtaaatctatacagtgatttgtttgaatttaacattttactgtatcgccctgaaatcactgactccagtgacttctgcagcaccaagtgacaccatccagaaatttctctagaactgtctgaaaccctgatctttgtggcaacaggggcagcacctgtgccaccacgtaagggtttcagctaggacggccacctgatacactgaattcctcccatcaagaaaacccctggttgttataagccttaactttagcatttaaatacgggagtaaaagacttcttgggacatacttggaggtgcagtgatgacggcttgcggcccacctggtagcctttcccacactggtcttgttctggcggcagccgggttggcagcagcgggagcagtgacaccggctgcggggagggcggggctcccaggctctcacagcctcggtcacggtcacggtcacggtcaccgagtccgatgctgcgacgctgctcagagagcgccagctcgggatggcaccgtccgcgcttgcttctctccccacccgtcgcgttcctgcccaaagctctactattccaagacgtgcccgcgggagggaggctcgtttataatgttcttcgacttttctctagatgctcgctgatgatttccgcggcaagggctccgcgcagctctcacacggccgcagaggagggcgccggggagattgcacaacagcagcggaaactggtttttttttttttttttttttttttttttttttttatttatgataggcacacagtgagagagagagaggcagagacacaggcagagggagaagcaggctccatgcaccgggagcctgatgtgggattcgatcccggatctccgggttcgcgccctgggccaaaggcaggcgctaaaccgctgcgccacccagggatcccggaaactggttttttaatgaaaaacgccaaggagtgtttcctttgaaggaaatcatacaccaaactgaattctgcgggtgcacagtgggtgtgggtttgaattagtctatggcaggggcgggggcagggagggcgttgggtaatcgtctccccggggttttacggcgtcggccgcgtctctcccatcacacaacacacgcgtgcacacggacacacggacacacggacacacacacactccccacacgtgcatgactaggtcctcggtcagtagatcccggagcctcctctgaacccgctgcctcctccctcaggatggcggcaggatttccccaggccgcccagccactcaagctcctgcatctcctgcccgcgggctccctggagccgcaccccttcctctgccgcgaccctggaggtggaggcagagtgtggagcgcaggggctgatggaggagccaagtccctctggcaaccagacccagatcttcacaggccaggtgaagaggagccgcagaaatgggagaatgtgcagcggtcctaccaccaaccacggggctcagtctggacgggcgcagcccggagcgagcagcctggggcctggggagaagcagggggaccgtgccaagccctcaccccgacccccggggctgggagaccctcctgccgagtgtcccccagggtcaggcggggcagcaggtgcacaagctgtccctccagagtgaggctggtccagtgcccagggggcgggagctgtgtgacatcactaagttgttacctaggcgcactctgtgggtcaccgactcggttcaggtccctctctgcgcggaaccaggcgggatccctggcgtttgtcctcacagagctgacggctgagacggggaggtgcccatactcctcccagcgcgtgcctacgctggtgaggcatcctgacagcgctgggcgacaggctcgtcctgaatgtcccacgggaagcagagacctggctcacagagttcacaggccagatagcccagggctcaggggaagtgtcctcacaggtgggctgcgtagactctgatgtgtgcggatgatctgggtcgatggtgggggttccaagcagtcagcagttggcataagcgaggttgggtggcactgggcccagggagtcaggacggaggttagtaatttctagttaaggtcatgagggattagctcaggagaggggcagggcaggggctgcatgtggaatgcaggcaggaccccgggagaggcacaaccagaggcgagcgggaggctgctcaggtcgcaccagcgggtcctacaggagcaggggaaccccacttggccagttggtcccgcacaggcaccgatgcagtcctgcagtctgagggctcccatgggacaggagggccacgctctgccctgagctccggtgcaggctgacggtggcaccgggatccgtcccagagctttccggacctggggacgcaatctcagaagagatgctcctgtgactctcatcactgaggggatgacaaaggtgttaggagccatgtgcgggacgcaggagcaagaccacgaccatccttcctgctggatcaccacatccagtctagagagtgcatgttccccacggaggagccagggcggctgcaggggcagatgctgcaggggcttcggaggcaggctccgccccctccgaccctgcctggtcccggggaggaggtgggcaggcccccaccccacagcgccccatggctgtgagctccaggaggacatcaggaccctggggcagtggcaggatggctacaacaagggcggtgacccgaatttggacacagggctgcctctggtggcctcctcattggctctcagcagcacagaggggaggccgtggcactctgtggagggacaagatgtactggaggagcagtgcttcctgtggctgcacaggtactgggagctgcgggcaggaacaccaaccgcactgggaaggacttcccacaggccagccctgcagctctgcccagccccagtggggggcagccctctctccagagccgtggggggtgcccaggggtgatcacacacaggggtgcaggacagctagtgggggggggcatatgctgagggcagctcccccatcctgagtccctggggcactgccgtgtcactcactcttcttaggcccaggccgggagaaagttctctcaggagagcacaggactagctctgaggctcgtgttttcacctttcagcctcttccccctagagatcctgtagctgtgagtacctataaatacttacctaggaatactgagttacaggcttggtaagacggtggagagtctttgaaaaggctcttcccttggagcgaaatgtcagaaggggttcccaccccttgtcttcaaggctagagtgggttccttctacctcctgagagggaacacccctgcctcacccccataagcagccaaaccctcaggagtcatggcatcttggtttgtggagcctatgcttttccagaaggccttgccttagcctccctgtttggtctcccacagagcctcccagaacacacatgacccactacccccacccccgacaatagggtcaccctgaggggctatgtgccctgggctcctgccctgcaggtatcaccctgacctggcagtgtgccagggagcatcagacctaagacagggagcttgtggggaccaggaagaaggggatggaaccatccagaagtgggtggccattgtgctaccttctgagatgaggagagatacacatgccatgtgcagcatgaggaactacctgtgcccatcaccctgagacaaaaaagagaccctttttttttttttttttttgcaaggaaaaacttttattcagaataagcattagcaaaatgaaggtaggtgcctcataatgcagggccacagagtactctggtactcagaaacagattagaaaatcattacaaaactttgctacagattaaaataaacttgaaaccacaatcattggctataaaatgccgctgtatggaatcactaaaaataaaaggtgaaaatcttcagacgatttgttctcttgcttgcccaagttgcagggagtcaacagccctcagaatccagtgcagctgtgacacccaaggccagggagtgatcagaggacccctcagccccaccgctgtggccctgccattgaatctgcatgaagaccacctggcctccaggttcaattaagtgcttgtgattctcccaatgaggactcccaataataataagaagaaaacaggagctacattggtgggactcccttctccggggttctggttgataaaaatttcaggcaatgttttaagggattaggtgaattgaatcatttaaagcttcataataaccctgtgagatggcgaaaggtaccaaccccaattcatggtcaaggaaaccaaggtcacgcagaggttaagtgatttgattggctcacacatgccatcattaaatagccatcttccctgtcaccacacaggtccactctgagtccccttcctccctgcacttcccaacgtctcacacacacacttccttagctactagcacacagtccgcccctcaccaccagaagatgtgccctaccaggtgggcacatttagcctgtttttgctgccctgaggtgtcctagatgcctcaatagtgttcctgtgtctcgcactcaattgccacttggggaaaggatcagcatagagcacctgtctcttctagatgacccccaggccacaggttctcatggcagggaccactttcctcaccagcgctggtctcctccacgacgtccccatgtcctcctcccacagcatccctcctgcacagcacaggaaacaactacagttctcccttcagaaaagggatacccagattatgggtcatgcattccagacaaatgtggattcacctcagactctgcttcatcatgctatgaattaggagtggagccagaactaggctcagtagagccggggggggggggggggggcaggcaggtgagcaaggaagatagaaactaactgaaatctaataaggagtggatccttaatccactcctgtctctaactccagaatctgctttttaaaagatatgagggaaagatggacagaatgatccagaacagctcccagaaggaggtgaagagatggatgggtctgaaaagtcatcttgcaattccacagcgactcctttgtgcagggactcactgggcctcatggacatgagaagagaccgaaggacccctgtggctgtcccagactgggggacagctgggcagcatgagaccaggccttgtacccaagaagaagaacaggccaaaatctctaagaaacaaatcaaaaatagacactgaaaacttgggggctgagtcctgacccagacctgagcctcggcccccctggtcacgggaagcgcttgctgcacaagatcctggaggaggagagtcccagtccctgtgatcccaggcctggtgggacaagggtccactggagggacagggactagggagcagccacgatgacccagctgagaagtgaccctgtcaaagcccaggatgcactgagcacaggctgggcacagtcccctccatgcaggctcctcacaggttctcctgcgtgtcctctccccccacatgacacttcctatggaattcctccagccaatgcttgggaacagcaaggaaactgaggcaggactcttcctcttctcccggctgacctgggctctggactccccgacaccctggtgagcttgccttactctgcactgnnnnnnnnnnnnnnnnnnnnnnnnnnnnnnnnnnnnnnnnnnnnnnnnnnnnnnnnnnnnnnnnnnnnnnnnnnnnnnnnnnnnnnnnnnnnnnnnnnnnnnnnnnnnnnnnnnnnnnnnnnnnnnnnnnnnnnnnnnnnnnnnnnnnnnnnnnnnnnnnnnnnnnnnnnnnnnnnnnnnnnnnnnnnnnnnnnnnnnnnnnnnnnnnnnnnnnnnnnnnnnnnnnnnnnnnnnnnnnnnnnnnnnnnnnnnnnnnnnnnnnnnnnnnnnnnnnnnnnnnnnnnnnnnnnnnnnnnnnnnnnnnnnnnnnnnnnnnnnnnnnnnnnnnnnnnnnnnnnnnnnnnnnnnnnnnnnnnnnnnnnnnnnnnnnnnnnnnnnnnnnnnnnnnnnnnnnnaaaacgccgcggaggcgggagggaccggggagtcctggccgcggggaccgggggcggcggagaggcggcttcccgggtcccgcgtccccgccgggcggcccccccgctcccgcccgcactccccggcccggtcagggtcgcggccagggcccccgaccgcagcaggacgagcgctgggggcccacgaccctgaccctcagggtgggaggggtagcggcgtccccgcagatctcgggaggactctagagcccgggacccgggaccgctgattggctcctccggaaacctcgcacccaatgggagtgcgagccgggaccgcgtcaggagtctccgggcaggaggacccgagccaggccgcgagatgacgtcaaaccccgggaggtggggaccgccagcgctgggcttccctacacctcacctgccctccatccggggaccctgagatccaggccttcccggggacccgggactttgccctgacacctctcctcctgcacggtgaccaggtgaccactttgtcaccccctcttcctgagtcctggcccagggctctgaggacactactagggagagactctcaggctggactctgcccctggtcctcactgccctttccagaatactcgctgaactggactctcttacctcccaccgcctacctgtctccttctggactcttctaggaggaaacgcatccccagggactctgacagcacacagtcagctgccctgggagcagagatggagagacagggcttttctctttacctggagaagctgtgtctgaggcggcagccacggagtcccactgaggcccgtgtccttcctgttgaccccaggcgtgctgcacaacctcccagcccctgaacagtggcagtctgatctgtggggtgactttggcccttcctgcagacaggggaccatacagcagcgctcagactcacagagctcttccgttgtcccaaacgctagatcagtgaccgcgtcccgattacctccattcccgagccccaggttgtctgtggcctccgggacgtctcctcagggcacggaagcacatctgttgctgttatttcagctgaagcctggacaagcgttgatcacctggaagtggcaagtgttctgggccgtcaccgggccctcaccgcgtccacgcattgcgcgtgtgggaaggaacgccaagataagggcatatgtattcccgctctgggtattatctgattatcataaggaggcaattggttttcaggcagccgcacacagggtagcacgtactagatgccaacgtcttgctaagccctgtagataggaatttattaaaaatctgtataactacggatttaaacgtgaggattccactgctgtagaaccttcacctctgcttctctccttccgcctatgtctgcagcccttctctctgtctctcatccttcagggcctcttgtcctgctccaccccctctcactcctgattggggccctgctgccaccccaacacctgccacccagggccactttcaccacccagaacagcaattctgctgatgtgagtcaggttgtgtcatgtcttcactgaaaatgctccagtggctccatctcactcttgagaagcatctagaacacaaggcacatgagcatagggactttgggctatattggtgaaagctgtatccccactatagtgtcttcctgtcctgccagacagtgcgtgagctcatctcgtcccaaatcccattttgtgcccccattcttgggccattcctgatgccacttgtgttttggtgtcccatatgaacagccacaagtacagcatgataatgccaagaattggattggttaggagaactccttgtgagaagacatggggaaggagcccgaaaggctaggagacatcagatcttaatgccagtctgaagctgagggaaggagagagagaagggaggttggctggaagcaccctagacccagtgcagagtaaggcaagctcaccagggtgtcggggagtccagagcccaggtcagccgggagaagaggaagagtcctgcctcagtttccttgctgttcccaagcattggctggaggaattccataggaagtgtcatctctgggcagagatggcgtcagatttgagagcacacagccgaggccatggctcagttacacttcctcaagctgagagtcagggtcgtgtattgtcacggccaccacaatgatctagttgaggaccaacaccgatgaggaaaatgttaacggggaagtaacttctggaccaggacttgtaagtcgataagaagggatgaggtgttgggcagcagtggagggactggctctggctcacacaactggatgggtcacctgtgctaaaggacaagaaggcccatcaagtgggtacaggtgctaggacatgagtagatggtgggagaaatctgtgaaattgtcctctaatgtgttccgtgtgttcagtgacttaggaaacaagatcattagcagagagaagagggggctgggtgttggaggtaccaaaggctcacccacctcccatcccaggggtgccaggtccatgggagaggatatatcccacaggagaggactgcatggggatccgggtcctcagggggacctggattctgttagagctgtgaggagaggggaccctgggtatttgctggtcatagctgaacattcctggggtgcagtggagggttcaggagctggggagggggcatgagaggaggcagggtaggagtgtgcagagccttgtggagtgagagtgcaggagatcctggggggccggggtgactgatgcaggggagggaaaggacttaacgtcattggtcctggtggactccaggcagatggtggtgctgagtgtgtgagaggtgccggggaggagcagggattggggtgctcacatgggctctgtcaacaggacaaggatgtttagggtgactgggccttagttgtacttgtggactttgctcaacccccaggtatggggtcagtacctggggtggaggtgtgtcaaacgaaatccctggtttactcttcaccatgtggggccggagtgcactcccagcagatgtacactcccagctctgccccatccctgcactgggagagagacttctgggtaccaggggtgaggccagcaaagggacccctcttggaccttcgcagggggcagggggccccggggagctgggatctcaggcctgtaacccagtcctcacgtccacaccatggagtaggatgtagacagtgagctgctgagtcatgtaagaaatgattttggtttaactgagttttgaaaaatctagaaagaaggagtccaaaaaagagtctctactcagtgaatttccctggtttgaccatcgagggcccggagagaggagctgcagagagatacagaatcctcagaatcccctgagctctcctcttctgcagcccctgccacagcccagagcctgacccctgtggagcccagggctgcccagaagcttcttcatctctacactgatgcccaggtttctgctctgacatctccacctgactttcagtgcagaccccacccaggcttctcagtcagaatccatctgagagcagagggtggtggcaggtcccttaccgtcctccccaggtgcggcctcaggagccagctgcggtctctcctcccaggccttctccagggtttctctcagctcctagaacctggacagggctctggacaccagggggcgctcatcccggctaatgatgagaatgtgatgtttttcaaatccacacgggtgccccctgtgtccacccagagacaggaggacaaggattggttatatacacactcgcacggatgcacacaatagaatattctgcagccataagtcaggataagatcttgccatctgtgacaacagggatggacctacatgtggtttgtgtgccaagtgaaacaagtcagacttgagaaagacagacaccctatgattaactcatatgtggaatctaaagaacaaatcaaatgagtaaaaaataaaaaagtacactcctatctatacatatcaagaacaaggtgattgccagaggcaagcaggtgggaggacaggcgcaatgggtgaaggagagcacgaggcagaggttctagaatgaagaagtcctaggaataaaggcagggagagacagggaatgccatcagtggtactggctcatcattctgtggtgttacttacactgtgggaagcagagaggtggagttgttctcttttacacttgaaactaactaacctttctgttaactatgtccaaataaaaaaaattaaagaaactaattggaaagattaatctataaaacataccaatttttatttatggtcatggatatttgggtaatccttccattctttgaaaaacctctcttaattacataacttaagagctacacattttgtgaagtacaataggttaacaattaaaaacctacagttaatgagtgtggaaaggccttagggaaataacatgaatacatgaaaaaaattggaaaacctacatgaaatgaacaaatccctaggaacaggcaacctgcgaagatgtaattatgaagaaacagccgtgacaagacccataactagtaagaatattaaacccctaatcaaaccacagagatgcccttggtcagatgcttttagcggtgaactctaccaaacaccgaggaagaatcaacaccaatccttcccaaaatcttccaaacttgaaaaggagagaacacttcttgtcttgtccatggtgccagcctgaccaagatccccaaggcagacaaagagtctagaagaaaaggaaaccgggatccctgggtggcgcagcggtttggcgcctgcctttggcctggggcgcgatcctggagacccgggatcgaatcccatgtcgggttcccggtgcatggagcctgcttttccctctgcctgtgtctctgcctctctctctctctctgtgtgtgactatcataaaaaaaaaaaaattagaagaaaaggaaaccacacaactgccctctgacctgggttccacagcccagtacataagcctaaagcccttacaggaatcaaccccgaatcatgccctaaccaacctcaccccaaactcacaggtaccacagatgcatgcacggttcattttaatattgtttgaaaaattctgagaaatcaggaaatgaggttccaggagtggtggtgacgcaccacagggagaaagccatggggcgggggtgggggtcccagggcaggtggcagcagtgtgtccctcagcctgtctcttgaacagagtgtcacatcccagaaggacgggtgagccctctcccgtggccgcacatccacagaggaaacgtgacacagggacaatgaggcgtgaagaggccgcgtggattggcagacactcagaccctatacacacgggtgtttgtgtgggatgtggggtcagaggggagacacggggtgtagaaagaggaataattggatgagagagaagagggaccccacataggaataaacatcccaagatcgggggcagcaacttgtgaggcccctcatgcctcgggtgcccggtataggcaccatatggttcagaacaaacacactaaggaacaaatcgactgaagagttgaggggccagttgcctgaggcccatcctcactgtaggaggaagtgtctgtgtcattgggcagctcactgctctaccctcagcacctccctgcacctcagtgacgatcttggcatcattttcttcttctttttttaaaaattaaaaaaaaattttttttagatgagatgagagacagagagagagagaggcagagacacaggcagagggagaagcaggctccacgctgggagcccgatgtgggactcagtcccgggaccccaggatcgcgccctgggccaaaggtgaggctaaatcgctgagccacccagggatcccggcatcatcttcttctgacacaaatatgacggccaagcccttggtgccaaaccggcctgctcgggtcacctggaaggagacagagggtagtcctggcgagaccccagagtagagggacacccaacaggaggggtgaagatgtcaggtatgaaggcacaggaaatcaggaggacggggtcactggtgccgcgtggttggagcgtaccccatgcaggtaggtgtgggaatcctcgggcacctggtagtgacggcggggttcacctgctcagcgtccgggcctcggccaggtaggtcggcagccacgtgaacttgtccttgaagttccttaaactcggatatggacaaaacctttgtgagaaaggaaataagaagaaagtgagcagtccctcctcacaagggtctgattcttccaagatgtttccacaggtgacatctttcatctgtgactccctctcccccgggtgtcctctgtgggggcgatggcgatggctggggagttctgcttctcccgccgctgggccaacgcagtgcagccccgcacagaccccgcagagatctctgcctgtgcgtggagaccaaggggtgggtccacggggcggtgtgtaggggaccgagggtgtgtgctcgagtgggagggttcagcacgtgcactcctccccgcgggcccctccgagtccctcttcttccccccacatgtttcgtctgtgctcccactataacttactccttctttctctcctttggttctctgagcagattggcctctgagaagatacagagagcaggaggaaattcggcagacacgtgaggaggcgggaatcagatgctccatggaaaaggggtaaatattggaactagggtctggaaagaccaacatctatctccctactacgaaacgtgaaactgaagacctacccgaattctgggaagtccttttagtgtgaacagtttacacaatcagtaagctgtcagaatgctcctcagggagtgatacaaggagaaataaacaaatttaagaactccgatggggccaatgtagattgggatttttaagaatttaaaaccattcaagatttttatatatgaggtttgatttttttattgagattttaatttattcaatgtctccacatgctcccatggaacctaagagcaccccactccactcatgctcagccccttggcatccatcagacacatcacctgttgggccaaacgacacacttatagttgtgccttagcattcacaggttgcatatttacaaattcacctatttgctaaaaattgttttaacctgaaaatcaatactcatggcacttataccgtcattcagggacacacgagagcaaccaaaaacattagttacctgacatgcatgttgccagctaagatgaaacatttttgttgaacttggaaaggtgcttctcaatcttcaatggttgcaaagacactctcgaagtcagatcagaacacaacatttatggatttatttaatccaacagaaactataaagctaggatattcagaaggaaattgtcagagatgaaaaaggaggccagtgtaccacttaaggaatttagaaataatcccatatatacgtggatatggattgttgatagagataggacttgaggagagaggagaaaggatggagtttttcagtaaaagtgaaccaactactggccatttgtgaagcaacaaaatagatgtgaacctttttttcacaccatacacatgcaaaaacgaatagattacaatctataaaatttcagaaaagattacagaaaaagatctttatgattctgataaaaagagaacttggggacgcccaggtggctcagctgtttagcgccaccttcagcccaggacatgatcctggagacctgggattaagtcaggttgggcttcctgcatggagcttgcttctccctctgcttgggtctcttcatatctctctctgtgtctctcatgaataaataaataaaatctttttttttttttttaaagaaagaacttggttagcagaactcggaagacatttgcaatagagaaagatttcctctatgttattagttatgactaataagtgctgttcatctaaagacgtcatcaagaaaatggaaagacaggccatgtattgggaggaatctttgccacacatgctagcaaccaaggattagcacacagaacatgtcaacactgctcagatcagtgagcattggacacactacttactgagtaaatgggctggagcttcccatttgccaaactcaagtggcaggcagaaggcacaggagcatctggagatacaggagtccactccctaagtggtgggtggaggatggtctcccagggtgcagacacggtgagcagtgggaaaggggataaatgggaaagtgacaaagaaatcaaggtgacattttaagaaatgtccataaaaggcaaatctacagagaaagacagtagtttagtggttgcccaggatgtgggagaggtgatgggagaagcaggggggcctgctgatgagcacaagtcattcctgtgcttttaagtagcctgcttctcagactggttctctggtcttcaggtttatgggacttcttcactgaattggctcttctttcacacactcccatcttcctcatataataacttgataattttgatgagctcagtgtgcagtgtttacattattatgaccatgaaatgttagtcacaactgagcattttgtagacttatgattaagtttccttttgagtcagtttaaaattttccccataaatattttatcccttaatttgcttagttctgttgtgctccttttaaattgttccccagctcccactggggaaatcttcaagaacatcttcgagcccacccactctccccctatctttatgtctgtgcagacgcctggtctgcagccctcagccttgtcccatggggacggggtgcctacacacctgaggcagcgctgacacccgtacccccttcacctccttatgggtgcctctcttgtcctggccccctgttgctggggtcccatgtgctccccatgtttccttttctcagtcattattcccactttgcctactggcagtggtgtcctgtggaaaggaccatggaaagtagaacagaaactataaacatctgtggagcttcaggctgccttcaccctgattcacacggtgaagtgagagactctgtgctgggcagagttgtccttgggaattgggggcctcatgtcatgtctttggggccccagacctgtgatctgtgttgttgactcttggagttttcagggtgtctgctcttccaccttctgacttttcatgacgtccctggtgtgggtctcttctcatctacttcagttaagaatttgagtaggtctttcaacatgtgtgtatatcctgtcaactctgagaaatattcttgaaatattgtttgcatcaattcctactctctattctttttaaaaatagtgttataacttgttggaatcactttattaagaaacaaacaggtcttctctgctgatgtcttcaccttcctgattgtactgcttcagggaaggacaacgttaattgtccagtgcatcaactaaataattcatttctatgctcatattttcaatttcccagagctgttccttgttctatgtataccactgtgtatagttgtgtttttgttttctatttatatactgcaggtatgattcatactggtgttaggggatcttctaggtctcccggtcatctgctttcatggtatcatggtattttgtcacacaccactcatctcaggcacaacttacatttacctctgtctattctgctacatgctcatcttccacatgacagtgccagtgtcatattgaccaggggctcacaatttttctgtgttgtagcctccagagtccagttgatcctgagccactggaagctttgagatgtacactggtggatgggttttagtgtgatttgagcaggagagtcacactgcccctcaatgacctcctaggctctgagtccagcagcctcctatggcagaacattctggaacattgtaacagttcacttacacagagtgcacggtcgtaaccacttcctgatggacaggtaacaatgaatgataaatcttcaagatctctgagagcaaatctgctgcgttgaaacctgggtcttccaccttctcattctcttcgaatctctgtttccatatctatacaaagggatcccctatgtgatatttcatgagtctgcttggatgattaactttgaccctctgtataaatcacatggtcctaatccttgagacagactaggtgttccactatttatatatatcattatcatatttattatagcatttagatgagctctgttccttgtttttataaaccacaattcaagaaacatctttgaaatatattcttgagaatatgtgtgattatctccttaggataaactcctcaaagaaaatgtctgtgtcacaatataagcaaatttaaattatggagatattttatgaagcaccctttacaaattttatgccagttttcactctcatcaacttctatgatgttgccttttcccaactctctgatggacactctcattccttactttcacctttgacaagcttatagattctaagttttattcctatttcttagtccacattctcatttttgtttgtgtatccttattagcatatatttgttttttttaaagattttatttatttattcatgatagtcacacacacagagagagaggcagagacataggcagagggagaagcaggctccatgcagggagcccaacgtgggattcaatcccaggtctccaggatcgtgccccgggccaaaggcaggcgccaaacggctgcgccacctggggatcccagcatatatttgtttgatatttcttcttttccaaaatttaaaaaaatattttaaatccttttttttctttttctttttttatttcttgagcagctttggcatacaatgttacattcctttcatgtatacaacatagtgattcaccatataaccctatagttccactcttgggtatttacccaaagaaaaagaaaacacaaattatttaattatttttgaaatgggttatagttattttaaaatatggaatttaagagagagaaaaaatagcagccttcaacatcaggaactggtctgacactgagagttggctgccagtgtgataagaagctggctaatgccaactacctggccatattattctcctgtaggacataaacatcaacatcagacaaggaaattcaaatcatgacactatttgtgtcattacaaacaaaaaaacaaggcactgtataacccacaaaataccaaacctctccctgtgtcagccaatgtgagcaatcgctgcttctttaccacgatactttatcctcactctggtctgacctgcccagagatgagattctttgagatgttcaagcatagaattgcccacacctcctgacaacacatagttaggagtgggccccaacttcctcagatcctctccaacaacaccaatcaaaggctcatatcttttttcttttttaaagatttcatttatttattcatcagagagagagagagagagtgagattgagagagaggcagagacacaggcagagggagaagcaggccccatgcagggagcctgacgtgggactcgatccaggtctctaggatcctgccccgggctgaaggtggcactaaaccactgagccacccgggctgcccttacatcttttatatgttccaacacctccatcttaacatgtgccatagcccccaaagaggtgtgatctctttcactgcaacaagtaatagatccaacttgaatgcccacaggtgctcctggtggtctttggctgaagaacattgaagcatgttacccttttgtctgtcaaagttgtttttgtgtcttttttttcaaagattttatttatttattcatgagagacacacagagaggggcagagacataggcagaaggagaagcaggctccatgcagggagcccgatgtgggactcaatcctgggacatgtgtattttcaccttggtagaaatgaagaacagagggtttcaaggatgaagaaaggaaacagaactgtttgaatttgggtaaaagtatgggcaggagaaacaagtaaaaaagattctaaggtagtggaatctcagatgtccatcttccactttatgacatttacaagtatgtacaaggcctacaaggtaactgatagatgtatgtccaatatatcttctcattgggttcagcgaagacttatgggcctgcttatgttttcccagtgaatgcaaataccaacaagacaaccaaagcaatagagacattagttagctccagtgatgggcattttgaacacttatgatcttttttttaatttttttatttatttatgatagtcacagagggagagagagagaggcagagacataggcagagggagaagcaggctccatgcaccgagagccccatgtgggatttgatcccaggtctccaggatcgcgccctgggccaaaggcaggcgctaaaccgctgcgccacccagggatcccgaacacttatgatcttgatgtggtacatcatgtgttatgtcagtacaatttaactgttataatgtacattaattaaatattaatgctatattttaaggaaatgtctcagacccacatagacaaatctatgacttccatatgaagagaaatttaatatacataatctatatgtcacagtatttttttgaagagggtcttgaaaactaagaatgttctaaatatactatctgaatgatagctatagatcatagctatcattctaatgataaatagaaaatcctgaaagcatggaagaagtccttaacctacaagggtagatacataaggctgacagcagacttatccacagaaacctagcaagccagaaagggctggcatgagatattcaaggggctaaatgagaaaaaaaatatgcagccaataattttttatccagcaagactgtcattcagaataggagagataaagagcttccagaacaaagagaaactaaaataatttgtgaccactaaaccagccctgcaagaagtattaaaggggatccgttgagcaaagagagagcccaaaagtaacaaagccaagaaaggaacagagacaatatacagaaacagtgactttagaggtaatacgatggcaataaattcataaactcaataattatgatgaatgtaaatgaaataaatactctcaccgaaagacacagagtatccgatttgataaacaagaccaatcgatatataagagatgttttacaagagattcactttagacccaaagacacctccagattgaaagtaagggggtgaagaaccatatcatactaatggacaccaaaagaaagctaaggtagcaatccttatatcagacaaattagacattaaagcaaagactatataagagatgaaaaaggagactatatcataaaaaaagggtctatccaagaagatctaacaattgtaaatatttgtgcccctaatcggagcagccaattatataaatcaattaataacaaaattaaagaaactcactgataataataaaataatagcaagggacttcaataccccactcacaacaaggtacagatcatctaagcagaagatcaacaagggaataagggctttgaatgacacactggaccagatggactcgcagatatattcagagcctttcatcctaaagcaatagaaagcacattcttcttgagtacacgtggaatattttccagaatagatcgtaaatcaggtctcaactgatagcgaaatattggaattattccttacatattttcagagcacggtactttaaaactagagctcagtcacaagagataatctggaaggaagacaaatacaaggaacacaaatacattaaagagcatcctactaaagaatgaatgggacaaccaggaaattaaagaaatttttaaaaagtcatggaaaccaatgaaaatggaaacacgacagttcaaaaactttgggatgcagcaaaggtggtcctaagagggaagtatatagcaatacaagccgttctcaagaaataagaaaagggatgcctgggtggctcagaggttgagcatctgccttcagatcagggtgtgatcctggagtctcaggatcaagtcccacatcgggctccctgctaggagcctgcttctccctctgcctgtgtctctgcctctctcgctctctctctgtctctcatgaataaataaaatatttttttaaaaaagaaacaagaaaagtctcaaatacacaacttaaccttacacctaaaggaactggaaaaacaacagtaaataaagtttaaaccaagctggagaagagaaagaataaagattagaccaggcatcaatgaaatagaaaccagcagaatagcagaacagatcaacaaaactaggagctggttctctgaaagaattagtaagattgataaaccttagccagacttatcaaaaagaaaaaggaaaggactgaaataaataaaatcataaataaaagagaagagatccaacaccaaagaaataaacaattataagaacatattgtgaggagggcgcctgggtggttcagtggtggagcatttgcctttggctcaggtcatgatcccagggtcctgggctgaagtgtcccacattggggtccctgcagggagcctgcttctccctatggttctgcatctttctctatgtctctcattcataaataaataaaatctttaaaaaaggagaacatattatgagtaactatatcccaacaaattaggcaatctggaagaaatggatgtattcttagaaacatataaactagggatccctgggtggcgaagcgatttggcgcctgcctttggcccagggcgcgatcctggagacccggaatcgaatcccacgtcgggctcctggtgcatggagcctgcttctccctctgcctgtgtctctgcctctctctctctctctctctctctctctgtgactatcataaataataaataaaaattaaaaaaaagaaacatataaactaccaaaactgaaacaagaagaaatagaaaccttgaatagacccataaccagcaaggaaattgaaacagtaatccaaaatctcccaacaaataagactccaggaccaggtggcctcccagtggaattctacctaacttttacttattttttaaaagattttatttatttattcatgagagagagaggcagagacaaggcagaaggagaagcgggccccatgcaggtaacccgatgtgggacttgatcctgggactccaggatcatgccctgggccaaaggcagttgcttaaaggagaattaatatctactcttttgaagttgtttcaaaaaatagaaatggaaggaaaacttccaaactcattctatgaggccagcattaccctgatcccaaaactagacaaagaccccccaaaaaaggagaattacagaccttgaacacgggagccaaaattctcaccaagatagtaaccaacaggatcaaatggtatattaaaaggagtattcaccaaaaccaaatggcatttattcctgggctgctacggtggttcaacatccacaaaaatcaatcaatgtgatatactacataataaaagaagggacaagaaccatatgattcgctcaacagatgtagaaaaagtatgtgacaaaatacagttcctctcttgactaaaactctttgcagtgtagggatataggaacatacctcaatatcataaaagccatatacaaaaagcccacagtgactatcattctcaacggggaaaacctgagagcttttctcctaaggtcaggaacatgccaggggtgcccactctctccattgtactagaagttctagcctcaccaatcagataacaaaaagaaataaggcatccaaatcagcaaagatgaagtaaagctttctttttttttttctttaaagatttttatttattattcatgaaagacacacacagagagagaaagggaggcagagacacaggtagaggaagaagcaggctccatgtggaagcctgacatgggactcgatcccaggtctccaggagtatgccctgggcgaaggcaggcgccaaaccactgagccacccacggatccccgtcaaagtcaaggtttcactctttgcagatgacatggtactctatgttgaaaacccaaaggattccacctcaacattgctagaactcataggaattcagtaagtggcaggatataaaaatcagtgcagagaaatcagttgcctttccatacactagcaatgagacagaagaaagagaaattaaggaatagataccatttacaattgcaccaaagcccacaagatacctagcaataaacctaaccaaagaggtaatagatctgtactctgaaaactctatggtcaactcatcttcaacaaagcaggaaaatatccaaggaaaaaagacagtcttttagcaaacggtgttgaaaaaaattggacatccacatgtagaagaatgaaactagaccattttcttacaccatacactaaaataaattcaaaatggataaaagaactatgtgagacaggaatccctcaaaatctagaggacaacacaggaagcaacctctttgacctcagccacagcaacttctggctagacacgtctccaaaggcaagggaaacaaaagcaaaaatgaactattgagacttcatcaagataaaaatcttctgcacagtgaagaaaacagttgacaaaactaaaaggcaacctacagaatggaagaagatgtttgcaaataccttatcagataaagggctagtatccaagctctataaggaacttatcaaactcaacacccaaataacaaactagtcaagaaataggcagaagatatgaacagacatttctccaaagaaagcatcctaatggccaatagacacatgcgcaatgatcagtgttattcatcatcagagaaatacaagccagaaccacaataagataccacttcacaccagtcagaatggctaaaatgaacaactcaagaatcaatagataatggtgaggaagtagagaaaggggaaccctcttaaactgttagtgggaatgcaagctggtgcagccactctggaaaacaatatgaagattcttcaaaaagttaaaaatagagctaccttatgacccagcaattgcactactcagtgcaatttatccaaaagatacaatcatagtgatttgagggggcacatgtgcccctatgtttacagtagcaatgtccacagtagccaaaatatgggaagaattgagttgtccaccaaaagataatgaataaagaagagtgagatatgtatatgtgtgtgtatacatatatatataatggaatattactctaccatcaaaaagaataaaatcttgacatttgcaaggacttggatggaactagaggatttcatgctaaatgaaataagtcaatcagagaaagacaagtatatgaaagagatatcacaagatatcacaaaagagataatcacaagagaagagggaaacataaaataagatgaaatcagagagggagacaaaccataggagacattgaactgtaggaaacaaactgagggctgctaaagaagagacgggtagagggtgggtgatgggcattaaggagggcacttgatgtaatgagtactgtgtgttatatacaactgatgaatcactaaattctgtctctgaaactatcaatatactatatgttaattaattgaatttaaataaaatttttaaaaatgcagccggtcagcacacaacccacattttaagtgccatgtagtttgtggccaccatactgcacaacgcacagaacacttccttctgcacagaatgttctttggatggcactgctctgcctgtgggcctcaagtcagatgcattagacacatgtaaaacgaaaagaccaatatgatttctcttacaacgacgtcagatttctgtctgggatgtgaatacatataaagctggtgtgtcacaaaatcaaagagggttattcatgggtctggtgccttcaggcacaaactgtcctcaattacaacaggaaaatccctgtccctccacctctcttccctcactgaggaccctcgcctgcatcacattcccagatgagttctcttctagatgcactcagggctatcctcagagctgagtctgcagagacgggatgtgcaactcaaggaaacggattctgctaagtgaggaggaggccagggtaggaccagctgggagactcccacagggttattcagagcagcagttctccaagtgtgctctgtggaacacctgacgtcacctgacgtcactgtggtccatgaggttagaacctattttcgtaacagacattattggccttttcacttgttgacattctcactgaggtgaaacttagcaagaatggaggttatggctgcaaacagcaatagctcttcttcttcaccactacctatttccagaaagaaacaaaaacactgttttctgccatcttttcatgcagtcatagtggttcatgaatgttctggcagatactctcaagagcattttttaaaaaaagaatttatttatttgacagagaaagagagagagattgagagcacaagcgggaggagtggcagacggagggagagggagaagcaggctccccgctgggcaggaagccagatgcaaggcttgaacttaggaccctgggatcatgacctaagccaagggcagacacttaatggactgaggcacccgagtgccccactttcaaaggcattagcaatgcctaaaagagaggcaagtggttggtcttattaggtcatgcaccaaagtcatcgtaccgtttctagctgatgacaaggcagggtttcatcggcgaatttgaaatcattgatgatcacggagctggggaattgttgtgacctcaggggcaggtcaaacatgtgtggagggatcacccccagactagatacacaactcaaagatctacagaaatggcagaagaatctgctcccttcccataagtttggtttcattgtactgacaaccccgttggcatcacagaccagggagaagcaagatgaaaacacacacgagggaaaatcctgagattcttttcctagggatgtgatacatactggcaaataaaacctcaatggaaaacaaaaacaaaacaagctagtatcacactcaaacatcctggttgaagcattaaaagttataatttctactaattattcttaaatccacatgtttttaaaagagtttatttatttattcatgagagacacagagagagagtcaaagacagaggcagagggagaagcaggctccttgcagggagcccgatgtgggactcaatcccaggaccgcgggatcacgccctgagccaaaggcagacgctcaaccactgagccactcaggcatccctcaaatccacattttaaacatgtcttttatgtgcatgtgcatttctgctacatctgtaagctccaaggaaaatatttttataaaatttgtatgaatttaactggttaactggctgctgctgctgcttctctttctccttcttcttttacagaatgctggggtttttaaaaaagattttatttatttttttcatgagaaacacacagagagagagagagagagagagagaggcagaaacacaggcagagggagaagcaggctccatgcagggagccagatgcgggactcgatccctcgtctccaggatcaagccctggcctgaaggtggcgctaaaccgctgagccaccggggctgccccagaatgctgttttaactaaaggaatgaatgacacagaaacttgcaatatttatactaggatatttggaagacagtttcctgaaaacaaacatgaacctatcatttcatgaaaatcaactcacatatgatagccgacaatacttgaagcctcaataaaatgtaagctctcaaaataataatcagaattttagaaaagttgtgatccaccaaaagccttgacaccttctcagtgttgacaaacatttctgttgggatatgtggtaattttaaaacaaatgtgactttctggtaattcattcctgtctaatcaacactggaacacccacataacctagtgaaacaacacattaggttaaaaaaaaaaatcatgcattagtacaggatctattcagtgacaagttgggcctgtggattttagtataacagagaaggacatagtgatactgtgttcggtgccacttggcagataacttgagaaagtacaatttctgtagttttaatatagtatctaagatgactttccataattatatgagaaagttatgaaacatatggtcctcccctatttttgcaagtctgtaaatgttttcacacaaatcaaccaaaacaacacaataaatacagaagcaaatctgaacgactagtactttctaatagagacactctaatgagacagaagaaacttaaaattgtgtaaaatgaacaaaaccactcacgaccctgtgtatttggggaaatagttatttttcataaaaacaatattactgttttcatggcatgggttattaatatgattctaatcatattaattaaatcatatcatttattaatgaattaataaaattttacaatatttttatttatttattttttagagaaagagtgtggcagggaggggcagagggagaaggagagacagaatcttgagcagttttccctgctgagccccaaacccttggcggctagatctcaccacctgagatcctgagttgagcgcaagtcaagggtctaaggcttacctgactgaggcacccaggcgccccaatacatttttaaacctcttttgttcctactatgataaatattgacagattaacccacagccacaattttcctgggatcctcagtaatctgtgagacggtgtagatgccctgtgggaacagaatgttctagactcactgcctcacacagctccctgaccaggactcagggagtcagagtgacaagagcgctgtggggcaaggtctcaggaccccgggctgcctctcaggctctcatgccccagggcgggtccggggcggggacgctcaggctcgggagtccccacctccccggggatttcacttcttctcccaacctggctctgggccccctgcctggagactcatgacgcagccccagcgcgcactcccattgggtgcagcctttctggaggagccaatcagcggcaccgggtcccgggctctgaagtccacaccagaaccgccaggacgcagctgctccaccgaccctaaaggtctgggctatggtgcccggaaccctagccctgctgctgtcgggggccctggccgtgaccctgacccgggcgggtgagtgcgggcgggagcgaggggaccggcgggcggggacgcgggaccccgggaagccgcctctccgccgcccccggcccctcccgcctccgccccgccccgggcatctcccctgggccccgggccccgcggcgggagggggtcgggcggggtctcagccctcggctccgcaggctcccactccctgaggtatttctacacctccgtgtcccggcccggccgcggggacccccgcttcatcgccgtcggctacgtggacgacacgcagttcgtgcggttcgacagcgacgcggccactgggaggatggagccgcgggcgcggtggatggagcaggaggggccggagtattgggaccggcagacgcggaccatcaaggagaccgcacggactttccgagtggacctggacaccctgcgcggctactacaaccagagcgaggccggtgagcggcgcgggcccggggccagggcacgacccccatccccccgaccggccgggtcgccccgagggtccgggtccgggcgtcaccccgagtccgaggccccccaccctaaacgggtcctcagagccaggaagaggccgtgcgccctttcgagcggttttcctttcggtttgaacttagaagtcttgcggtcccgggactactcgggtgttcaccgcggggcggggcctcggggcctcggggcggagctgaccgcgggggggggccagggtctcacaccttccagtggatgtttggctgtgacctggggcccggcgggcgcctcctccgcgggtacagtcaggacgcctacgacggcgccgattacatcgccctgaacgaggacctgcgctcctggaccgcggcggacgcggcggcgctgatcacccggcgcaagagggaggcggcaggtgatgcagggcacctgaggaactacctggagacgacgtgcgtggagtggctgcggaggtacctggagatggggaaggagacgctgctgcgcgcaggtaccggggccccgggcctccccgatctcgcctccactagggagggcttcccaccaggaagggaatatggactcagggtcagaacacggcccctcccacgggtggggacaggggatccgcctgggtgttgatagtcctactagggtgactcacccagaggccgcttttctcgaaggacaatggagcaatccagggtctccgggaggcaggtggaggccatcctgagataaccgccagtggtgccctttgacctggcagctgggtgggaaccatgactttccctcaaggccttcttcaatgaaaacatatttggagcttgaactgggagttttctgactccttcagcctccaccacggtcaggaccattagtgtgctctccaccttagacctgcagcctcctaccctggactctctccctgattctagaatttctaaagattaggacatcccaaaggctaggttggtgactgggctttgtgcttcttccaagtgaaccaactgccctgtccaccctaggatggtcacacaaatgcagtctcagtggaccacgcagttaaccaaagtgtgggttttccaattcttccttctcagaaccccccagcacacgtgtgacccgccaccccgtctctgaccatgaggtcaccctgaggtgctgggcgctgggcttctaccctgcggagatcaccctgacctggcagcgggatggggaggaccagacccaggacacagaggttgtggacacaaggcctgcaggagatgggaccttccagaagtgggcggccgtggtggtgccctctggacaggagcagagatacacgtgccacgtgcagcatgaggggctggcggagcctgtcacgcggagatggggtaaggagggcctcggggtagagcttctactcagggcaagtggagctcttctggagaatttcagcagagtcaggtctcaagccagaggctggaccctcatcctccctcccctttccagagccttcccctctgtccaccattgtcatcgtcagcattgctgctctggttctcctcgtggtcgctggggtgattggagctgtgatctggaggaagcagcgctcaggtagggaaccgactgaatactctgtgttttcctgtcctgttggggggtttcctagggagcacgctgtcctgccttgttaacgggaagtaccgtccatatgcggttactctcctacactggagctgtgtactcacactcactgtgcagcaaacacttgggaaaatgaaggccagagttttgccttggtgattctggtgacggggactgattcccagccgtcacaggacagagcggaaggcccctgctgaggacagacctccagcaagtcaggtggtccagtgacccctcacctcatggcttgtctcctgaccctgacctgggcggtcagtcagaattctgcagactcactctgcaccaggactgggagcttcctcgaggatctcctggcccagccctgtgcccggcctctcacatgatgttttcttcccacaggaggaaaaggaccaggctactctcatgctgcacgtgagtatgtagggagtgatccctgagaccccgggggagtgtagacaggaccccatggggaggtcacccccacagctgctcctttagtctcacctcctgtgagctctgaccacatcctgtttattctcctctaggcgatgacagtgcccagggctctgatgtgtctctgacagctcctagaggtgagaccccagagaccctgaagtggggagggttggggccttggggacctgatgagtgcgagggggactgttgagaatgtcagcacttatgtgactgacctcagtttgtacttgattgtttttcagtgtgagaccagctgccctgtggggactgagcgatgcaagatgtgttcacatctcacgtgatgacatcaacaaccctggcttgtctctgcaaacagtgcctgtgtccctaggagcataatgtgaggaggtggggagattggcccaccctgcccaccatgacctgtccctaatctgatgtgcgctctcttctctgatgtgctttcctgtccagcagagggagggctggaccatctccatccctgtctttgtttcatgttgggctgagtgtagtgccttacttttctattcaaaatgagaatccagggtagccctggttgctctgtggtttagcgccaccttgagcccagggcctgatcctggggacccggatggaatcccatatctggctccctgcatggaacctgcttctccctctgcctgtctctcatgaataaataaataaaatcttaaaaaaaaaaacaaaatgagaatccagatatattttctaattcatggcacgtgaggctgatgaagtaataaaagtgaaatttgtaaggttgagacagaaatgaatggatattgaatgcaccatcctaaaggaaatggtagctaggtgacatgatgcacgtgttagctaatgctatggttgaaatcattttgtagtatagaaatgtatcacattaacaggttgtgcctgtaaacttacacaaaagtgtacatccgttacatttttttttccgttacattttaataaagctaaaaaatgtctgaaactttgtcttaaactatacatgcatttctaactcattgtgatacatacttacagttagagacttagggaagagagagtatatggggcctttttttatttcaagaaatgccactaaacaggcttgaggctacacagccaggaacagaatccacaatggaccctcagtggaggcccccatacaaccagcttcctgctactgggtgtagatgtgactgttcacaccactgtctcccctgatgtaggacattggaccctgaggctgaggctctctctctgctgcaccttacagctgcatgacactcctgtgacactcctcagaccacctgggctcaatgcatgtacactgtcccagtgtctgtcacatgtcctaagtgtggtaggtggtcatgtgactgttgtagtttcatgtcatgtccaagttcaagactatttgacagagtgatttctcctctctgtagaaggagatggtctctgccatctttaagattcttttaagtgtgggattcctttacgtgggaagagtggtacaagttccgggaatggacatcaagggtcaggaattggagaggatgacagatttcaacatttggagcagttatctcagactagaacttgatctgtacactgtaggccctcgtgtgagcttgggtgaaagagtgactcctaaatggcatctttcaccttatcccttgatggttgttacaggtccagcttctgtcggctccagttcctactcaaagataagtggaagagaatcgttgggtgatgaagtgattgctcagcgtgtcttctcctggcctttgtctcttcctgagattaaaaatccagatctgtatcacttcagatgatgtacatatgctgacattttaggtttctttatacatgcatatatttctggggagaatatcttcaatttttaaaaatttttttttatttatttatgatagtcacagagagagagagagagagagagagagaggcagagacataggcagagggagaagcaggctccatgcaccgggagcccgacgtgggattcgatcccgggtctccaggatcgcgccctgggccaaaggcaggcgccaaactgctgcgccacccagggatcccaaatatcttcaattttatcagatttcatggcctccacaaaagtctgaaacactattccaggttagacattatcctatttcatctctagtccacgaacaggtaataatcgcagtgatttttaacagatccaatgatgtgatatgcatgctcattattgttttggtaatgaccaatctcacgcaggatgatgtagagcttttttgcttacgctcactttcaatttctgtatgtatctttttataagctgagtaacagtttacagaccagtactggctcacaggagacacaaatccccactggttgaggtgacttacactctggcacctactttcatgccatataaatagcagaaaggaaaatagttgatggggattccatttccaataacactgtggactgagttttaaagattttatttatttattcatgagagacatagagagagaagcagactccatgcagggaacccaatgtgggactcgatcctgggacaccaggatcatgccctgggccgaaggcagacactcaaccactaagccacccaggcatcccagggtacttttcatatctagaaaatcttagcttggcttctttggctcatgagcttcacagagaggaaataatgctcagagcttattcacgtgaggaacagggaaacaaacattccctcctgaaaatctgggaaactcagattcatatcctcggaaaagaatggttcaaatcaaatctattctatattcaaatacaagaatattctaaggaaatttgcctttgagtcagcaaaaagtgagtaagcaactattttaaggagtttgcaagcacacaccaacccttctgtgactcataatccaatattggcccattggccattggggcaaaataacttcatgtcactagattagtatgtaattgtcctgtattggtgatgacccaaaaattataagaaagaaacaaatttctccagagaaatctctctttgaaactgtgtgtcaaaaaaatgacacaaataattacacaaagaaataaagcaattcataacaaaagtgtaaagttcaaatgggaaaaagactgtgattgagcaactttagaaagaatcagtagtaaaaaaaagctcaggaaacttcaatattggaatcataagacaaaatataacatgactagggtatgatagaagtatataaatatatattatttgaatatatattatggatatgatataatgaaaaaatcactatattgaaagtgtcgaaaaaatggcaaaagcaaaagcacttcttgaaaataagtacaatgtagagtgattgatgattcaatgatgaaaatattacagtttattcactgaataagaagtattcagtaaaagaacgagtgaaggcatgaaaaataaaaagtaaaatggcatcctaaatccaacagtgtcaatattaacattagatgtcaatgtcaattacgtccatcaaagtgcagattgttagactgaacacaaaacaagatccatctacaaagcaagatccatctacgccgtctactagagtgtctgctagacacccttgagaatcagttacaaactgattgaagtcaaaggggtggaaaagttacgtcgggcagacaagcatgagaaagctggagtggatgcactcatgagctaaaagggactttaacaatgctagtcagatagtcaggatgggggggcggaggtaagatggagacgtggggggactctgaaatttgcctcctccttccaatacagctggatcaacgttcaagggttttgaacaactgggaagacatccggggatcaaggaaccaatgtgcacacttagcgagggaacgtggcagatgcgaggttgcgagccctggttgggccacgtggcaaggaaagccgctgccagacgcaggagggcgcccttttaggggagcagagggagaaagccgcaaagagcccagcaggtaggggtgcacagtaagtcctggtgaggagatccctgggccggtcggaagaggtgctcccctcccggagggcctgtggggggcatatttagcctctccaaggacgaaaggcccgccgggagccgtcgcgtggcgttcagcagagcagggtcgaggtgcgcagaggacggaaaacctcctcctttacttctctgggagccgcaacagattcaagcctctgtgatgacttctctgggacagagggggtaggggaccgagacgagggcagacggccagtagcctggctccagccaggtcttctcgctgagcagctgcagtagactctagcctctgcgcggccactgtgcagcggccttttgggcttgggacggtgctggggacaccctgagcctctctgcaggcggacgggggcaggcgtgcacgttcccaggccctttaaaacttggaattttgaaccccaaccactgaccagacagaaactctaagagagctgtggcttggggcgcgcccacggctgcggcacagagggtagggaatccgggaccgcccaggacacaggttattcgcttttctaagagggtctcctgagcagtgggagttcgctcctcggccaagaggtgagtgaagccacattgtatcctgcccaccaccgcacctccaggcgaggctggagtccctgcacgaaccccgcccctgccgggcagcagcgcccttcccgggacaagtgggccgcttgagcccacagagcgcctctccccagagcaccgacacaggtgccccacatctgcggagtttactgattgaagaaagctccaaaacatcagcttcgatggaaatatgaccaggcttgcttcctttttcttttttctctcctcttcttaattaaaaaaaaaaaaaaaaagcttttaaatttgttttttaattttttctttttgttccttattttttattttatatgtattttttctttttatcttttatttgtataaggcttataatattttgttcatttgtagatttgtttccttctcatatttttaagatcaggcttcttttttaatttgtcctcttttcttctttcccttttctttctttcttaattttttctttttctttctttctttctttctttctttctttctttctttcttattgtttagaatcaagtttgtgtattagtttcttatctttttttcttgtcttggatcaggggttttttggtttgttttttcttttttgttttcacttcttttcttttttcttttataggtttttattttttaagattttatttatttatttatgagagacacagagagagaggggcagagacacaggtagtgggagaagcaggctccaagcagggaacccgacatgggacatgaaccccagtctccaggatcacgccctgggctgaaggctgcgccaaaccgctgagccaccagggctgccctcttttataggtttagtttgacaaacaaatcaaagcatatcaacttaatggtccaaacactccccactacaagcacggaggaactctgtgcagggaggaccaataggaaagagcagccaaaacataacagcagagtgtatacaggatataccagaaacacatcctaaacttattgttgttactgttattattgctattttggctgggtttttttttttttttttcactctttctttccttctttctttcatggacaaaatgactagacagagaaattcaccccaaaagacacacaaaaaaaggaggtaatactcactgccagggatattatcaatatggatataagtaagatgtctgaactagaatttaaaacaatgatcattaaaaaaatttaaaaatgatcataaagatattagctgggcaggagattggtaatggcacaggagtagggtcctcacctcacctggccccaccaacttacctggataactttcaaaccatcctgaaaacctatgaatctgacctgagatttaaagagaaaatagccagaatgctacagagagaagggttttcacttctatcaaggtaagaaggtggaaaaaaaacaaaataaaaaagaatcaagtgagggagccccccaacctgctcccccaggagccgggctaaggcctgcgggagcctggggagggggacaggaaagccaagcccctgagaagcggactttaactccgctctggattcttccccgatggaaaggcgctcagcagggaaactgggcagaagcacaggggtacagtggagcctccagtctcccagggtcattagcagaggaggggcactcggggagagtgcacccacactgcagccaagctcggtgaagggctggagccacgcccggtggggccttggggagaagctggtcggtcaggcgggggctctgggccgagggggctgagccctgctgccttcgggagccgcagcccggagcgcatgattccagcagcgcaggccgcagatcctagggcgccggtggacacagcccacgatcctgcgctcccccggtacaagcggaggtggggagggcacaggatagcaaagatgctcctgccgctgagtgcccccgagctgtgcaggtgagcatcccccccccgcccccgcccagggagcatccaggctagtgtggactgggagactgcgggtggttactgggggagctgactccagagttggagatctggccaaagctatttttttctcttcctttcaccttgcttttgagagaggcagggcctctagggaacaaaagcctcacagggtaaacagctcccactgagccccgcacctggcaggaggtggggcagctcccccaggtgcacacacatctgagaatcagcacagcaatcccctcccccagaagaccagctggaagaacaggggaagagtttactgaacaagcagcgctggaaagctccaggactgagggaaaatagtatgtagaactagagggtctttttttttttttttttttttaattacgactcatttttatatcaggctaaaattttccaatattttttctcttttcccaccttaactatgatactttaccaactcttcgtttttaagtttttttcctttttgactgtcatatttctacaattacatgtattagatatatttttcacttctggattcccttcaatgtattcaatttaattttgggagatatacgagctatagggtttttgtttttgttttttgttttttgttttttctgtctcattttgttttacaatagtggaagttagtaccttccaacacatgaccaaatacacccagaatcaaatggaacaccatgttggttcattctcagagattatattctctcttccttcccattctgccccactcttttatcttatttatatctttgtggttaatgttgggtctttatataagtattgctggtttatataaacttgggactggcatcttctaacatacagaacaaaatatactcagaaccaagaggatcaccctctaggtcccctcaagattacattgccaatccactaccacttcctcaccaccatcatcctgccctctttttttcccctttctttttttcttctttcttgtctttggttttgttttttttttaaatttttactagtttgttttaaaatttgtttttcatttaagtagtccttttgttttattgtgttctgttcttctttttcttttattttctggtctctgacctctttgaaatcatctacagtgtatttttcttaggctgtggttgatattttttacttagttcattcatacagccactcctgcactggacaaaataaccagaaggaagaattcaccacaaaagaaagaaccagaaccaatactctctgccacagagttacagaatatggatttaaatacgatgacagaaattcaagatgaatggataaagaagatgtggcatatatatgatggaatattagccattagaaacgatgaatactcaccatttgcttcaacatggatggaactggagggtattatgctgagtgcaataagtcaaccggagaaggacagtctgacactatgagttttactcatacggggaatgtgagaaatagtgaaagggattatatgagaaaggagggaaaatgagtgggaaaaattagagagggtgacagaacatgagagactcctaactctgggaaatgaacaaggtgtagtggaaggggaggcagatggggtgatggggtgactgggtgacaggcaccgaggggggcacttgatgggatgagcactgggtgttctactatatgttggcaaattgaacttcaatatatatatataatataaagaaattcaattcagaagtacaattataaagttactggtggctctggaaaaaagcataaaggactctagagacttcattactgcagaattgagatctaatcaggccgaaataaaaaacagttttaactgagatgcaatccaaactgggtgctctgctagggttaatgaggtggaagagagagtgagatacatagaaggaaagttgatggaaaggaaggaagctgaggaaaaaagagaaaaacaattaagagcccacaatgaaaggcttagggaaataaatgatagtttgtaaaggaagaatattcatcttattggggttccagaagaggctgaaagagagagaggaccacaagtatatttgaacaaatcatagctgagaatttccccaatctggagaaggaaacaggcattcagatccaagagatagagaggaccctctcaaaaattaataaaaaccattcaacaccttgacgataataataatgatagtgaaacttgcaaatttcaaagataaacagaaaatccttaaagcagcttgagacaagagattcttaatttatatggggagaaatatcagattaacagcagacctctccacagaccaggcaggtcagaaagggctggtaggatatattcagggtcctaaatgagaacatgcagccaagaatactttatccagcaggctctcattaagaatagaagaagagataaagagcttccaagataggcagaaactgaaagaatatgtgaccaccaaaccagcaaatattaagggggacactgtaaaagaaagagggagcccagagaatccacaaaaacaaggactgaatagggaatacgatgacactagattcctgtctgtcaatggttatgtgaatgggctaaattattgcatcaaaagatgcagggtatggactggataaaaaagcaagacccatctgtatgctgtctacgagagactcattttacacctaaggacacctcagcctgaaaataaaggggtggagaacaatttaccattcaaatggtcctcaaaagaaagctagggtagcagtcctcatatcaaataaattagattttatcccatactgtagtaagatgcagagggacactatatcatacttaaagggtctatccaacaagaagacctaacaattatgaatatctatgcctctaatgtgggagctgccaagtatatcaattgattcataaccaaagtaaggagatacttagataataatacactaatagtaggaaacttcaacacggcactctctgcaaatgacagatattctaagcaggatatcaccaaagaaacaggggtcttgaatgatacactggaccaaatggatttcacagacatatacagaacatttcagcctaatgcaactgaatacacattcttctcaagtgcacatggaactttctccataatagaccacatagtgggtcacaaatcaggtctcaacccatagggaaagattgggattgtctcctgcatattttcatatcacaatgtttgaaactacaactcaatcacaagaagaaatttggaggaaactcaaacacatggaggttaaagagcatcctactaaaagatgaatgggtcaaccaggaaaaaagagaagaattaaaaagattcacagaaactaataaaaatgaaaatataactgttcaaaatctttggaatacagcaaaagtggtcctaagagggaaatacatcacaatataagcctacctcaaaaaattggagaaaactcaaatacatagctaaccttgcacctaaaagaattggagaaagaacagcaaataaagcctgaatccagcagaagaagagagataataaagattagagaagagctcaatgaaatagagaccagaagaactgtagaatagatcaacaaaaccaggagctggttctttgaaagaattaataaaatagcttctagccattcttattaaaaagaaaaaagatctaacaaaatcactgacagaggagagatcacaacaaactccaaggaaatacaaacgattttaaaaacgtattattgggggggggggaagaaaaaaaaaaacaaaagacgtattattagcaatcatatgccaacagattaggcagtctagaggatatctatatacagatgatactgtacatagaaaacccaaaagactctatcccaagactactagaactcacacagcaattcagcaatgtggcaggatacaaaatcaatgcacagaaatcagtggcatttctgtacactaacaatgagactgaagaaaagaaattaaggagtcaatcctatttacaattgcacccaaaagcataagatatctaggaataaacctaaccaaagaggtagaggatctataccctaaaaacacagaacacttctgcaagaaattgaggaagatgtaaagagatggaaaaacattccatgctcatggattggaagaattaatatggtgaaaatgtctatgctccccagggcaatgtacatattcaatacaatccctatcaaaataccatggactttcctcatagagttggaacaaataatcttaagatttgttatggaatcaaaaagacctcaaatagccagaggaatatagaaaaaaaaaaaccaatgccaggggcatcataatgccagatttcaagctgtattacaaggctgtggtcatcaggacagtatggtattggcacaaaagcagacacattgatcaatggaacagaataaagaatccagaaatggacactcaattctatggtcaactaatactcagcaaagcaggaaagagtatccactggaaaagggacagtctcttcaataaatggtgttgggaaattggacagccatgtgcagaagattgaaactagaccattctcttacaccagacacaaagataaactcaaaatggatgaaagacctaatgtgagacaagaatccatcaaaatccgagaggagaacacaggcaaaaccctttttgaacttggccacagcaaattcttgcaacacacatctatgaagtcaagggaataaaaagcaaaaatgaactattgggatttaatcaagataaaaagtttctgggacacctaagtggctcagcagttgagcgtctgtctttgacttaggatgtgatcctggggttccgggatcaagtcccacatcgggctccctgtgaggagcctgcttctccctctgcctgtgtctctgcctctctctctctctctctgtctctcatgaataaataaataaaatctttaagaaaaaaaagataaaaagcttctgcacagcaaaagaaacagtcaacaaaactaaaagacaacctactgaatgagagaaatttgcaaatgacctatcagataaagggctagtatccaagatctataaagaacttaccaagctcaacacccatgaaacaaacaatcccatcatgaaataggcagaaggcatgaacagaaatttctccaaagaagacctacacatggccaacaagcacatgagaaaatgctccacatcacttgccatcagggaaatacagatcaaaaccacaataagatcccaggtcacaccagtgagaatggtgaaaattaacaagaaacaacaaatgttggagaggatgtggagaaaggggaaccctttgcactgttagtgggaatgcaagctggtgcagtcactcaggaaaacagtgtggaggttcctcaagaagttaaaatagggacacctgggtggctcagcgctttggcgcctacctttgactcaggatatgatccgggagtccggggatcgaatcccacattgggctccctgcatgattctccttctgcctgtgtctctgcctcttgtgtgtgtgttgtgtgtatgtgtgcacgcacgcacacgtgtctcatgaataaataaataaataaaatatttttttttatttattttattttatttttttttaaatttatttatttatttatttatgatagtcacagagagagagagaggggcagagacacaggcagagggagaagcaggctccatgcaccgggagcctgatgtgggattcgatcccgggtctccagaatcgcgccctgggccaaaggcaggcgccaaaccgctgcgccccccagggatccctaaaatatttttttttaaataaagaagttaaaaatagagctaccctatgacccagcaattgcactactggggatttaccccaaagatacagatgcattgaaataccaggacacctgcaccccaatgtttagagcagcaatgtccacaatagccaaatggtggaaggagccatgatgtccttcgacagatgaatggataaagaaaatgtgtctatatatacaatggaatattagccatcagaaaggatgaatacctaccatttgcttcaacgtggatggaactggagggtattatgctccaggtgaaataagtcaattggagaaggacaatcatcatatggtttcactcatatggggtatttaagaaatagtgaaagcgattataagagaaaggaggggaactgagtgggaaaaattagagagggagacaaaccatgagagactcctaactctgggaaacaaacaaagggttgtggaagggaaagtggatggggagatggggtaactgggtgacgggcaatgaggaaggcacttgatgggatgagcactatatgttgacaaattgaatttaaattttaaaatgtaaagaaaaatgggatccctgggtggcgcagcggtttggcgcctgcctttggcccagggcgcgatcctggagacccaggatcaactcccacgtcgggctcccagtgcatggagcctgcttctccctcagcctgtgtctctgcctctctctctctctctctctctctgatgactatcataaataaataaaaattgaaaaaaaaaactttataaaatgtaaagaaaaatatattatctgggcattaaaaaaagcatagaagacattagagaatcccttactgtagaaattaaagatttaaaatctaatccggctgaaattagaaatgctattactgagatgcagatgcaaatgaagtctctgacaatgaggataaatgagatggaagaaagagccagtgatatagaaaacaaaataacagaaaatgaggaagctgagaaaaaagaaagtcaactactgacttatgaagggacatttggagatctcagtgattccataaagtgaaataatatccggatgataggggtcccagaaaatgaagtaggggccgaatgtttatttgaacaaattttagctgagcacttccttaatctggggaaggaaataggcatttaaccaggaggcatagagcaacccccttaaaatcaataaaaataggtcaacaccttgacgtataataagaaagtttggaaatttcagggataaagagaaaatcctgaaagtagctcaagacaagaggtccttaatctaaaagggtagcacataaggctggcagcagtcctgtccacagagacttggcaagccagaaaggactggcatgatgtattcaaggtgctaaatgggaatgatatgcagctatgaatactttatctgtcacgcagatgataaagaggagaaataaagagtttccaggacaaacaaaaactaaaggaatttgtgaacactaaatcagttgttgcaagagatattagagggaatcctttgagtgaagagacagctcaaaagtaacaaaggccagaaaggaacatagacaatctatggaaacagagactttagaagtgatacaatgacatgaaattcatacctttcaataattactctgaatgtagatggactaaatgttccaatcaaagacacagggtattagattagataacaaaaccacatcaatgtgctcctacaagacactcattttattttttatttttatttaaaaaaatttttaaatttatttatgatagtcacagagagagagagagagagagagaggaagagacataggcagagggagaagcaggctccatgcaccgggagcccgacgtgggattggatcccaggtctccaggatcgcgccctgggccaaaggcaggcgctaaaccgctgcgccacccagggatcccaagacactcattttagacccaaagacacctccagattgaaagtgagggggtggaaaccattcatcgatgctgatggacatcaaaagaaagctggagtaacaatccttataacagacaaactgtataaaccaaagactgtaataagagatgaagaaggacactatcataataaaagggcttatccaataagcagatctaacaattataaatatttatgctcctaacttgagagaagccaattatataaaccaattaatagcagagttaaagaaacacattgataataacacaaccatagcaggggacttcagtaccccactcacagcaatggacagatcatctaagcagaagatcaacaagaaaataagggctttgaatgacacaatggatcagatggacttcacaggtatattcagaacctttcatcctaaagtagcaaaacactcattcttcttgagtgcacatagaacattctccagaagagatgacatactgggtcacaaatcaggactcaattgatatccaatattgagattattccctacatattttcataccacatgctttaaagtgtgaaatcaatcacaagaaaaactttagaaggaacacaaatacatgaaggttaaaaatcatcctactaaagaatgaatgggtcaaccaggaaactaaagaagaatttttaaaagcacatggaagcaaatgaaaatgaaaacacaaaagctcagaacctttaggatgcagcaaaggtggtcctaagagggaagtacatagcaataccagcctttctcaagaaacaagaaaagtcccaaataacccaaccttacacctaagagagctggaaaaagaataggaaataaagcctaaatccagtaagagaagagatataatacaatcagagcacaaatcaatgatatagaaattaaaaaaaaaacacacagtagaacagatcaatgaaactagaagctggttctctgaaagaaatgataagatcaataaatccttagccagacttaccaaaaagaaaagagaaaggacccaaataaagaaaatattatgagcaagtgttaccaacagattaggcaatctggaagaaatagatacattcctagaaacatataaactaccaaaactgaaacaagaagaaatagaaaacctgaacagacccataaccagcaaagaaattgaattaataattaaagatctcccaagaaacaagagttcagggccagattgcctcccagtggaagtctaccaaacatttaaagaagaattcatacctattcatagaagtggtggggaaacttccaaactcattttagaggccagcattaccttgatcccctaaccagaaaaagatcccatcaaaaaggagattacagaccaagatccatggtgcaaaattcctcatcaagatatcatgctaataggatccaaccgtacatcaaaaggattattcgccatgaccaagtgagatttattcctgagctgcagaagtggttcaacatctgcaaatcaattaatgtgatacaccacatcaagaaaagaaaggacaagaactatatgatcttctcaatagatgcagaaaaagcatttaacaaaaaaaaattgttgattaaaaaaaaactctctgcagtgaaggaatagaaggaacatatctcaatatcaaaaaagccatacaagaaaaacccacagtgaatatcatcctcaatgcataaaactgagaggtttccccctaaggtcaggaacacgacagggacatccactctcaccagtgttgctcaatatagtactggaatcagacaacaaaaagaaataaaagccatccaaatcagcaaaaaagaagtcaaattctcactcttcacagaaggcatgcaactctatgtagaaaactcaagactgcacccaaaaattgctagactgatcaggaattcagcaatgttgcatgatatatgttcaatgcacagaagtcagttgcatttttatacactaacaaagatgccaaagaaagagaaatgaaataattgatcccatttacaattgcaccaaaaaaaaaaaaaaaaaaacaccaaaatacacctagaaataaacctaaccaagtaggtaaaggatctgtattctgaaaggtatagaatacttgtgaaagacacaaagaaatggaaaaacagtccatgctcgtgaattggaagaataaatattgttaaaatgtccacaatacacaaagaaatctacatatccattgcaatccctgtcaaaaagtcatcagcctttttcatagagctggaacaagcaactccaaaatttgtatggagggacgccagggtggctcagtggttgagcatctgcctttgactcaggacgtgatcccggagtcccgagattgagtcctacattgggcttcctgccaggagcctgcttctctctctgcttatgtttctgcctctccctctctgtgtctctcatgaatgattaaaatcttttaaaaaataaaataaaataaaatgtgtatggaactagaaaagaccccaaatatccaacgcaatgttgaaaaagaaaactaaatctagaggtatcacaattctggacttcaagctgtattacaaagttgtaatcatcacaacagtatgttaccagcacaaaaacagacacataggggcacctgggtggctcagtggttgagtgtctgtctttggctcaggttgtgatcccaggatcctgggattgagtcccacatcaggctccctgtgaggggcctctgcctatgtctctgcctttcactgtgtctctcatgaataaataaataaaacgttaaaacaacaacataaccagacacatagatcaatggaacagaatagagaacccagaaatggaccctccactctgtggtcaactagacttcaacaaagcaataaagaatacctgatggaaaaagaacagtctcttcaacagatggtgttgggaacattggacagccacatgcagaagaagggaactggatcactttcttataccacacacaaaactagactcaaaatggatgaaggaactaaatgtgagactggaatccatcaaaatcttagaggaggacacaggcagcaaactctttgaccttggctgcagcaattctggctaggcatgtctccaaaagcaagggaaataaagtcaagaatttgaattcttgggagttcatcaagataaaaagcttttggggatccctgagtggctcagcagtttagcgcctgccttcggcccagggcatgatcctggagtcctaggatcaagttccacatcaggctccctgcatggagcctgcttctccctctccctctgcctgtgtctctgtctttgtctctgtctctctctctctgtctctgtgaataaataaataaaatatatttttaaaaaagataaaaagcttttccacagcaaacaaacagttggaaaaagtaaaagacaacctaaagaatgggtgaagacatttgcaaatgacatatcagataaagggctagtatccaaaatctataaaaaacttatcaacatcaacacccaaaacacaaaaactccagtcaagagatgggcagaagacgtgaacagacattttttccaaagaaaacatacagatggccaagagacacatgaaaaaaaaatgctctgcatcacttagcatcaaggtaaacacaaatcaaaaccacaatgaggggcagccccggtggctcagtggtttagcacagtcttcagcccagggcctgatcctggagacccgggatcgagtcccacatcaggctccctgcatggagcctgcttctccctctgcctgtctctgcctctctctctctctctctgtctctcatgaattaaaaacaaacaaacaaacaaaaaaacaacgaggggccaaactgtggaaggagcctcggtgtccatcgaaagatgaatggataaagaaggtgtggtttatgtacacaatggaatattcctcagccattagaaacgacaaatacccaccatttgcttcaacgtggatggaactggagggtattatggtgaatgaagtaagtcaattggagaaggacaaatagtgtatgttctcattcatttggggaatataaataatagtgaaaaggggatccctgggtggcgcagcggtttagcgcctgcctttggcccagggcgcgatcctggagacccgggatcgaatcccacgtcgggctcccggtacatggagcctgcctctccctctgcctatgtctctgcctctctctctctctctctctctctctgtgactatcataaataaataaataaataaataaataaataatagtgaaagggaatataagggaagggagaagaaatgtgtgggaaatatcagaaagggagacagaacataaagactcctaactctgggaaacgaactaggggtggtgggaggggaggagggcagggggtgggggtgaatgggtgacgggcactgagggggacatttgacgggatgagcacggggtgttattctgtatgttggtaaattgaacaccaataaaaaattaatttattaaaaaaaaaaaaaaacaacgaggggcgcctgggtggctcagtggctgagcgtctgcctttggctcagggcatgatcccagatcctgggttggagccccaggggatggagccccacattgggctttctgcagggagtctgcttctccctctgcctgtgcctttgcttctctctctgtgtctcttatgaataaataaataaaatcttctaaaaaacacgatgagattatacctcacaccagtcagaatggctaaaatgagcaagtcagaagacaataaatgttggctaggatgtggagaaagaggaacactctttgactgttggtgggaattcaaattattgcagccactgtggaaaacactatagaggttcctcaaaaagttagaaatagaactaccctatgacccagcaactgcattactaggtaattatccaaaagatacaaaaatagtgttttgaaggggcacatacaccccaatattcatagaagcaatgtttacaatagccaaactatggatgaagtccagatgtccactgacagatgaagggataaagaagatgtgagatgtgtatgtatttatacatagatatatataatagaatattactgagccatcaaaaagaatgagatttttgccatttgcaacaaggttgatgaactagagatgattatactaagtataataggtgaatcagaggaagaaatgggcatataaataccatatgatatcgctcatatgtgaagttaaaaaacaaaacagattaacatagcacaagggaaggaaaaataaaataaatgacaattgagagggaggcaaaccataagagataatgaactctagaaaacaacctagagggctgtgggaggggagggggcgtctggggaagggataattgggtgatgggcattcaggaaggcatttgatgtaatgagcacgggatgatatacgcaactgatgtatgtcttttatcacagttccagatactagaagtcaatcaataactggaaattttggaaactcagaatgagtgaacaaaaatatgcagaattaaacaacacagttctgcatatcaaaaggtcaaagagatatcaaaatggaaatcagaaaatactttgagattaataaaaatgaagacagacataccaaaacctagagggtgctgctaaagcagtgctgagaggcaaaaacatagctgtaaatagctatatgaaaaagcaacatctcaggatgcctgggtggctcagcagttgagctcagggcatgatcgggggctttctgcatggagttccacattgggctttctgcatggagcctgtttctcctccctcttcctatgtctctgcttctttctctgcatctttcatgaataaataagtaaaatcttaaaaaaaaatagcaacatctccagtcagttacataaacttccacattaagtcaagaaagaaagaagagcaaactaaaccaaaagcaagcaaaagggggggaaaattagagtgggggaaaaattagagtggaagttgatgaaatgaaaaagaataaaattataatatataaaactaagtcaaatgtgagcttttgaaagatcaacccaactgacaaatcctcaactagactctttgaaacaaaagagagagaaatgaccctaattactgggatcagcaatgaaagagaggatattagaactgaccacacagaaataaagagaattacgagattatgatgaacaattatatgccaaaaaattaacttacttgcataaaatagacaaaaacatagaaagacacaaatgactaaagctgactcaagaagaaatagactatctgaatatacctataatgaagtagaagatggagtcatttgtcaaaaaatcttcagcaaaaaaacaaacaaacaaacaaaaaaacaattccaaatggcttctcgcttgtgaattataccacatgctgaaataatatcaattctttacaaacccttccaagaaggacaggagggaacccaactcattctatgaggctgggattattcagataccaaaaccagacaaagatatcacaagacaagaaaactacagaccattatcttttatgaatatggatgcaaaaatttcaaaagaatgtgacaaataaaatccagcaacatacaaagaattacatgcaagcctaatgaaatttattctggaaattcaagactggtttaacatccatatcaatcagtgtaatccaccatatttatatactagaaaacaaaagctgcatggttatctcaacagacagacaagaagcatttgacaaaatcatgataaaaatctcaacaagctactaacagaagggaatttcctcaacctgattaaaggcatttatagaaaccggtaagctaacatcttacttaatggtgaaagacttgtttttctcctaagatcagcaacaccaaaaggatgtccactctcaccacttccattaaaatttgtgctggagtttctagagcaagaaataagataaaatgcattctgatcagaaaaaaaaaaaggagtaaaattacttctattcgcagatgtcttctatatagaaaatcctagggagttaactaaaaagctattagaatgaataaacaagttcaatgaggttgcaggaaatgaagccaatatataaaaatcagttatatttcatacactttcaatattaatccaacaatggcaactaagaaaacaactccatttataacaccacttaaatgaaaaaaagtattagaaatacaaatcacaaaagaagtgcaaaacatatactctgaacactacaaaacattattgacagaaatttaaaaacatataagtaaatggaaaaccaaacattcaggaatcagaagacaatgttaagatggcaatgttttccacattcatttacagattcaacacaatccctatgggatacgtaactagctcctttttaaaaattgacaaactgattctatattcacaggaaaattcaaggaacttaaaatagccaatctttaaaaaaagaagccaaagtagtaggacctccaagtcccaatttcaaaactagcaaaacgacagtaatcaagatggtgtctggggatttgttcaagatggcagctcacgaatatccttgaacccatctccttccatggactcaacagatttacaactacatacagaataatctcctctgaagaagacctaagcctccacaacaagggataaaagggcatcatcaaaagaggtaagagaggcagagacactcatgccaaaagcaaaagcaaaaccataaccaaaaccaaaactaaaaaacccacttcaagaatccaaaatatggtgggttctcaaagatataaaacttcactgagaagcaaggggtctgtgcactaaatcccaggtcctgcacaggagagaagagcctctaacttgcctggctttgaaatccaaagggattatactcaggaaaaccaaagaaagatggtttgaaggactcactcttaaagtttgtgtgcagtctcactcacctcaggactccatttaaacagcagtaggaaaagtgccttggacatacatgaaggacacccactcactaatctttgttttgttttattttgttttgttgtttttaactccaggagagtgaacatacagtattatattagtttaagtgtacaatatagtgattcaacaatttgatacattactctgtgctgttcaagataagtgtactcttaactccttcacctgcttcccccatccccctacccaccagtcctctggtaactttccatttgttctccgtagttctgagcctgtattttggtttgtctcttttttgctttgttcatttgttttgtttcttaaattccacatataagcgaaatcatttggtctttgtctttccctgactgatgtcacttagcattatactctcttgatccatccatgctattgcagacatcaagatttcattcttttatatggttgagtatcattccagtgtataaatataccacttctgcttaactgatttctatcagtggacatgtggtccactttcataattcgactattataaataatgctgcaataaacacagaagtgtatgtatcttttcaaattaatgtttttatatcctttggggaaatacccaatagtggaataactggatcatattgtaattctatttttaattttctgaggaacctccatactgctttctacagtggttgcagcagtttgcattcccacctctagtgcatgggggttccttttgctccacatcctcgccaacacatgttgtttcttgtgttgttgatgttagccatgctgataggtgtgaggtgatatctcagtgtggttttgatttgcatttccctgatgagagatgttgaatatatttttatgtctctgttggtcatctggatgtcttctttggaaacatgtctgttctgccttctgtccattttttaattggaatattggttttttgggcattgaattgtgtaatttacttgtatattttggatattaatcctttatcagatacatcatttgcaaatattttctccctttacataggttgcttttgggttttgttgcttgtttgcattgctgtgcaaaaacttatcattgtgatatagttccaatagtttatttttgcttttgtttcccttccgcaggagacatacctagaaaaatgttgctgtgctgtgtgatgtcagagaaattactgtgtcaggcctcacgttgaagtctttaatcgattttgaattcatttttgtgtatggtataagatgatcctgtttcattcttctgcaggttgctatccagttttcccaacatcatttgttgaggagactttttcccattggatattctttccaaagaattcaaagaattctttgtcaaagatgaattgattatataattgtgggtttatttccagattttctgttttgttctattgagctatttttgtgccagttccataccatttgcattactatagctttgtaatataatctgcttttgttatattacacatagtaatatatatacgacatatataatatgtattacatatatatgtatatagataatacataatacatgttatatgtattacattacatatatatgcatataacatatacatatttgtctttgcttttgtttttcaggattgattaggctcttgtggttccatacaaattgttaggattgatctatctctgtgagaaatgcttgtggtactttgatagggattgcattaaaagtgtaggttgctttgagtaggttagacattttaacaatatttttgcttccaatccatgagtatagattgtctttccttttcttttgtcatcttcaatttctttcatcagtgttttatagtttttggagcacaggtctttttacctgtttggttaaatttattcttaggcgttttattattttcggtgtaattttaaatgtgattattttcttaattttttcttctgctgcttcattattggagtatagaaatgcaagaaatttctgtacattgatttttcttatcctgtgacagtactgaattcattaattcttgtagtcttttaagttttctatatacagtatcattccatctgcaaatagtgaaagttttccttcttcctggccagtttgaatcctcgttattcctttttcttgtctgattgctatgctagggcatccagtactatcttgaataaatgtggtgagagtggacatcctgatcttaggggaaaagcccttagtttttccccatcaaggatgatgttagctgtggatttttcatatttggccttaataaataataatgttaaggtatgatccttctaaacctagtttgttgagagtttttatcatgaatatatgttgtaccttgccaaatacttttcctgcatccactgtagtgattacatagttcttatcctttttctgattgatgtgatgtatcacactgattgattaacaaatattgaaccaccttgcaacccaggaataaatcccagttatggtggttaattactttttgggcgtattgttaaatttcatttctatgggagtgcaaggagatctgtgctgctctgggccccggggatccggggcctctgaggttagggctataacagtcacctgcccagagcctgcctctgcagcatttggctacactgttccggagtctaactcggctggggatctggaatctctggtttccaaccttttgggggttttcgcccctagcaacaggcctggggtgggggtgaggaggtaccaggtctcttggtttgtctcccgttggccctggacttaggggacttcagtggtcaccagctaagctcatgtcctgctcctaattggttgtctgttctcagtgtgaaagtgtatggccgatgtttttactggattgtactttttggtcttgattttcagctgctatgctgagccctccacggccacggccaccgtgaggcaggcagagtcgtagccactactccaggccacatgcaccttttgcctttcagctggggagctccactggtggtagggttcaccttggtcaatggcccagcaggaccccggggcgcacctaggggtcccggtgggtttcggtgagtgtcagagaaccatgtcttccacccagtggcacaggaagggggtacctgttgcctgccactgcagctcaagcccccttctccaatctcttcgcctcccctcagagtctcccatgcccccaccctctgtctgccattctctttcctttctctgatccctttctgggtcctcaccactttccatctcatggccactgcccacaaagaggcttctggcctagatctccctccccccaacttttccaactctatcttcctgagatgaccttttgtctagaagtctcccttccactgctctcctgccatcagcaaggggagccctctagcaggctccacagctcctatgtacagacttgtctccagttttggtgccccctcctcctccctcccttccagtgcaggcacctgcccttggccctccttcatcctgggccagcacctagcaccactctgtccccactccttcatcctaccctcaccctcttgtggcctccactgtccctgtgggctggactccagacctccctgatccctctgtacccttcccccagggccccttgcctgctggcgcccccctgcctggccctcaccaagctctcctctctcaggagctcctccgatggggcccttgcagtcagcagtgcctcctccctgctctcagcccatgcctgctcctctcttgtcagcctgtaattaagttctttcagggtcacccagtcccccattcccagagcctcagcactagtgtcccctgatcctcttgccattccctctcccctgtggaccagaaagctactccaggtccaacctcccagattaatcctcggccctcatcccccctttggtttcttgacccagtcttcgaactggttgttcttgccatgtggtcagcgccagcctttccttatagccagcctcctcccagcctgcctgctctgtgctggatgtcttcccctaaccctccttgggtgtctggcctatcgttcctcccagaaccacccccacatgcaagtccttccacaaggagttcatcgtggtgtcttggttctattttctcttccactccccctcctttctaatatagactacccctgggctccctgccctgatgctctgagacccagaggacactggcaggtccaacccatccccacctgggatcacagcctgccactcttccacttgggcctaagcctacaccttcctcacccctaggggcactgacacaccctgagctcccctgtggtcaccataccctccaacatacagcccttctgcttcactgccctttctacccttgaccccatctcttccctgatgaactttcaccacaggcagcagcccctgactctccactccaccataatccccgagcaccgtggcatctctggccatggatcactcaaccttgggctccccactgcccctgcctccctgctcacaaggcctctccttccccatggccttcttgccctccccctgcttcttgcaggccagtatctccccttgacctcttacctacaccacccacaggaccccatgccttcctctcctggctcccatgctgcatgtctgtccatctccacttctctttgccattccttcttccctctccttcctgccccctttcctctcttcttgtatggaaagcctccttcttgtcctttgtacaggtgcattttctgcatgctcaatatttcaggcagttcaggacagcagagcttttcagagaaggatctgttatgttgttccttccaggttacttcatctgtgatctactccctccccagattcccgcagtctttcttataacctcacagtggagtccaagatggatgtgtatcggagatttttcactgagggacacttggatgatcaagccttcctccaccttgacatggtagagccacagggactgtgggcagaagcagtcccgggtctgagacgcagaacacagaggccaaggacttgagagagactggaaacagcctcagaatgagtctgacaggtgtcctggccctgtaggcacaggcaaggtgagagtggggtcagagcaagagtgatggtaggactttcccagggaagttcagggtagagagcagagccctgtctctttcctggatttggctgggggtgggggtgagggctaaaggtctgtggacttcagcctaagggggccattactgagccagcacagagaagacatagaggagaggaaggggggctctctggctggagtttgtcactggggcagggaagtcagagggacacagggtgggagaagtcactgctggctggaggcaggcttgcattccctgcaggagatatggggctcaagatctcagaagacgacagcaccaggagctttgggcatttctgccatgatggggagctcttcctctctttatgacctgaagacccgtggatggactgttcccccatcctcagctggaccgcgatcatggaaatcaagaagtcctgggatgcaacctgaatgggcttcttggacaggtcaggcatgacccccggggaaggagccttcttcttccccagactcactgagcctcccccagcagtcctgtcctatgggatgcgcacatgttctgttggcacattgtattgagatccgcctgtcctgttacagtctctagagacaccgagcaggttgggatggaaatgaaatcttccagtgttaatagtccagggagcagtgggctttcctacgtagaactcaaccagagaaggcaggtgtcagcaagagaggaagttcagtctccctgtcacaaagagtttcctttagagtcccctcagccgaagagcccaccctccatgccccctcgtcagcagtaacacatgcatccaagagatcccattcctggcccatcctcctgcccgggctaaggacctgggtcccagggtgcagaacagacttggagcaggtctggggtcagtgagggcttcagccagaggtggaaagtgggagaagcagcctttctctctgtcttttgtggaggtgagcagggctcagccatggacctcaccagctctgtgccttcttcctcagtgcccccaacagtgaacatgctctgcagccaggccttggaaggcatgatccctctgacatgctgggctttcagtttctctcccaggaatacctccctgacctggcttcaggatgggaacccctgagcaaagattaccagtagtgtcgggaatgggacggacctactggacaggaggggccataaagtctcaaggagaggagcaaaggttcacctgccagatggaagacacaaggaaccacactgtacactgtgtgccctcaagtgagcctggggtgatccgtggagggggttctgaccctggttgagttaggaaccagggtcgggagaggagagcaggcctgtatccttgaggagcccaggtcactataaggcccttttccaggaaaggccccagtgccccggagtggatggacagctacctgcctgctgctgctcctgctgattttcttactgtcatcattgcacgtgtttttttctccaagaacaagataccaccagcagctgtggaagcccagataagaattctgggcagtgggtagggttggaggggctctcctaggacgtggggcactttatgtctccctctgcacagatcagaggggatgaaaagcttctgtaacaggagctggaagtcagagagctgagaggggctgggagccacatctgcatctacatccttagccctgggtccccagggcccttgagtggtgagtgtggcctctccttgctctgggtgaggattgggcagtagggactggggctccctgctctgagtttgtccctacctctctctactctcaggctcggcaggactctctgtctggaggtaatgtgtggggaccatgtgttgactggggagggcccaggtgatcgtgggaccagagaggcacaagcagtaaagggtccaagacctagtggggaagtttaacactgggcaagaatccagaccagaagtaatgattctatttccttcctgtccacacctgttccaatatcttcggccatcatgaggaatcaaagaaaaggactcacaggggatccctgggtggcgcagcggtttggagcctgcctttggcccagggcgcgatcctggagacccgggatcgaatcccacatcgggctcccggtgcatggagcctgcttctccctctgcctgtgtctctgcctctctctctctctctgtgtgactatcataaagaaagaaagaaagaaagaaagaaagaaagaaagaaagaaagaaagaaagaaagaaagaaaaggactcacaaggccccatgtggcagccaggagagcatgccagagtcctgcctgtgacgtccccttgggaagttccactcacaaggcatagatgcatcctgagcatagatggtcacctttggtccactttgtagcccctcgaatggctcctccaggacctgtctcccgagttgttccactgggtcactcccacctgtgctctttcctggttcccatcatatgcccccatgcttcctggagttttcttgtggatcatatgcaagagtctcagggagactctgggggtgtgagcagataacccttgatcatttgggtagagagggtcagtccattctcagggctgctgtggccactgcttttatcctgcctccctgatgtgtcctgtccaggccctcagggcacagtctaagaaactacttagggcagggcattctgtctgtacccttgtggcctcactctgccctccctgagccggttccctttcttgtgctgctcactgccctgtagatttggaggaagggatggtcagaatgattaccaggtaggggcacctgagtggctcagacagttaagagtcagactcttgatattggcgcaggtcttgatctcacgctcatgagttcacgccccatgtggagctccacgctgagcatgaggcccacttgaataaaaattaaattaaaaaaaagatttctgtgtaatcaggctggttgaggggaggtgaaaacagaaagatggagttttgtgtttgggcaaaaaacaaggtgatgcatgggacagggaaagaatggggtgtgtggggcctggggtccttcagttgattctaccactgctgggtgaccatcatggcaggcatcggatttctcactctggaacctaatctacttataagctggcctttaggcgcctgggtggctcggtggttgagcatctgcctttggctcaggttgtgatcccagggtcccaggatcaagtcccacatcgggctccctgcagggagcctgcttctccctctgcctgtgtctctgtctctctctgtgtctctcatgaataaataaataaaatcttgaaatattaagctggcctttggtcttaggcagactgggatgattagtcccctgccccacactgaggggctgagaccaggtcacaactagagcaaagagccatgcaggtctgcagatgttcctgttgttctctggggtggccctcccagagggaacaccagttttgattccttagggtagaaatgattgcctcatatatcattgaggcatttactggagaaagaatacaaaagtcatgtgtcaatttctcaaattcctgctttaaattgtgatgtccaaaacaaattatttcagaaaacgaattttaataggatttcttcagatcctgagctagcttagtgcgtgaaatatatcaggaattcaaccagagggagggctcttgtctgggagggttccatgtgggaggtgggagagaggtggtggcaatggcagtctcagggttcagaagatggacagatagcctcaggcttggggtctcaagaaccccctctacctcatttagaagaagactgcaacaggttctccttgcattgcctggttagtccctgctaggattggggccagaaggccctggcagcctcagccaagctgcacttggggaggagctgtgattccaggtgcaggtgggccaagaaggagcaccgaaggccaagtgcagcctggccgcctgggtcagggtgagggtggagggcaaggacaggcctctgtgagcatggggtgctcctgagtcaggtcaaatacagaccccactgtagtccacttcttctagactgtgactggtggtcacctgagcactctgatgagccttccagttaggagctgctggcttagggctagggaaggaaggaggctgaagctgcaggtgaggtcagtgcttgtggttgagaggtctctgtgctcaggtgtttatgcaaatgagagcctgacagatagagaagaagcagtgtttgtaaccactgtctggcctggaggaacaggccacagggacatgtctctcaggggccatgttctctgtcagtggacagttgggaccaagaaggcattgagtttctgctccagggtgttgtccttggtcctgggaccctttcctgctcctgtccagtagatggtggaggcagggccagctagtgatgctgaggcatcacagtggggagggcagcaagggctggtaaaggggtgagagagagataacagcaagggtttatcctccttcagagaaagtcagagctgaatttggagtaactgaagaagttctgagcaagtgcaaaacaatattttgcacaaattgggctctatgggtttctcttttccccaaaatcttggtagccttcaagacctggatcaacaccaggtagcaccaacaagccatgatggcagcaaccagcatttaccaagctcagtgtactacacactgagagccagcaccacttgcagctctgtgagggagccctctggaatattctggactattcagatctccagatgactgtagccccagcccatgtcacatggagcagaagagctgccagttgagcctagctgacccacacaatgagaaagaattaaaaggtggttgttttattcagagattattttgttacctagcaataggtcacaggtatatatatcacatagtgtcatgtacaagtattattatgttttgtttattgtctgtctttcctatgagattataaacattaggagaacatgtgctgtgtctatgtcattaaatgattaccagacttaacatacagattggcatagagacattcactgaatatagttgggggaatgaatgaatgaaagaatgaatgaatgaatgaatgaatgaataaatgttgtgggtagaattccttgaagttggccttgaggctagaaagtggtaattttatgggtagttggtgacggggttcctttatgatgtgtgtgtgcccatgtgcatgtacctgcatgtgttcttaggtgagtttaatgccacctgttggtcctggttgcccaagcaagcaaccaagactgcacagtgcttcctgcactcatatgtcaaccagatgggcactgcagacaggcagcacctaaccaccagatgcctctgagatgtcttgggctcaggaaggggctttagccacgttgtaggtcattgactcagctgcagggctcaaagccctagggagctcccagctggcccccctcaaatccctgggtcagccatcatggtagatatgagctttgagttgggtggtagaacttctgtccaggtgttaagggttgcagacagtgggacctgaggtggtcaagactgaaaattctggcactgacatcactgagggatgtatcccaagctccagcatcagaggcagcagctagaacaagtgacagatgtgggacccaggaaatttaacaaaaatcccctacccctggacaagcagagcaggactgactccactttgtgctgcacccgccacctcctgtatcgcccccacatgacccgcttattacttagggtgctgcccaccctagtcaagctgctgggcacaccctaatcggaaatcggctcagtgataggccagttcaaatggatactttagggtaaaatgtaattcaatcggccacctgcgtgtggaccgacatgactgtgcaactttctgcgtatcccattggccactggcccctataaagctgctacgcctcttagtctcagggtccaagtccctgctcagccgtgtcgggtatacttggacccaagctcaagcttgcaaataaaccctcgtgcgcttgcatcggtgtcggctccttggtggtttctcgaattcgcgatcttgggcacaacaacagggacttgtgggtccagtgtcctcctcacagaaagtggtggagtgcatattggagcacccagcatgtttatgggggctggttgcagatctgtgtggccacagggctgaggacaaaagcctgagttccccttttgcctgctcagccaggaccccctcagggtctcccctgggctactgcaccaggataggcctctacatagagggggcacgcctctccagtcagttttggcttataaagtgtttccccaaatctacactaacattggtgtttcctcctcattgagtaaccagggactgtggccttagggaagagagtggtctccaggccataacagttggtacccagaatctcagtgaacaccactgtaggggcaggaggggtggggatatagaaagtagccacatacacatgctcagggaaaatgtggactcaaaaacaacatgagaagagctgaaatgcacacctaaagctgatttctggcacacagtctatagcaatcaactatcaaaacaaacaataaacctgctgatggggagaatctgattttcagaattaccacattaggagactgagaacaccagttttcaacaacagcaaaacacaaaatacgcaaagccaggaaaatacgactcactcaaagtaaaaacaaacatcaaatgtccctgtggaagatcagatagtggacttactagacaaatactttaaatcaactgcctataagatgctcagagaattacacaaaaactcaagtaaatgaggtatgaataaaataaaatattaacaaagagatataagacaaaaagaaactaacatccagcgctgacataaacaataactgaaataaaaaatgtactggaggtatttaagagcagatttcagccagcagaagaaataatatctgaccttgaacacaggacaattgaaatgatcacatccatggagcagaatgaagaaataagaaaaatgaggacagcctagaagagaactgagaccataaagggaacaatctatgcattttggggagtcccagacagaaaagagagaagaaggtaggagagattatttgaagaaataatgactgaaaagttcctcaaattgatgagaaatgaatataaacactgaagaagaataacaaattccacttagggtgatatccacactgagacatattataatcaaaatgttgaaagccaaaggcaaagagtcttgaaaacaggaagggaaaagtgattcatcacagacaggggttcctgtaaaaaaattagcagatttgtcatcagaaatcctagaagccgggcagcctgggtagctcagcggtttagtgccgccttcagcccagagtatgatcctggagaccagggatcgagtcccacatcgggctccctgcatggagcctgcttctccctctgcccgtttctctgcctctctctctctctctctgtctctcatgaataagtaaataaaatctagaaagaaagaaagaaagaaagaaagaaagaaagaaagaaagaaagaaagaaagaaagaaagaaaccctagaggccagaagacatactgatgtactcaatgtgctgaaagaaaagcactcaatcaggaatcttatatctgcaaaacagatctgaaaagtgagggagaaattaggaccttctccagtgaacaaaaggctgaatgagttcatcaccactgtacttgcctagcaagaccagctacagagaatcctataggatggaaggaccctggacagtcacttgaagccacatgaagacttacagggctagtgaagggaagtaaatgagcaattataaatgtagtattagtgtgattctgatttgtaactccactttttgtttcctacatgatttaaaagaccgatatattaaaaaacaactacttgcttaaaagccatattctagtaactttgaattataactccactatttgttttcaacttattttgacagactaatgcataaaaacaattattagtctatgttttcggacactgtgtaaagatgtaatattctgaaatcaatcactataaggggatgggatggagctgtagaaaatgacactttttgtctgttattgaaaataagcttgttgggatccctgggtggcgcagcggtttggcgcctgcctttggcccagggcgcgatcctggagacccgggatcgaatcccacgtcgggctcccggtgcatggagcctgcttctccctctgcctgtgtctctgcctctctctctctctctgtgactatcataaataaataaaaattaaaaaaaaaataagcttgtagaaatacacagttagggtgctggaattttaggatgtgtaatataacccccatggtaaacacaaaaacagtatctatggaatatacatgcaaaaggaaatgagaagggagttaaaccattctactaaataaactaaacaaatactaaaacaattctggaaaaaattttaaagattttatttatttattcatgagagacacagagagagaggcagagacataagcagagggagagaagcaggctccctgtggtgtgggactcgatcccaggaccccaggatcacaacacaagccaaaggcagatgctcaatgcctgagccacccaggtgtcccaggaacaacataattaaaagaaatatagacaataggtaaataacagaataatgggaacatgcccttccttattcagcaaaattactttgaatgtaaatgaattaaacgcaccaatcaaaggataaaggtggcagaatggtgacagaaagatgatctaactctatgttgttgaaaggaggctcattttatctaaaatcacaaatagtttgacaggaaaggatggagaaaggaatcccatgcacatagtagccaaatgagaacaagactgtttgtactaatatctgacaaaatcgactttaaatcaaagtttagggttgggaacgcagagcggatggagtcgattcaacggggttccaggctgggctatagagcaggtaaatgagctgaaagagaagggcaataaggccctgagtgcgggcaacattgatgacgcactgcagtgctactctgaggccattaagttagatccccagaaccatgtgctctatagcaatcgctctgcagcttacgccaagaaaggggactaccagaaggcttatgaggatggctgcaaaacggtggacttaaagcccgactggggcaggggctattcgaggaaggctgcagcccttgagttcttaaaccgatttgaagaagccaagcgaacctacgaagagggtttaaaacatgaagcaaataatcctcagctcaaagagggcttacagaatatggaggctcggttggcagaacggaaattcatgaaccctttcaacatgcccaatctgtaccagaaattggagagtgatcccaggacaaggacactgctcgctgatcctacctaccgggagctgatagagcaactacgaaacaagccatctgacttgggcacgaaactgcaagatccccggatcatgactactctgagcatcctgctgggtgtggatctgggcagtatggatgaggaggaggaagttggaacacctcccccacctcctcctcccaggaaggacaccaagccagaggcaatggaagaagatcttccagagaataagaagcaggcgctgaaagagaaagagctggggaatgaagcctacaagaagaaagactttgacacagccttgaagcactatgacagagccaaggacctggaccccaccaacatgacttacttgaccaatcaagcagccgtgtacttcgagaagggcgactacagtaaatgccgggagctttgtgagaaggccatcgaagtggggcgagaaaaccgagaagactatcgacagattgccaaagcttatgctcgaattggcaactcctactccaaggaagaaaagtgcaaggctaccacccatttctataacaagtctttggcagagcaccggaccccagatgtgctcaagaaatgccaacaggcagagaaaattctgaaggagcaagagcggctggcttacataaacccagatctggccttggaggagaagaacaaaggcaatgaatgttttcagaaaggggactatccccaggccatgaagcattatacagaagccatcaaacggaatccaaaagatgccaaattgtacagcaatcgagctgcctgctacaccaaactcctggagtttcagctggcgctcaggactgtgaggaatgtatccagctagagccggccttcatcaaggggtacacccggaaagcagctgccctggaggcaatgaaggactacacgaaagccatggatgtctaccagaaggcgttagatctggactccacctgcaaggaagcggcagacggttaccagcgctgtatgatggcccagtacaaccaccacgataaccccgaagacgtgaagcgacgggccatggctgaccctgaggtgcagcagataatgagtgaccctgccacgcggcttatcctggagcagatgcagaaggaccctcaggcactcagcgaacacttaaagaatcctgtaatagcccagaagatccagaagctgacggatgtgggtctgattgcaattcggtgatgacttgctcatcatccccttcccttcgccctcatgtggaaagaggagctgggaccgcggcaagccgcgcggagcagaggggagagcaagggaaagtgaacaacttctctctatatatttatatagacctatgtggaagacacagagactcgtactcatgttactcgcaccgccgctgcctctgggccctcccagcacacgcatggtctcttccaccaccccctgggttccctgttcccttccccaacttcagtcactgtctcaactgctctcccatagttggttattttttatttggggcagtgggcatgtatggggagggggtgctgttcttccccgacctcaggtcccatttgtcctcacgttgttaactccacatggccttctccaataaaacaagccagtcgggtgtggttataaaaaataaataaataaaataaataaataaatcaaagtttagaagagacaaaaaagaacagtatatattaatacaagtttcaatagagcaagaagatataaaaattataaacttctagcattaataacagatcaacaaaatctgtgaagcaaaacttgatagaatgaaaggcagaagtagagagacccacagtaacagctggagaattcattatcacattctgagtgggatagagcaaccagcagaagaaaagttagggaacagagggcttgagcaacgtaataaaccagctagatctgacacacatatacagaacactctacccacacataacagaatacacattcttctccagcgcacatggaacactcactgtccaggatgcagcctatgttagaccacagatgaagactcaaacagaattgaaaggatatcacataaactatgttttccgattcccttgttccattggggggggggggtgcagttagaaatcgaaaacaaaaggaaaactagaattaaacacactcttaacaaatgggccaaaagaaatcacaagtaaaatatttaagaaatgtttaagtcagtgaccaactcctgccttagacggttctgctggccctttggttccccactgccttcctccctccaggagagctagtctcgcggtggcaggcggaggggagcagagagaggtgaacaaagagaaggaagacctggctgcatgtgggtggtgtctgtggtgacagaaggggaggtggaggagcagtggcagtgtgggtcgcaccttgaggaggaagaacagcacgtgggcaagggctctctccccaccctttcctccagcccctcaggtgcagaagatgagtaagctctccttcagtgacctatgtggcctctgctgctgtctgcctttccctgggaaaatgacttcaaattagcatttttaccacctgatccaacttatacaatgatgtgtgatgaatgtagaaactgctagacttagggatgcctgggtggctcagtggttgagcgtctgcctttggctcaggatgtgatccccggtaggggatcaagtcccacatcaggctccctgcatggagcctgcttctccttctgtctgtgcctctgcctctgtctgtgtccctcatgaataaattaataaaaattttttaaagaaaagaaaaagaaactggtggacttcacaccaatcagaataagcagactggtagtattcttctagagaaaaagatgctattgagtgtttcatgactagaaccagtaaaggcaccagaattgcctgcatgtttgtactttgtccaagcaagagcggccaagtacacttaactcttcgcacacagaaatgatcttgatcttggtcagatgagcagcttttacataggactgggatcacagaccgattgtactatactgtgtaagtgttgggaacctgttgaagaaaaacctctatgcagatacaggagctgcttggcttactcttagcacaaaatatggtattttccctgaaaatgtgatcatatgtggccaaagtaggacagaacatctgtggatcctgctgcttggtgtgagagtgctacagcactcttcattctcttcattctcctttgaccacgggatgggaatcactcttcctgacacttggaagacctacagttttgtttttttttttaagacctacagttttgatgcactcccaaacattgacaaaatctctaagataacagctcctgtgctaataattcaggagactgaaggtgaagtcagtgacttttcacatggcttcgcattctttgagctttgccaaggtttgaaggggcaggtcacaatgatgtggaactttatggacggtaccttgaaaggctgaaacactttgggtcacaggaactgctaaatttgtaaaatagtctgcaaatttgcatattgggttttctgttcttgctgaactgtgctcttcggtaaataacataaaatctgaaggttttgtttgccaatcatgtcagttgccttcataaatgtacaggaaatgacttgttatcagacttaatgaaggttttaattaccagaaccagaaactggaaagaatagtattatgcagtcaggcttctaatatattttttctaagaatgttctttaaacatcaaagtgagtacagtatgacattttaattctataaaatcgaatgctgtaaaagtattgccaaatgcttttgcatatcagaaacaagtttatacatatttttaaaacatctcaatgtaataaatcttatccaggtatacaaatataatagtctttcgatggaaaatggtatatctaaaacaattcaggtacttatgataaaatacactgtatggaaacatgcaaatttactagagatgaacttaaccttattgtacagggatggaggtttgaatggttattttattgtaaaagacattgaactttctgtattccctagttatcatacatttcctcctataaaaaaaagatgtaagtctttatttttatgccatctattaatttgccatctagttaccttataaatgagaagactgataccattgaattttaactagttctgatttatagatttggtcctgtgaggcaactactcaaaattctcatttttgttatgtaaaggcatttagagcttcaagaatgattttgtagggcagccccggtggcgcaccggtttagcgccacctgcagcccggggtgtgatcctggggacctgggatcgagtcacatgtcaggcctcctgcatggagcctgcttctccctctgcctgtgtctctgcctctctctcattctctctgaataaataaataaataaataaataaatctttaaaaaaatgattttgtaagcaatgctgttttaaattttgacaaatctcacagaattcagtactctgcattatgagaccacctgagagtgttagatattcttcaagaccacaaacaggctggctatatggtcatttttcacttgggctatttttaataggacctatgatttagattcctatctgataatttcatggattcactcctggatgcaggacataagagaacatgtaattcataactttcgtacttactgatatggtaaaaaaacaaagctcacatgtaaaaattaagttgcctttccttgaatgaatcctgaatgaataaaacaaagaaaggaaaagaagtgtccgcagtctaatttgtgttccagaagactcgtgcactaagtttatggggaaaactggaataacccccacataaaaataaataggcaaatagcaaaaatgtgatttaatcccaaaatgtaagacagtacagcagtaaaaatgagtgaactacactaacacatcgggataagttacctgcatgtaacaacgattcacagaagacatgtagttgtgtttactgtacaaggaggtaaaacaggcaaaaagcaataatattggctttgggcacagaaacacttattgtaaaatcgttagagcactcaaaggagtggttagccacgaattcttggacagaggttacacctggggtacggcactggggagtggcccatggggcttcatgtttcttgtcccaattgggggtgtgtgcccaggtgtttgctgtttcagatcttctgaaactggcatttttcaaactggagttgttttatattccaggttcattgtttttaaggaaattaaaaatgagataccaaacttcatttcaaggatacttggtaatccattgcaaattggatcaaagcacaaactgttcacattggaatagagccacagtcaattatcctgagccatgttagagaggatacagaaagtcataacaagagttttggctagaataggtcatttgatctttttctcgctggcaccgtctattgttttctgatatacaatgttcaatgtggtgtgcaaggcaattctatcttgtgaaggatttgatgtgtcacattaacctcccattcaactggattcaatacattcagagaatgaaaagcatattgttgctcaatataaattaaactggaaatcattcaatggaataaccactgatgaaatagcaaatacaaatggaaatgacagcaaatagagctgtgtaaaaaattttagtgcattgtgacagtgcttttttgaagtatgttactgcctaaatctcttctactaaatttcactgaaaacaaccatagagagagatgttaaatattataaatgttaaatttatataaacttctcattgttactttccaaagagaaatttgaagcattcaaggaaaataattgggtgaaagaagcatttgatttacaaaattctgaaataatatttagttttgattttggttttaacaggttcacaaattctttgacaacaatcctcctttccagagatggatcttaatgtcctcctcctgagcatggacttgcactgaatgattcacttctaactgatagaaaaggctgatgtgatggtgtgtgacccaggacctaggaacataaaacacattgcagcttctacctggctttttctctctctttttgtctgtctgtctctctgtttctgtatctgtctctgtctctggttacttgcactgggggaagaagctacctagttattagctacctaatggaaaagtccacacagctaggaactgaggccccttgggaccatctgggaaggaaatgaggcctcttcctcatttcctcatttccctcaacagccatgtgagggagccttatgtcctaggaatccctcagccccagtcaagccatcagatgatgcagtcctgtctgacaacccagtcctgtctgacttgactgcaacccagagagaggccctgagacagaagcactcaggtataagcctctcctggattcctgaccctgggaaactgtgggacacaatatatatttgttgttctgagctgctatgctgtggataatttgttaggcaccagtacataactattatagagtccaaagaagagaatgaagtattgcactttaatttcgattggctctaaattaactatgatattaaacatcatctattggttttaagatttaagaagaatatctatgtctaagggaacagaatgcatattattaccattcacaacaatctatttatttggagtttgatttctgacggtaaaccaattaaacaaaaggaagaagcaggctgtcctaggcagatgctaagatggcctgccataactaacctctggttattcatattcttccagttgttggatcaaacactaatccaggtgctagcgtgaaaggactttgcatatgcagtgaaggttcagatcagctgcatttaaaacaggaggattgggcagccggagtggctcagcagtttagcaccaccttcagcccagggtatgatcctggagacccaggatccagtcccacgtcgggctccctgcatggagcctacttctccctctgcctgtgtgtctgcctctgtgtgtgtgtgtgtctgtgtgtgtgtctcatgaataaataaataaaatcttttaaaaataaaaataaaaataaataaataaataaataaataaataaataaataaataaataaaataggaggattatcccaagtagtcctgacctaatcaggtgagcccttaatagcacagggtgcttcctgagtgaagggactggaagagtgagcaggattcattgtgagtggaggctttatgatggaaggggctcccggcaagcaatgctggtggccacaggagctaagaacagcatcccactgacagcgtgccaggaagtggagactgccgacctccaactacaagaactggaattctgctaacagatctgtacaagcttgtagggggacctcaagctctagttgcaaacactgtctgtgacatgctgaggagaagacccctcagcatcactcctggactgctgacctacagaactgtgcacatacacatgggtgtggttgtaagtcactatgtttgtggttaatttgttatgcagcaatagaaaaccaccacatagcctcaatgcacatcacattttcccagtggaatgaatgaatgtatgaatcgtcgtgcacactagttgcatgaaataaaatctcatttttcatgtattttccattttgtgatttttaagtgatgggattaaaatctaatagtcatatttcattcattcattcaacaacaattaatttagtgcctactctgcaccaagaatggctttctacactaggggtacagctttcctcaaagtagcccaaagcacctgtgcttcatgctttacattctagaggcttcctaaaagtgagatggagcccctggagcattttcagtgatgaaatgacacattctgactcacattagcaggatcactgaccccagtggagagagtggccctgggtggcaggtgttggggtggcagcagggtgcaatcaggagagcgggtggagactaaggggatgagaaggcatgagggctgagagagatggagagaagggctgcagatgcaggtggagggagagaagcagtggtaaagaattctaaagtagtggaatttgaatacattgaatacattgttatatcaattttttatttaatctctattaggtcttagcaagatattgtttgcatctaatatttactgcactctgtggactgaatacctgtggcctccttatgttatcagggttaagaagtaacctagatgccactaatacccaaataaaatcgtccttaggtgctcattcatacacacaggcaacactgaatgctgatgacgggcatttggactgccctgaatacttgcaactatgaggtgattaatggttggacactctgattgaaatgtactatattaatgatactttctctttttttgtatccttgatgctctggcatttgtggcctccataactggggagacattctccctcccctgagtggccaattctgagagccagctaaatgcttgaccaggagcacaccttccctttgcaaacatattctgaactacctctctttaagactactccaggatataatattcctctgctccaattactcaggaccaggtaccaggcttctagagacaactcctgtgacccaaagccaactgatgacattattcagactagttaattctaaaatgtgtccccaacccctctgtctttctcaaggaaaatacaataaatgctctgggccatgctttcttccactccttctgccccctggcgctccttggtgcttccccatatggccctctgtggtgttccatgcccctcctctcagtaatgtaataaaaaaaacagcttctttcaatggcatcagcctctccacctatcacttagtcacctgggtaaatcaagacccagacacagatcacatacagactgtacttccaacgtgcatctttgtattgaggctatgtctggaattcacagacggagctatggaacagaggtcattttaaagcacaaaaacttaaagtcttggcttgggaaagtgaaaatgacagctttggttatttcaaagctgtttaggcaaatttatacagaaaggataaaatcactactttgacacatgcgagtcccgatctctcaggggttgtcaagattatggttaagaaacaagaagaaaactggcctctgtgaaaatctctagctagtgccccaagcacacctgcctcaggtacagaagacaccttgttccttcaccaattgtcccacagtcagctctctctctggcatcaaattccctgagagtaagtttccttctcagacagtccagggggactgtctggactgttgtttccttcgctgagtagaagatttttatttttgtgcagtcccaatagtgtatttttgcttttgtttcccttgcctccggagacagatctagagaggttactgcctgtgttctcttctaggatgtttatggtttcaggactcacatttaggtctttactccatctcgaatttatttttgtatatggtatatggttctttctttttcaagttgctggcatgatgatggacctgtcaggtatgggactatggaatcacttgcggtacacctaacactgtatgttaacttctggaattaaaacccctacataaagaagtaggcaagtaagtaagcaagtcagtcggtggagggggtgtggtgaggggttcaaggcagagactcaagctcagcaaggggtctccgggaaggaagacaggaaaaatggctgagcccagtctggtgtcttcacttggtttcttcagaaagaccctggtccaggagtcagggggaaagtgtaacaaagagcgctgcacgcaagatgaaaagtgtcaggtcactctatggtcccggggagggcgaggctctcaggctctcaggccccagggcgggtccggggcggggacgctcaggctggggagtccccacctccccgggtttcacttctccgtctcccaacctggctcagggccccctgcctggagactcgtgacgcagccccagcgcgcactcccattgggtgcagcgtttctggaggagccaatcagcggcaccgggtcccgggctcgaaagcctccgccgccgcctccgccccccagtccggcggcgacggccagtgtccccggagcccggagatggaggtggtgatgccgcgagccctcctcgtgctgctgtcggcggccctggccgtgaccctgacccgggcgggtgagtgcgggcgggagcgaggggaccggcgggcggggacgcgggaccccgggaagccgcctctccgccgcccccggccccccgcggcctgggctccccggtccctcccgcctccgccccgccccgggcatctcccctgggccccgggccccgcggcgggagggggtcgggcggggtctcagccctcggctccgcaggctcccactccctgaggtttttccacaccgccgtgtcccggcccggccgcggggaccccctctacatctctgtgggctacgtggacgacacgcagttcctgcggttcaacagcgacgcggcgagtccgaaggtggagccgcgggcgcggtggatggagcaggaggggccggagttttgggaggagcagacggagatcgccaaggtgcacgcccagacctcccgatccaacctgcagacggccctcggctactacaaccagagcgaggccggtgagtgacccgggccgggtccagttcacgagtccatgaacccccttgcacagcctggggtctccccgagttcccgggtcggagattgacccccgggccaggagaccgtcctggccccctacgcgggacgagcctgcagggacttgcggacagtttccgaggtctctgaccactcgccggccgtaggtccaatgccaggggagtctaggtggaccgggctgacggcggggaccgggctaccggggcgggactgactgagacgggggcggggggggttgcccagggtctcacaccttccagtggacttcgggctgcgacgtggggccggacgggcgcctcctccgcgggtatgagcagttcgcgtacgacggcgccgattacctggccctggacgaggacctgcgctcctggaccgcggcggacgcggcggcgcagatcacccggcgcaagtgggaggcggcgggcgcggcccagtactaccgggtatacctgcagggggagtgcgtgcagtcgctccttaagtacctggagagagggaaagagaccctgcagcgcacaggtctgtggggcagctgggactccgggatctcccctcccgctggggctgtacctcctgctatccctacaaaaaggaaaatggaattgacaccagaattcctcccctgccccacttcttggatcctgaaagtgaagactttcttggttttcagttctgtactaaagagagactcgctcagaaaacccatccttctctctggacatttaagggatccagtctttatggagagggatagagatatctctgaaataatttaatagcagatttctttgaccctggcattcaccttgggcaccactgactgacttcctccctcaggccttgctccctgtcccacaccccacttaattggaggtctgcctccaggttttaagaggcactggacttcctctacctaggtcaggaccagaagtctctgttgtcccactcagagacctggaacttcctaccttaggctatcttatcctgattctagatcttccaaagggataggaaggtatcccagatcctggagttcaggctggtgtctgtattttgcactccctctcccccatttgtcctcttcattctcagcatggtcacaacagtgctgcttaggtggcccacccggtataatgcaaatttgtaaattttctgacccttctccttagatcctccaaaaatctacctgacccgccaccccatctctgaccatgaggtcaccctgaggtgctgggcgctgggcttctaccctgcggagatcaccctgacctggcagcgggatggggaggaccagacccaggacacagaggttgtggacaccaggcctgcaggagatgggaccttccagaagtgggcagctgtggtggtgccctctggacaggagcagagatacacgtgccacgtgcagcatgaggggctggcggagcctgtcacgcggagatggggtaaggagggcctcggggtagagcttctactcagggcaagtggagctcttctggagaatttcagcagagtcaggtctcaagtcagaggctggaccctcatcctccctcccctttccagagccttcccctctgtccaccattgtcatcgtcagcattgctgctctggttctcctcgtggtcgctggggtgattggagctgtgatctggaggaagcagcgctcgggtagggaaccgactgaatactctgtgttttcctgtcctgttgggggtttcctagggagcacgctgtcctgccttgttaacgggaggtgccgtccatacacggttactctcccacactggagctgtgtactcacactcactgtgcagcaaacacttgggaaaatgaaggccagagtttcgccttggtgattctggtgacggggactgattcccagccgtcacaggacagagcggaaggcccctgctgaggacagacctccagcaagtcaggtggtccagtgacccctcacctcatggcttgtctcctgaccctgacctgggcggtcagtcagaattctgcagactcactctgcaccaggactgggagcttcctcgaggatctcctggcccagccctgtgcccggcctctcacatgatgttttcttcccacacaggaggaaaaggaccaggctactctcatgctgcacgtgagtatgcagggagtgatccctgagaccccgggggagtgtagacaggaccccatggggagctcacccccacagctgctcctttagtctcacctcctgtgagctctgaccacgtcctgtttattctcctctaggtgatgacagtgcccagggctctgatgtgtctctgacagctcctagaggtgagaccccagagaccctgaagtggggagggttggggcactggggaccagatgagcacgagggggctgttgagaatgtcagcacttatgtgaccgacctcacagtaccgacaatttgtacttgattttttctcacagtgtgagaccagctgccctgtggggactgagcgatgcaagatgtgttcacatctcacgtgatgacatcaacaaccctggcttgtctctgcaaacagtgtcaggatgtgcctgtgtccctaggagcataatgtgaggaggtggggagattggcccaccctgcccaccatgacctgtccctaatctgatgtgcgctctcttctctgatgtgctttcctgtccaggagagggagggctggaccatctccatccctgtctttgtttcatgttgagtactaatgacttactacccgattgaaaataagaatcccgatatgagtttgtgtttcctgagtcttgggatgtggggctgatgaggtaataaaaggagatttgtgaagttgagagagcaaataaatggaagccctgagaaccttccagaactctcatgtttgctgtgttgagtctgttgaagttgggggctgaaaggtgtcaggagccgaggggggatggggcctgtgcccagtaggtgctcagtgcatcctgggtgtgcccctcagctgggtcatctctctgctccgtgtccttgctgtggaagcttgtctcataaggatttgtgatcaaggggacttggacatcacctgtcaccaggaccttctttagccacagcatcctaagactgggttagtctaaactcatgtctgcgttgcagcatagcccccattttcttttttaattactcctctagaggctcatgcctgctgttactcttgtgtccaagttcctgtcccattgtcccctggtgaccccatcggttacagtagcaggtgtcctttgggctcgcgtccccacaggcctaggttgtcccctgcacataggagtccctgaggtttggagagatgaacttccagatccatccactctccccctcccagatggagtcccacatcgggctcctttcatggagcctgcttctccctttgcctgtgtctctgcctctctctctctctctcttatctctcatgaataaatatataacatctttaaaaaaaaaaaaaaggatctgtgggatccctgggtggcgcagcggtttggtgcctgcctttggcccagggcgtgatcctggatacccgggatcgaatcccatgtcaggctcccggcgcatggagcctgcttcttcctctgcctgtgtctctgcctctctctctctctctgtgtgactatcataaataaaataaataaaaataaaaaaaataaggatccagataggggtttgtgtttcctaagtcttgggatgtggggctgctaaggtaataaaagatttctgaaattgagagagcaaataaatggaagccctgagaaccttccagaatcctcatgtttgctgtgctgaatcagttgcagttgggggctgaaagctgtcaggagcgtaggggggacggtgccagtgcccagtaggtgctcagtacatactgggtgagtcgtgttcaggcctcagcggggtcctctcttctccgtgtccttgccccttctatagaagcttgtctcaccaggacctgtgatcacagggacttggacgtcacctgtcaccaggaccttctgtagccagagcttcctgagactgggtcagcctgctagactcaggtctgggtcacagcatagcccccattttgtttcttcctttttttctttctttttttttttttttttttttgagttgttcctctagagcctcatgcctgctcttgctcttgtgtccaagttcctgtcccattgtcccctggtgaccccattggttacagcagcaggtgtcctttgggctcccgtctccacaggcctaggtcgtcccctgcacacaggagtccccgaggtttggagagatgaacttccagatccatccagtctccccctccctccgcagctgctttctggattattgttcacatcctgaggtagagaggggagaagtcagaggttctcctcctcataagcgtccaggagtttctgcctcccctgctgctctgccctccctccccgccctgggccccgtgatccccgtgggatttataaagcagagtgtaacgtagatttctctgtggctggagaagaggacccaggaagcccaagtgcagggtgcctgaggagtgaactctgtgcgtggtgtgtgcaggagaaacggtgtgggggtgggagctgagggagggaggtgggggcagccccatgaggagagagagggggcactgatgaccagtggctggtggggggcaggagctgccacagaacagctgtgccccaggcgcttctagaagagggagaccctcttcctgcgcattcattcagctgtaactgtcctgtgtcacatgcaggacacactgtttgcatctgggcagctcagtgagactcaggtgaggcaaacctgctggtctcctggagagtatgttctagtggtcgggggagactacacctgacccaggctggtgggtgattggggcagtgacccccttctgtagtaggaaatccgagtgtagctcatgtctcccccaaagcataccaactaatagcatgctcatgactggaagcctcacggagaacatgagcagttgcttacactgtgtgttacgggtagtgtgtactgtgttcttacgatgagcgaagctgcaataaattagcaaatcataaggaagggaaacaccgcggatagtacttacagtaaaaaagtcctcatacaggtgcacacgcacagtcccaacccgtgtaattcagacatgaactgtgtgtgtgtgtgtgtgtgtgtgtaagcacagtaagtaagggaggtgtagacattggaagtaggtaggagcttgaggaaggtgacccagagagaacctgctctaggacagggacggtggccaccttactgcagggattgggggagcctccctgagaaggtgacctgggagagattggaggacatgaattgtgtaggaggatgtctgggggaagttctttccaggcagggaacctccatgctcaagctccagggcaggagcctgtcccatgtttgagggagggtgaggaggcccctggggctggagcagagagcaaggggatgacatgacatcacgtcatggagcctgaggacagtagaagggttttgagttttctctgagtgagatgtggagttataagaatgaacagatcaattcattgaatttctttaccagcacctgtttgctgcgtgcagaattgagaggtgaaggggagcaactagtagggaacctgtaggacccagggcagtgtcccaggagggggatgggggctgaacatctggaatgtggggagggaagataataggaaatgagtgggtgctggatatgtttacaggtgaattttgcagcatttcctaaggcattccttctggggggtgagagggagggatcaaggagggcatccggtatttcagactgcaaggagaagtgtgcagtgccttccatggagatgaaggagacactggaatcaggacattgggaagcagcatcacagacatccacttaggaatgtggaatctgggctataagaaatgcagctgatgtcagttggatacagagatatcaagattggagaattatacttgggaagtggctccacatcaatcagtttcagagccttcagcagagatgaggacaccaagggtgtgatggccatagaagagaaaggaacaggcccaatccctggactgctcggggctaagcaagctgatcagagcgtacccccacagagcgtactgctctgtctggttctgcatctagtaggtgcatagaacagagaggcccagccttcagtgagcacagggatttcctggactgtgcagatctagagaggctggagcacagtgtgagattcggggtttctacaaggttgctgctgctgctgttggtcttcagatcacacattgagtagcaagcacatgaagcagggtcccccgagtcccaatttgaagacttctggcaaagcaatggtaatcaaggcggtgtcaggggattggttcaagatggcagcttacaaacatcctgaacccatcttcttccatggacccaatagattttcaactacttgtggaacaatctcctctaaagaagatctaagcctccacagcaaaggataaaagggcagcatcaacacaggtaagagaggcagagacattcttgccaaaaccaaaaaactagaaaatccaccccaggcctgagaatccaaaatattgtggcatcacaaaaatacacaactttgctgagaagcaaggggtctgtgctctacaccagacactaaaccctgggtcctccacaggagagacgagcccctcatgtgcctggctttgaaaaccaaagggatcatattcaggaaaaccacaaaactccaggaaatgaagaactcactcttaaagtttgtgtgcagtctcactcacctctgactcagttcaaacaccagtttgaaaagttcctaggacacaagtgagggagatccactcactaatctttttcttttcctatcaagtccagtatagttagcatacagtgttatattagcttctgatgtacagattcaacagttctatacattacatcatgattgtcaggataagtgtactgttatatctgataaaggtttagtatctaaaacttaggaagaacttctcaaactcaacacctcaaaaccaaataatcaaattaagaaatgggcagaagacacgaatagacattttcccaaaggcatccagatggcttgcagacacatgaaagatgctcaatatcactcaccatcagggaaacacaaatcaaaaccatgatgaaataccacctcacacctgtcagaatggagaacattcacaacacaggaaacaacatatgttggcaaggatgcggagaaagaaaccctcctgcactgttggaagaatgaaaactggtgcagccactctagaaaacagtattgaagttcctcataaaggtaaaaatagagctaccccatgattcagcaattgcactagtaggtatttacccaaaggatacaaaaatgcagattaaaagggtacatgcaccctgatttttttttaagattttatttatttatccatgagagacacagagagagagagagagagagagagaggtagagacacaggtagagggagaagcaggctccctgcagagagcccgatatggaactccatcccaggactccaggatcaccccctgggctgaaggcaggagctaaactgctgagccacccggggatcctccttgttcctgatcttaaaggaaaaacttccatccttgttcgtttcatataaagacacctggagcatattcatctctggcttttattatgttgaggtagtttccttccattcctatttgttgaatgtttttatgataaaagagtgttgaattttgtcaaatgcttcttttctgcgtcaactgaaataatcatgtgttttccccttcattctcctaatgcgctgtattagattgcttgatgctcacacgttgacatgtatttgcattccaagaatagtcagtgtatcgtggtgatgctgctgagttccgtttgctggtattttgctggtgatacctatgtggatattcctaagggatactggcctgtagtttccttgtattgtctctgtctggctttggtgttaggacaatgctggcctcatgcgataaattggaagtgttctctcctctgcagttttgtggtagagtttcattatttttttaaagattcatttacttattcatggagacacagagagagaaaaagagagaggcagagacataggcagagggagaagcaggctccctccaggcagcctgaggcaggactccatctcaggaccctgagatcacgattcaaccaaaaggcagatgctcaaccgctgagccactcaggcatcctgtggtcaagttttagaaggattggtcttcttttatggtaggattcacagtgaatccatcagatccggggcttccttttgtaggagatatttgatgattgattcaaaatcctactggttatggttctattcagttattctatttctttgtgatgcggttttgataggtttttttgtttctaagcatctgttcatctcatctaggtcatccagtttgatgctacatacctgttcattgccctgctaatcatctttaattctgtagaataggcagtaatatccccactgacatttctgatttttagcaattttagtcttgtctctttgtcttagtcaatctagctaactgttggtcaattctgtagatctttctaagaaccaacttttgggttcattgattttcccaattgtttttctatgccctgcttaattgatctctactctaatacttattattgcctttcttctactaactttgtgttttgtttgtctttttctacttcattaagtttagagtttggctgttgacttgagatctttttttaaaaacttattatattttaattgaattataattaactcagagtgttatattagtcagatgtagaatggaatgattcaacaattctatacatctatatacattgctcatctcattactataattgttctcttagtccccttcacctttcatccctccccaacgaccgcccctctggcagcatccggtttgttctccacatttaagaatctctgttttactttgtctctttttttctttgttttgtttcttaaattccacataggaaagacatcatatggtgtttgtccttcttggacttatttcacttaacattataccttctacatccatccatgttgttgcaaatggcaagatttcattcttattcatggctccataatactcatacctgtaaatgcatacataatatcacaacttctttatcccttccctctatgtatggacacctgggctgcttccatatctgggctactgtaaacagtgatgcaataaacatagggatgcatatatcttttcaaattagtgttttcattttccttgggtgagtactcagttgtggaattaatggatcatatagtaatcatattttcaatcttctgaggaacctccgtactgttttccacaatggttgcaccagtttgcattcacaacagtgcatgagagttctttgttctacacatccttaccagcacttgttctttcttgtggttttgattttagctattctgatggatgtaaggtgatatctcattgtgggttttttaaatgtgtttaaatatttttaagggtttaaaaagtgtttatagtttgtaattcctagttggaaaacatcatctgaatgaataccctagtggcaaaccactatagaatgtttcagttgcatgtggggcagaggggtaaggattctcttcacagcacccagctttcttcatgagaaggtcagaggtacactagtttgtattatagcaacattcattaggtgatggaagttactttgccttcagcaagggctttatttgtcagaagggcattatgcttgacctccaaatttggctgacaatttctgatgagattcataacctttgggttgctctaatattttgacatatttgctgggttctggactctatcctggaaggccacctaacttctggatcctgcatggctgcaagaacctctgggtcactaagactctcagttgagcccaaatattcctgccattccaggcatcctcccccctgcctttccaggcatttctccaggaaaattactaggcattagcccaggagagccacctgggaaagagccatacactgagctcctgattgttgtctggcttcttcctccccctgggctctctcatgttcttacgagcctcttaacccttttctattctttctttgatctctcactcttcatgttttcgctcatacttcctccgatgttcaacaattttctgggccctcggttgagcttctttcagcattgcactagcatcttcatcataatccagtttacaagcaagggcaagatcatgtgctgcttcttcccaatgatccagaagtctgtgtactttcccctcgccacttgtttttgtttttgttgttgtttttttttttttaagatttcatttatttattcatgagagacacagagagaaaggcagagacacaggcagagagagagaagcaggctccatgcaaggatcctgatttgggactcgatcccgggactctgggatcatggcctgagccaaagacagacactcaaccgttgagccacccaggtgtcccttccctcgccacttgcaaagctagctgaatcgggatttatttcagtagccctgtcacagtctcgaatggcagcatttggcttctgtaatttgacaaagacacgggctcttggcatacaaaatggccaaacgagaattcagtttgatggcatctgtgaacaagtcaatggctttctgtaggtcaccatcatgtagggcatcaatggcagccccttttttatcgtttgcctgatccatcatttcctcagttatctctacattttcatctcccatctcctgaggggcatcagtatctggttcagtcacaccgtcgttgtcaatttctagatcactttctagatggttcctctgtctttatgttttcctctgccttctgtttttaattccttgatattgtcttctgatttagttttataagtagcaggtggtattttaccccccatggtctccacccactcccacaggaagcgcatttccttggtaggcagaatgctcagatcctgcttacacattttcatgaaggcccaaagctcgctcactgcaggggtccatggtccagaggtggtggcagggggcaggcatggctgaggtcgcagcctgattccaggtgcgagtactagctcagcgtgaccgtgtggaaggaggccgctgcctctcattgtgtgatttgtgtttgccagatgatgagtggtgttgagcatcttttcaagtacttgtttgtcttctttggaaaaaaaggctcttcgtgtcctctgcccactttaaattggtttattttgttgagtgggtgttttgttcttgttgagttatatacattcttcatatattttgggtatgcacctttattgaatatatttttgccaatatcttctcccattcagtaggttgcctttgttttattgaggttttctttcactatgctaaaggtttgtattttgatgtagttacaactgtttgatttttcttggtttcctaagccacaggaaacattcctagaaaattgtttctatggctgatgtcagggatataactgcctatgttctcctctagaaatcttacatttttaggtctcacgtttagttctttcccccattttgagtttattttggggtatggtgtgagaaatagtccagtttcattctcgtgaagtaggtgttgctttccagcaccattggttgaagatactgtctttttccctactgtatattgttgactcctttgctgtagatcatttgaccacggaagtgttggtttatttctgaattctttcactttctcctcttccttcgtcttttcatcttcttttttaattttattaagaaatctatatgtttagttattcatttattttagagagagcatgtcaactcaagcagagggagaagcagaaggggaaggatgtggagggggaaggactctcaagcagactctgtgctgagtgcaggctccatctcacaaccctgagatcatgagatcatgaactgagctgaagccaagagtcagaggcttaactgatggagccatcagatgccccttcttttatatgtaagtatttgcagctctgaatctccctcttagtactgctttcactgcatcctgtaagtgtcagtatgttgtgcttcatttgtatttgtctcaaaatatttcctaatttcctcctggtttcctttacacccattggttatttaagggggtgttgttaacatttcacaaatttgcggaatttccagttttccatctttttttaaaaaagattttatttatttattcgtgagagacacagagagagagaggcaaagacacaggcagagggagaagcaggccccatacagggatcctgacgtgggactcaatcccgggtctccaggatcaccctgggctgaaggcggcgctaaactgctgaaccacccaggctgcccccagttttccatattctattgatttccactttcaacccattttagttggagaagatagtttgtatgatacctttcaaatctatgaaacttaatttgtagcctagcacatgatcaatactgaagaacatccatccaggtgatttgagagaccatatagtctgttgttttggttagagtgttgtgtgtatgtgtattacctctagttggattactgtgttgttcaagtcctctatgtcctctatttctcttctgtctggtggttctaaccatcattaagaatagggtattgaagggggcagcccctatggctcagtggtttggtgccaccttcagcccgggttatgatcctggagacccaggatcgagtcccacgtcgggctccctgcatggagcctgcttctccctctacctgtgtctctgcctctctttctgtgtctgtcttgaataattaaataaaatctttaaaaaaaaaaaaaaagaatagggtattgaagcctccaactatgattatagaactgtgcattcctccctttggtctgtcagtttttccttcatgtgttttgaggaccttttattaggtgtgtaaatgtttaaaatgattatattttcttttactgaatattctctcaaagtgcaatgttgtcttttgtaagttttttttttcttttgtaagttttttaattgaaagcctgctttggttcctatttcatttcctgtgatagtaccctgggttttgattgctggatcatgtggtagttctatttaaaatttttttccagggcagcccctgtggcgcagcggtttggcgccgcctgcagcctggggtgtgatcctggagacccaggatcgagtcccacatcaggcttcctgtatggagcctgcttctccctctccctctgtctctgcctctctctctgtgtctatgaataaataaataaaatcttttaaaaaaataaataaataaataaattttttttccagggcaaccccggtggctcaggggtttggcacccccttcagcccagggccggatcctggagacctgtgatcacatcccacatcgggttccctgcatggagcctgcttctccctctacctgtgtctctgcctctctttctgtgtgtgtgtctctctcattaataaataaataaaatctttaaaaaaaaattttttccgggaggttccacactcttccataccaatagtgacaaggatttccttgtctccacaccctcccccatctgttccctggtcctcttataatagccattctaacaggtgtgacatgatgtttcactgaggtttagatttgccttttcataataaccagtgatatcgagcaccttttcgggtacctgttgacaatgtgtatgtctcctttgaaaaaatgtctattcagatttgttgcctatttttaaattgcatcatttgtttttccctcttgatttctttgtgctacttatatattttggatattaaactcttaccagataatgagtgccaaatattttttcccactccataggttgcctttacatgtttcattagatggtttcctttgctgtgtagaagctttttcatagatgtagtcccacttgattttagcttttgtgtcctgtgcttttcgtgatactcccaagtcattgctaagaccactgatgagaaaagttctccatgtttttttccctaggagttttatggtttcacttcttacatttaagtcttaaatccattcaagtaaatttttgtgagtgacaggagacaaaaatgcagtgtcgttcttctgcatgtggtctccagaatggtaccaaccatgtggttggttcccttgtcaaagattagttcgccatatatgtgaggtttatttgtgggctctcagttctggtccattgttctctctgcctgcttttatgccagtaccatactgttctgatcagtacagctttgtgatgtagttggaaatcaggaattggagtgcctcagagactcctgggtggctcaatgtatctctgcctctctctgtgtgtctttcatgaatgaataaataatatctttttttaaaaaaaaaaaaggaattgtagggccttggatttgttgttctttctcaacattgttttggctatttggggtctcttttaatcccatatgaatgtgggtatagtttttattgtttccttgaaagctatcattgcaattctgatacagattgcattgactccatatgtcactttgacactgtggataatttaacaatattaattcttccaatccaagaatatgggatatcttttcttatttctttattttatgattttatttatttatttatttatttattcatgagagacacagaaagagaggcagagacataggcagagggagaagtaggctccatggagggagcccaatgtgggactcgatcccagaactccaggatcatgccctgagctgaaggcagacactcaactgctgagccacccaggtgtcccgggatatcatttcatttattgcctcatctgaaagtttttcatcaaaattttttgtgcgcgtatttttccctgattaaatttattcctaagtcttgtattatttttgatgcaactataaatgtattgctttctgaattcctctttcagatattttgttgttagggtatagtcaaacttttatatatatactgatttcatatcccataacattactgaatttgctattagtcctaaagtttctttgttgaagtctttagggttttctccttataagattaagtcatagctaagatatggaacaacttgagtgctcatgaatgaatgaatggataaagataattgtatatatatataatattgtgtatatatacattatacatattatatatacattatgtaaaatattgtgtataaagataattgtatatataatattgtatatatacacaatatatataattgtgtgtatatatatatgtacaatgggattgtagtctgttgcacgctctgcggcaacacgatcagggtcccgagggtaaggggatgaggaaaataaaagaaaagtaaagagatggtgacaggagggacacagtggatgatgtccaagcagtgccagctttattcaaggttcaacaacattatacagcataagcaaaacaaagacaaagaagtatctgttcttagcatgtttgtgaaaccctccaaggttcccctttatcagcatgcaagacagacccactggcaccagaagaccttggtaaatagataagcttattgctccagatgtacatacctcaaaggaacattagatatggttaacagaccagcaagaacagcacagacccctattcaactttatggccaggccagaatacattgtatctaatgtgttatgtgggcgatcaggtaccagccagctctgaaaaccattgctcaagccctttctcaagcatcaaccaactattcaccctttaggctcccgagccttttgagtgaatgagggacgcaagtccgggtctggtttggtttagttaactccagctagtccgtggttgcccacagtagtcagctatattaaagaatgaaatcttgccatttgtgatgatagggatggactctgtggatattgtacttaggaaaataagtcagaaagagagaaataccacatgagctcacttgtgtgtggaatctaaaacaacaacagcaaccaacaaacaactccccctcaaaaagagtaaaagaggggatccctgggtggtgcagcggtttggcgcctgcctttggcccagggcgcgatcctggagacccaggattgaatcccacatcgggctcccagtgcatggagcctgcttctccctctgcctatgtctctgcctctctctctctctctctctctctatcataaataaataaaaaaaatttttaaaaaaagagtaaaagattgtgctcataaaaacagtgaacagatttgtgatcgccagaggtaggagtgggatggtgagtgaaacaggtgaagggggccaacagttatagatttccaattgtaaaggaagctacaaggctgttgtatagcatgatgactagttaacaatactgctttgtgtatttgaacgttgctaggagaggaaatcttgaaagaaaaaaattcatgtcatctgcaaacagagacagtttcacctcttcctttccaatttggacgctttttatttcttttccttgcctcagtgctctggctaggatttccagtactatgatgaatagacatggtgagagtgagcatccttgtcttgttccccatcttggagtaaaggcctttgcttttcaccattgaggatgatgttagtgggcgcttggtatatatggcctttattatgttgacaaacatttcttctatacccagtttcttgagagttttgatcatgaaaggatattgacttttgtcaaatgtattttgaagcatcgctggatcccaggcataaatctcacttgatcatggtatatgttccttttaaacagcttttgaattcattttgctggtattttgttgaggatggttgcatcttcattcatccatgatattagcccgtcattttcttttctcataatgtccttgtctggctttgctatcagcatgaagttggccacattaaatgagtttggaagtctatcttcctctttagtattttagaagagtctgagaaagattggtattggttcttccttatgcttgatagaattcaccagtgaagttgcatgggtgctttcttttgtagggagactttctattccccattcaatcttctactagttattgatctgttcagattcgttaaattttcatgattcagtctcggtaacttttatgtttttaggaatttatccaatatttctatttaatttgttggcatttactgtcataatagagtcttatgctcatacatacctttgtgggatcagtggtgatgtctccctgttttgttcataattgtatgtatttgagtgattactattatcatataataattatttatattataactatattaaattgtatttatgtaaatataaatattttatgtaaatataaatgtatgtattttatttattttatttactgaaaataatacatttttttcttagtgtagctaaccaattgtcaattttgtttttcttatcataaagtcaactcttcatttcattgatcttttctaatgtgttttttatcacaatttcatttctttccattcagatatttattttcatcctctaataactttgggcttgtttgttcttctttttctagttttttgaagtgtcacatgaggttgtttatttgcgatctttcttacataggcatttattgtcataaacgtccctcttaagaaatgattttgctacatctcataagacttgatatgtctgtatccatttttattatctcaagatatttttctgactgtgcgactgcgtttaagaaggcggctgtggcagctgtgccagcggctgaggcggtggctgaggcagcaaggaaggaaacagaagatggcagatttttttgaaaggactgcctgtctacaacaaaagcaattttagtcaatttcgtgctgactctgtgtgcaaagcttcgaaccggcgtccttcagtctacctgcccacctgggagtacccatctgaacagatcattgtgacagaaaagacaaacatccttttgcgctacctacatcagcaataggacaaaaagaacaccgccaagaagagagaccagaagcaagtggaccttgagggtgagaactctgtacccccccacacccacacccccacaaggtcgctgggaccaacagccggacatgcatgaggacacttaagactctcactcccccacaggcgcctcctgtcttgtctgctccaggcccgccctccttgtgtaagcgccccctgtcctgcccctactggcccacccacacctgactatccataccacttccaacctcataggagcagaagtatttattttccttgagtttttatttatgctgtaaaatgtaccaagcaatggttaaaggggacatcagacccagtagtgtgatgttggtagatgctttctaaaaaacattgttattcacaaactccactacccagaatcccctttcactcccccacccccctccaggtctcctccggaaaaaccagagtatgtctgcaagtgtctagagccagggccatgctgtggcccagcagcatgggtgggagcctttctccctgctcctactctctagtccgggccttaaagacttggctgggacctattctgtgcccaggctttgctctgaatgtgtgccagagggagaagttggcatttccagatctttctcttaagtcattttatcacagactagtgcgtgctccgtgtccaccccaataaaaaaggatctttcctactcgaaaaataaaagcggggcgtatttttctgatctccttttttatttcatctttgactcgtgattgttcaggtgggtcttgtttcatttccacttatttatcaattttccacttttgctactgttactgatttctggattcataccatcctggctggaaaagatacttacacgatttcaagttctgaatcatgttaaggcttgtttgggacctacgctatcccagatagtattctgtgtgcacttgggaagaatgtgtatccccctctgttgaatgtagtattctggatgtgtctgttagatctctagttcaagtccaagatttccttatggttttatatctgaatgacctatccattgttgaaagaaagtggggcaatgaagtccttctattattgcattgctgtctattttcgccttcagatctgttcataattgcttaatatatgtaggtgctccagtggtggttgcatccatatttacagctgttatctcctcctgctgaattgacccctttgacatcatataatgaccttcgttgtttacactttttgtctgatccaactctagtaactcctgctcccttttgctctccacttgctgcaatactttatctatcccttcactctgagcctctgagtggccttaaagctaacaatagtatccttttaaaaatagcagagccggggatccctgggcggcgcagcggtttagcgcctgcctttggcccagggcgcgatcctggagacccgggatcgaatcccacatcaggctcccggcatggagcctgcttctccctctgcctgtgtctctgcctctctctctctctctctctgtgactatcataagtaaattaaaaaaaaaaaaaaacaacaacaacaacagcagagccttttcttaatccactcaggagctctcttttgactggggaattgaatccattcacccttagaatcactgttgatagataaaaacctactattttgttaactgtttttctgcttgttttgttcctttgttccggtcttcctccctttctgccttcattgtgagttggtgatgttttgtagtagaatgctttggctcttttctctttatcccttgtgtatctactgtaggtgggtgctctgtggttcccaggaggctatcatatccatccttgcagttatcacagcctattttaagctgatatcaacttaacttcaactgcacagaaaactctacacatctactcctccgcccacattttatgttgttgatgtcacaatttacatattttttgtgtgtattcattaaccaaatattgaagttctagttattttaacacttttgtcttttaagttttatactagagtataaatttatatggatttatactccaccatacagtgctagagacttctgagtatatatttacctttatcattgaattcatatcttcctatgttttcatgtcaatacttagtgtttttcatttatttctttttaataagattttatttattatttgagaggaagagaagcacgtattaggtgaggagcagagggagaagcatgttccctgctgagcaagtagcttgatcctggggctccatcctaggactcgatctcagaactctggggtcatgacctgagctgagggcagatgctcaactgactgagccacccaggtgcccttgtttcatttctatttcaagaaatccatttggcatttcttctaaggcaggtctagtagagatgaactccttcagttttgtctgggaaggtcttgatctctccttcatttccaaaagacaattttgctggataaatattcttggttaatagcttttgccttgagcattttaaatatatcaaacccatacacatggcctataaggtatctgtgttaatctcttcaatcttgctgagcttctttaaaataaccatttggaattcattttcagagaactcacagatgtccatttctttgtgggttctgctgtctcctcgtgatagtccagagctttcccagaggtgctgccctcaatttgtgttatttatttatcatttttgttgatgtttttacagaatcaaagttggtacactcttatttatttatttttacatttttaacacttgatttttgtgtttgttgtttctatggagagatcagcagtgggagctcctactctgctgtcacctgacttcagcgggaacatctgtaaggctattgttttaacatctttctctagcaggtttgccatctattctttctcagacagttctactcattgatttttttcctttcaacagtcaaactttcctgattcttcataggctcgtgattttttgttttgaaaactgcatatttaaatcctctgtgataactctggaattcagactctccccttccccagagtttgcacagctttgttggttgctatttgtcacttctgtttcttggtcgttctgttgcgtagtgtcctgtgggaggaatccacctaaggtgtcaacttgagaacctctcagatcatttaggagcctgtgcctttccctgggcacatgtaaggccgtaaagtccctgtatttgcagctgcttttccatgttgtagtccttatatcttgcctcccaaaatggaaaaaaggaggaaatgagggggaagttcccaggcgtttcaaatacccgtgaagtttcttcaaccacaggagcaaggtttgtcccatgggtggtgggcgttgcaaacacggttgcctgcatctttgctgcatccccgtgaccaaaagcagccagcagcgatcagaacatttattcctggggcagccccagtggcacagcggtttagcgccgcctgcggcccagggtgtgatcctaaagaccctggatcgagtcccacgtcgggctccctgcatggagcctgcttctccctttgcctgcttctccctctgcctgtgtctctgcccctctctctctctctctctgtgtctctcatgaataaataaataaaatcttttaaaaaaaaaaaagaacatttattcctgatgttcacaaacagcgccctaattgctcaccttagcttccactacctgtgccaactgctgtggggactcctgccggctgttggccacaggcctagaggccagaggacagttgcctcatctatggcacaggctggaagtgcctgaagtgacctgccctctaccctcccagccttccccctgcaagagcaagccttcagtagaccccagctttccccgacagctctaaaccctcagtgcatctgtcatccaggaggacatgtggtcccaggtgcttcctgcccctccagccaccctgacagcacctcttcacagccagtcagcgtgatgcgaggttctagtggatttagcagatcatctcattgtgggtttgttattacagctttactgagatcttattcactctccattcactgatttaagtgtacaattcaacagtttaggatgttcacagagttgtgcgactatggctacaaccaattttatttttcttaagattttattaatttatttatgagagacacggagagagaggcagagacataagcagagggagaagcaggctccctgcaggggagctcaatcccgggaccccggaatcacgacctgagccaaaggcagatgtgggactcaaatacccaagtattttagttcttaaagagtgtgtgtgtgtgtgtgcgcgcgcacgcatacatgtgtgagactatgcgttgtctttttttcacatgtagaattttatccagaagtcccttcacttatattgaggtgaaaagagataatgttcaaagattatgtaatggatttggatctgtgcgtgtgggaatcaatcccgggaccctggaatcatgacctgagccaaaggcagatggccaactgctgagccacccaggcttcctgttacaaccaattttagattattttcatcagccctaaagaaaccttgtgctcattagcagtcacccctcacttctcctgtcacctctccccaatcctgcgcaaccactaaactactgtctgtagatttgccttttatcgacatttcttaaaatatcaccttgatttctttgtcactttcccatttatcccccttcccactgctcaccacgtctgtgccctgggagaccaccctctaccctccactcagggagtggactcctgtgtctccagatgctcctggctgccactacagtttggcaaatgggaagctccagtaagtagtgtgtccgatgctcactgatctgagcagcactgacatgttctgtgggctagtcttggttgctaacatgcatggcaaagattcctcccaatacgtggcctgtcttttcactttcttgatgacgtctttagatgaacagcactattagttataactaataacatagaggattctttctctattgcaaatgtcttccattgttctgctaagttctttcttaaatcagagtcatagtgatatttttctgtaatattttctgaaattttatagattgtaattgatttgtttttgcatgtgtatggtgtgaagaaaaggttcacatctatcttttttccttcatgaatggccagtagttgattcacttttattgaaaactccatcctttcccctctctcctcaagtcttacctctatcaacaatcctgtatccacatatatgtggaattatttctaaattccttatttggtacactggtctccttttttatctctttgacaattttcttcttgttatcctagatttcggtccttttactacaagggatctatggtcaaagaccagaggtagcctatgggataataaaaatatttggtccccaagccattaggatatcctgagtgataagagtgtctctgatatgttaatgaggtgacttgggtgagggtcctagatagcttcacgttgggactggtgaccaggaggaccaaaccatgattacagagttagagacattggcctcactcaccgacctctggggagaggcactggaggctgacctccatcaccgatggtcgatggccagtgaatgaatcatgcctatgtcatgaaccttccatgaaaacttctcaacaacagggttcacagagcttctgaaatgacaaacacatctgagggtggcacattccaactccacagtgacagaagctcctgcactggaaccttcacactcccacactcctgtacctccttatctggctgctcatatgtatccttataataaaccataagagtaagcagagaattttcctgagtttctaggagtcattctagaactttgagggttctagagttacccccactctgtagccaacttgaagaaaagtgcaggtgacatgaatagctgatagttgagacttgctcatgagctgtgggcaatcttgcaggatgaatccttacacctgtgggttccatgctcactccaggtcgacaatgtcagaactgaaatgaactggagcacctggggctcagtcagttaggaatctgcctcatgtcatgatcttggggtcctgggatcgacctgaggtgggctccctgctcagtgggaagtctgcttctccctctccctctgccactcccctatgtattctctgtctcctcaggtggaggaataaatcttcaccactccacaaggagaaattcagagtaagagcaagcaagtaaacctgtacctcatcttacaagagcaaaggataaggcagaagcattcctatcatgtccttctgtctgcaaccagatgctcatggtcctgttagcaggcccaaaatgaagtcatttatgctaaacaccaccaagaacttaatacttaacctaactgcagcttcagcttctcccagaaatgtgacctataatcagccaccagaagttcctggtcagcactggagggatgccactgaaagaccacttcctttccccttagcagggccaccttgcttacaacaaggcattttttttaccaatagtttccttttctccattcccctatgcctttaaaatactttcctttctgcagctagaagaggttccttgcgatttgctagctgggcagctgcccaattcatgaaccattgaataaactccccttttcattttctcagccaaactgttgtgaatgaacagttcagactttgagggacactatagctacactagaaaaccaggctggtgctctgagttctttcactgtttggtttttcatccttggcaagcagtcacataaaagctgatagatgttaagagattctctcccccaggatgtcgccaggcacaaggaaatataaacgtcagcatgacacattggtacccacacagacccattgaagtcgtacagacctgggtgttctcctctttgcaaggagccaaaggcagggcaaacacatcctaagtcatcatgccaccagcccacaacaccattgcatgtatctgtgagcgaacactggagtggacaaaagctggatctaatcatgtagtaccaagggaattagaagacaggtgtcatttattagacacttgttccttcggtcaaaccagtgcctacaaagcacaccagatcaagtttcagcctcagatctgtgctccaagaatggctttctccatccctctccatccctcaccccaactgccttcctacatgaggagaattccaaatttagggtctttagaagagaccgcctctctccacagaggaggaagtcctattttcccaacatccttctagttacacacagcatgagactccaccaaacaggtgacaacacgctggccctgactcacgacctggggacagagagaagctgccactatgcagaaggcatgggcataggtggcaggatggcagtgtgtcatccagtcccacaagcagcagctatggcagtcccagccaagggggccagtgttctggattaactgagtcagtggtgtgagcagtgacaactgtgcccagcagcagaagccatggttcctgtgtgagacctggtttactgtgcaattgtggattctgttcctggctgtgtagcctaagcctgtggtatgattttcccccaaacaatattttatatacatagaagacatagataagtatgtatgtatcccctatcctttgtctaagttcaagaaaagttggattccattctttgctccaagaaatcaatcagaggaatagttgcagagaacaagcattcagagatgtttgtcatactgaactgtgaaccgctccctaatcctcccacctgaccatatcccatgataaaacaatgccacatatcttacaacagcatgtctcatactgacaacaaatgccttgtctctatgaggggaaaaagtccacatttaaaagaaacttgaatgccctccccacccaggcttgctctgatcacggatcgcagtggttcccgctgagcactaggatcaagcactaggatcactcatgcagcttctcacaaaatgcacaggcctctccccagactcagagactcagaatattaggcacaagatcaaggaattgcctgtttaataagccctacaggtaaggctgatgcacagccacatgggaatcttaatgtacattcctgctgttaaaagtatgatgtgaagacctgcagcagagtagcacctcgtgaaaaacacagaacttcacccatacttcccagatgcaaaacgtggcgtgtcatgtatctcacacaacacagtgttggagtgaagtgaagtgtcatgtatcttcacacaaccagtgaaggagtgaccggtgtagagcatctccctattccagagtcagtatctttgctaatgcagcctcagaccacatctgctctggggcagctccagcactgtgacctatcaggctgccagcagcgcctctatacttctctcaccatcctatccctcctccctccctccccactctcacagcaccttcctgcacaccacgtacagcattttcaaaaaacaaccacccttgactcacaacagctatctcccaaccgaagagaaaccaaggagactctgcttcataacaccttgactttggattggagccagcacaggatcactagggcagagcacaggcaagcaggggatggaaacacaacaagaactgattttaaatgagaaattacagcatgcttcctgtctgccaatccagtatctgttcctctgagaagactggggaaacgatggaaagaacagtcgagccctagaaggaggataagacttgaatgagtctgaaaataacctctggatacacagatgcctgtgcacaggggctgccctgggccttgcggagatactgacggccaaccacctcctgctgctgtcagacaggagacccccgaagatgaatgaggccagaactcccacaggaacatgagaaaaggactgatcctctacagacacacagaaacagcaaataaacaccaagagctggggctgagagcccaaacccaggcccgatcctaggctgaccctgccacacaacattgctgcccatggtcccggaggcaggacaaggtctgggtgatgcccaagtctctatgatcacaggtcctggaaggacaggttctactggagggacaaggacaaaacagcagagagagtcctcagctgagtgaccatgtcacacccttgctgcactgagcaccaagtgggcatgaggctcctccatactaggctcctcacagcgtctcctgtcctcacatagagcagacacagtacaccaaatctgcaggttctggaagagtctcagtgctcccatttatttcctctctcaaactttaggaatcttctcctttcagatcagatctgactaactgatcagctcctcatgacaagaactggaaaaaacaatttcacatccacagtcctatgttcaataaggaagtaagaagttgtagctcggtgtaacataaagacagggatggagatgacccgctctccctcagctgcaacacaaaagcaacacaaaagcagaacacaggtctgtcgggggaggggagtcacgtggggagggagccagtctgcccacctcctcacattatgttaataggaacatatttcagacacattcagacatgccctttgcagaaagagaaatcaggggtgttgacatcacaaggtgggaaagtgaacaaatcctgcatcactcagtcccccacgaggcagctggttcacactatgaaataaaataatcatgaacagatttgggtcagtcatatacatgctgactttctcaacagctcagcacatgctcaaaatatcctactcaaagaatccccactacccaatcacggcccagtcccctccccactccccccttcaggccctccaaggtctcaccagtagaagcagagagagagccctgggcactgtcactgcctggggcagaacagatagaatgtggtcagagccaaaggagatgagaccaaaggaggagctagtggggggggtgccaagatccccatggggtcctgtctgtaccaccccggggtttcagggatcaccccctccatactcatgtgcaacctcagcataattcttcttccacctgtggaaagaaaacatcacatgaggtgccatggagaaggcatgacccgagatcctaggtgaaactcatagcctggaccacacggaagtttccaaaactttaactacagacctatggaagaatcagggacatgaagaaaagagatagcaggatgagaccaaccattctcctggagtctgtcctcagcaaggaccttgctctctgacctgtgaccactggggatcagattccatcaccacattcaacaggagggatgagtttgtccttcactctcacacgtgctttactacacagtgaatgtagcaatgagctgcacaatggagtggacaagcacatgtgtgcgggtagcacttcccctaaatgagataggacaaacttctacctgggcttgaaacgctgagaaaactcagagcatcccctccctacctgagatctacttcctccacaggacagctccagccaccatagtaccagagaccacaaagacaagcagaccagcaacgatgcccacgatggggatggtgagccgaggaggggactctgggaagagaggatgaggtgagggccttgcccctcaggtctcaccctcaactctactgaagttctcccacaagggctcctgatttccttaccccatctccgggtgacaggctccgccagcccctcatgctgcacgtggcacgtgtatctctgctcctgtccagagggcaccaccacagccgcccacttctggaaggtcccatctcctgcaggcctggtctccacaagctctgtgtcctgggtctggtcctccccatcccatttggcaggtcagggtgacctcacagtcagagaaggggtggtgggtgagagtgcctttgggggatctgaagagaagggtcagaaaattcaggaacttagggaggagttaagatggcagaggaataggagaccttaacttcatctggtccccggaatacagctagatatttatcaaatcattctgaaaacctgagaaatagatcggaaatctgagaaaagaaatgctgcaattgtacaagtagaaaaccaaccactttgtgggaggtaggaggtgcgaggacccaaatccagtgcgaaatatcagaggatacgtcagaggggagggcgccgcccacagggactactgcaaagcattgtatgcagcgggagcacaaaatgagaacttctagaagtctcctacagtggggagtccctggcttaaagggactcaggtggcgatggaggcaaaatcccaggtgggacagcagagtctcaggatgaagaatgggagtgtctgagcgcagcaggtcccaggcacccactggggaagccagctgccatcagcgagttttggtgccgggtttctgctcagtgtggccatgaaccacaaaccgctacacagtcaggcaaactgctctctgagcaggggcccagcaggtgggagaagcacagctatacccctcttccttcctggggaggaactgtatgggtccacacagctggagtgtgtcaggtttggcggcctaaaactcagttgcctgcctgagataaaaatgctcagttgggcagccccagtggctcagcagtttagcaccgcctgcagcccagggtgtgatcctggagactcgggatagagtcccacatccggctccctgcgtgaagcctgcttctccctctgcctgtgtctctgcctctttctctctcctctctgtgtattctcatgaatagataaataaaatctttttaaaaaaatgctcagtcacaggctaggtgaacacctgggagacaaggtgatcaactgcttttcatgagggctcactgaagagtgcgggtgtgaattttcagctccaagactagagagcgggatgcagccctattcatcctgctcatgagagccaaaagccttcagggagcaaaacagggccacttagtggaatccagagccacttacactgagctcggcctctgtgcaagagaagtgcacttccaccggggcaaagtccacctgaggatcagcgcagcaggactctcccacagaagaccagcacaaccagcgggcaccaggtttactgatcagagcagacagcaaagcttcagctctcaaggaaaacagtatataccatttatgtttttttttattctctagtctttcagtattatttttcagttattttcctattttttcaattcttttttattctttaatttttattttcatatatgcattatatatttttattttgcttccttttattgaattttatttttgtatatatatatatatatataaatgtttctttcttattttgggatctagtttcttttatttatttaattttttgtaagatttttttttttttaatttatttatgataggcatgcagtgagagagagagaggcagagacacaggcagagggagaagcaggctccatgcaccgggagcccgacgcgggattcgattccgggtctccaggatcgcgccctgggccaaaggcaagcgccaaaccgctgcgccacccagggatccctttttgtaagattttatttatttattcatgagagacacagagaggcagagacataggcagagggagaagcaggctccctgaaaggagcccagtgcagaacttgatccctggatcccaagatcatgccctgagccaaatgcagatgctcaaccactgaaccacccagccatcactgagatctagtttcttttataagcagaccaaaacacacccaggggatgcctcagggataagagttccttaacctacaagggtagacacataaggctgacagcagtcctgtccacagaaactggacaagccagaaagggctggcatgatatattcaatgtgctaaatgggaaaaatatgcagccaagaatattttatccaccaaggctgtaattcaaaatagaaggagagataaagagtgtccaggaaaaataaaaactagaggaatttgggatgcctgggtggctcagtggtcgagtgtctgcctttggctcagggcatgatcctggaatcccaagattgagtaccacattgggctccctgcatggagcctatttctcctccctctgcctgtgcctctgcctctctctgtgtgtctctcatgaataaataaataaaatctaaaaaaaaaaaaaaaaaagaggaatttgtgaatactaaatcagccctgcaaggaatattaaaggggatcctttgagtgaagggagagcccaaaagtaacaaagatcagaaaggaaaagagacaatttataggaatagcgactttacaggtaatagaatggcactaaattcatatctttcaaaattactctgaatgtaaatggactaaatgctccaatcaaaagacacagggtatcataatggattaaaaaaacaaaacaaaacaagacccatcaatatgctgcttacaagagactcattttagactcatttagacccaaagacacttctagaggtggagggatgcctgagggtggctccgcggttaagcacctgcctttggctcagggcgtgatcctggggtcctgggattgagtctcgcattgggctccctgcatggagccttcttctcctctgcctgtgtctctgcctctctctctgtgtctctcatgaataaataaaattttttaaaataccaaagaaatacaaacaattataagaacatattatgagcaactacataccaacaaattaggcaatctggaagaaattgatgcattcctagaaacatataaactaccaaactgaaacaggaataaatagaaaacctgaacagacccataaccaggaaagaaattgaagaagtaatcaaaaattcccaacaaacaagagtccagggccggatgacttcccaggggaattctaccaaacatttaaagaagaattaatatctattcttctaaagctgtttcaaaaaatagaaatggaaggaaaacttgcaaactcattctatgaggccagcattactttgatcccataaccaaacaacggcttcactaaataggagaattacaggtcaatatccctgatgaacatggatgcaaaaattctcaccaagatactagctgataggatccaactgtacattaaaaggattattcagggatccctgggtggcgcagcggtttggcgcctgcctttggcccagggcgcgatcctagagacccgggatcgaatcccacatcgggctcccggtgcatgggagcctgcttctccctctgcctgtgtctctgcctctctctctctgtgactatcataaataaataaataattaaaaaaattttaattaaaaaaaaataaataaaaggattattcaccacaaccaagtgggatttatcactggactgcataggtggttcaacttccacaaattaataaaagaaaggaaaagaatcatatgattctgtcaatatatggagaaaaagcgtttgacaaaacacagaatcctttcttttttaaaaaaagattttattatttattcatggaagacaaacagagagagaggcagagacacaggcagagggagaagcaggctccctgcaaggagcctgacgtgggactcgatcctgggtctccaggatcacatcctgggccgaaggcagcgctaaaccgctgagccacccaggctgtcccagcatcctttcttgattaaaaactctccaccatgtaggtatcaagggaacatatttcaatatcataaaagccatatgaaagacccacaatgattatcatcctcaagggggaaaaactgagagcttttcccctaaggtcaggaacaaaacagggatatccactctcaccactgctgttcaacacagtaccagaaatcctagcctcagcgatgagacaacaaaaagaaataaaaggcatccaaattggccgggaagtcaaactttaactcttcacagatgacatgatactctatgtagaaaacccaagaaactctacaaaaaatagctggatctgatacaggaattcagcaaagtcacatgatataaaattgatgcatagaagtcaattgcatttctatacactaacaaagaggtagaagaaagagaaatcaaagaatcgatcccatttacagttgcaccaaaaaccataagatacctaggaataaatctaaccaaagtggtaaaagatctgcactctgaaaactgtagaacacttatgaaagaaattgagaagagataaagagatggaaaaatgttccatgctcatggattagaagaacaaatacagttaaaatgtctatgctacccaggacaatccactcatttaatgcaatccctatcaaaataccatcagcatttttcacagagccagagtaaataatcctaaaatttgtatggaaccagagaagaccctgaatagccaaagcaatgttgaaaaagaaaatcaaagctggtgtcgtcataattccagacttcaagttatattacaaagctgtaatcatcaagaaagtatggtactggcacaaaaacagacacatagatcattggaacagaacagagaacccagaaatggaccctcaattctatggtcaactcatctttgacaaagcaagaaagaatccccaagttaaaaaaaacagtctcttcaacaaatggcattgggaaaattggatagccacatgcagaagaatgaaattgaaccactctcttacactatacacaaaaacaaaatggatcaaagacctaaatgtgagacaggaactcctcaaaatcctagagaacacagacagcaactctttgacctcagccacagcaacttcttgctagactgtctccaaaggcaaacaaaaccaaatgaacaattgggacttcaccaagataaaaagcttttgcacagcaaagaaaacaatcaacaaaactaaaaggcaacctacagaatgggagaagatatttgcaaatgacatatcagacaaagggttagtatccaagagctaaagaaacttatcaaactcataaaacaaaaatccagttaagaaaggtagaactagaactaccctactacccagcaattgcactactaggtatttatccaaagaatacagacataatgattccaaggggtacatgcaccccaatatttatagcagcaatgtccacaacagccaaactatttaaagagcccagatgaccataacagacgaatggataatgaaaatgtggtacatatatacgatggaatattacttagccatcaaaaagaatgaaatcttgccatttgcaattatgtggatgaactagagagtattatgctaagtgaaataagtccatcagagaaagacaaatatcatatgatttcactcatatgtggaatttaagaaacaaaacataaacacaggtgaatggaaggaaaaatgaaataagatgaaatcagagagggagacaaaccataagcgtctcttaactctgggaaacaaactacgagttgctaaagcagaggttggtggggggaaaggataactgggtgatgggcattatggagagcaggtactgtaatgagtgctgggtgttatacacaattgatgaatcatgtaaattctatctctgaaactaataatacagcatatgttaactaaactgaatttaagtttaaaatttattttagggatccctgggtggcgcagcagtttggcacctgcctttggcccagggcgcgatcctggagacccgggatcaagtcccacgtcgggctcccggtgcatggagcctgcttctccctctgcctatgtctctgcctctctctctctctctctctgtatgactatcataaatttaaaaaaataaataaataaataaataaaataaaatttattttagggatccctggctcagtggtttagcacctgctcttggcccagggcatgatcctggagtcccgggatggagtcctgcattgggctccctgtgtggagcctgcttctccctctgcctctgtctcagcatctctctctctgtctctccctctctctctctctctctctgtgtctctcatgaataaatggataaaatctttaaaaaaataaaataaataaaataaaatttattttaaaaaaggaagaaaggaaaggaaaggaagaaagaaagaaagaaagaaaaagaaagaaagaaagaaagaaagaaagaaagaaagaaagaagagaaaaagagaaaagaaagagagaaagagagaaagaagaaagaaagaaagaaagaaagaaagaaagaaagagaaagaaagaaagaagaaagaaagaaagaaagaaagaaagaaagaaagaaagaaagaaagaaagaaagaaagaaagaagaaagaaagaaagaaagaaagaaaggaagaaagaaagatttaaattcaggaactctgtatctgtcttggtccactgaagcagctttcatgtggtcatcctgagaatgaataggacaactggggtgggggaaaggagcaataacccagacaccagcctgaacacataatctcttcttgtttggaaagttctagaattaggatgagatggcccagtgtagaaggcaggtttttgagaggtaaaaaggaatttctggtcctggcctggctggaggccaagtgactcaaacaggtgaggcctgattccaaacacttgaggtacagggctgagaacaaagcctgagaaaatcccccaaggctcccaaagggagtgagtcaaaaagaactgctcatcagttatttcagaaatggtctcctcctccatccctggagggaatgtgaccttaatggtccctaggagaaaggcagacccttagggccactctctagtaccggatctgaaaacctaggcagagttagtctctccatccatgacgcatgggagggccatatactggtgtggattctatttcttcctatcctctcccacggcctcagcctgaggcgagatcggggaggcccggggccccggtacctgcgcgcagcagcgtctccttccccatctccaggtacctccgcagccactccacgcacgtcgtctccaggtagttcctcaggtgccctgcatcacctgccgcctccctcttgcgccgggtgatcagcgccgccgcgtccgccgcggtccaggagcgcaggtcctcgttcagggcgatgtaatcggcgccgtcgtaggcgtcctgactgtacccgcggaggaggcgcccgccgggccccaggtcacagccgtacatggtctggatggtgtgagaccctggccccgccccgacaggccgccaatcagtccaaagagaaagtaaaacctcccgggagttcccgcgggttcgggacggggacgagggggaggggcgggggcctcggactcggggtgacgcccggacccggaccctcggggcgacccggccggtcggggggatgggggtcgtgccccggccccgggcccgcgccgctcaccggcctcgctctggttgtagtagccgcgcagggtgtccaggtccactcggtacacctgtgcggtctccttgaggttccgcgtctccccgtcccaatactccggcccctcctgctccacccacggcgcccgcggctccatcctcccagtggccgcgtcgctgtcgaaccgcacgaactgcgtgtcgtccacgtagcccacagagatgtagagggggtccccgcggccgggccgggacacggcggtgtggaaaaacctcagggagtgggagcctgcggagccgacgggtgagaccccgcccgaccccctcccgccgcggggcccggggcccaggggagatgcccggggcggggcggaggcgggaggggccgggggcggcggagaggcggcttcccggggtcccgcgtccccgcccgccggtcccctcgctcccgcccgcactcacccgcccgggtcagggtcacggccagggcccccgaaggcagcaggggcgggggggggggggtgccgcgcatcacgactcgcatccttgaggttccagagacccgaagagccggcaggggtggccccgcaggcccggaccccggggacgccgatcggctcccctagaaccccgccgcccaatgggggtgcgcgctggggccaagtcccgagtatccaggcgggaggccctgaggcgggttgggagaggggagggaggcgcgcgggggacggaactgggcttccccgcccccagacaccgctctaggtcttcccggagacccagggctttgccctgattcccctccacctgcacggagcgctttctctcaccgtctccctgaggcctggccggcggtccttctgaggaaaccggggacagacaccaggcagggatcagcccctttttgtcccttacgtttgtggaaaccctcgacttgagctgaactactccttacttctccgtactcttctgaaagaaaaatcaccgccaggaaactggatgccagatagtgagctcgcctgggaacggagatggagagacagggattttctctttaaacctgaagttgtgggcacctgggccgctcagtggttgagcttctgccggtggctcaggtcatgatccctggagtcttgggatcaaggcccgaatagggagcctgtgtctctgcctctgtgtgtctctcatgaataaataaataaaatctttaaaaataaacaaaacaatcttcattccatagccccaaatttctgtgagttcccctcatatcctcaatacatggaagcatggtttgatactatacatttcgatcaggagcatgtacaaacttgaagcacctcaaatttgcaacgttccatgcagtcaaaatgcccttcgccagtgctcctgcattgcctctttttatgcattattcacatctaagcagtgcacatatttcgtctagacattttttaaactgatttgcataaggaggcaactgattttcaggcagccccacagaatatagtaaattctagatgcaaaaaatatcttgctaagacctggaaatagagattccatttttaaaaaggctgtataacaacgtatttaaatgtgaggattccactgctgtaaaactggtcacctctgcttctctccctccgcctgggtctgcagcccttctctccatctctcatcaattagggcctctcatcccgagtctccaccccctctcactcctgattggggccctgctgccactccaacacttgctaccctaaggccactctcgccacctgggacagacagcgatcctgctgatatgagtcaggttgtgtcatttcatcactgaaaatgcttcaggggctctattatttttaaagattttatttatttatttgagctagaacacacacacaggtagggtaaagagcagagggagaagcaggctccccgctgagcagggagcccaacttggggctccatcccaggaccccgagatcacgacttgagccaaaagcagacacttaaccaactgagccactcaaatgctcctccatctcacttaggaagcctctagagggacacctgggtggttcagaggttgagcgtctgcctgtggctcaggtcctgatcctggggtcctgggatcaagttccacagtgggctccccacagggagcctgcttctccctctgcctgtgtctctctgcctctctctgtgtgtctctcataaataaaatctttaaaagaaagaaaaaagaagtactggaagggctcctgggcggctcagtcaggcattcaactctttgatctcggcttggatcttggtcatgagttcaacctccatgctgggcatgaaacatactttttaaaaaataaaaaagtcctgaaaagaaataggaaaataaaatgtttcttttcggcttttctgggcgctgtcatcaaggagctggagagaggggtcacagtggagaagcagaaacctgatggatgactcaaggttcctacatctcctctccttcaatccttgccgcattcctgatcttgacacctgtggagtccagggctgttcagaagcttctttgtggcagtattgatgatgctcccaagctccaggtcagcctcccctgagcaacttacagcccagaccctcccaggctgctcagtcagaattcaggagcagcgcagcggcgcccccgtgtggtcacagggatgaggttggaagaccaagttctccctttctcttgcacagcaaggacctcccagggtctccctctgctcccaacaccagatcagggctttgaacacaaaaggttgcccctgtccatgtcaggctgggttgcaaaatgttcccccaaatccacaataacatagatgttttctttgcatgatcactgattccgccctcaggggcaagttctccaggcaatcacagctggttcccagatctggtatggaccgcacaaagaaattgagtgcccggtctccaaagataggacctaggactcctaagttcctgtcacttctttctgctgctgcctctggggctggactcagttcagtaagtctgagaacatagcatgaaggatgaggggcagaagcccacagtgcattgggtctagaaaagggaggatgctcctggggagtgaggctagggtgtaaataagaacatgagaggggaagagcttccaaggagggaaggagtcagggagaagaggggcatgggaagggctggtctaaggaacacctgtttacatggagagggctctctgggtcctggaccagagtgaagggcagatgcggtaccagccctatagggaccaccaaccctgggttttcaaggtcccactccgtgttagtaccttatgaccatggctgagcacacttcagtcgtcagccttcagttgttccttcctcctctatggcaagcagagcctccccaccaagctgaggagcccctcagctgaacatgtagtgtgggctggacactgatgtggactacaaggacctcagtaacaggacccaggatgctgaccacccatttcccagcagtccctacaccctccataactcactgccgaggagtctgcatgcttcctctctggtaacccaagcaccctgagagtggacccctcaggccctgttctctgctactctcaacccctgaacttagaaactcatgctacatccccagtcccaaatctcatttctaccctaaccactggcccaacactatggcggtgctgtagactgaatgtgccccacccagatacacatgttgaaatataatcttcagtatgatggtattagaagttgaggcttttgggggtgatgatatcatgagtagagccctcatcaacgggtttagagtccttataagagagactccagagagtatgtttaagccactcgatctgtgatattttgtgatgaatacccaagcagactaagacaatctccaaaaccaaacaccgcgaagctctttcagtttcagacccactttaaggaaagtggccacagcatgtattcatttattcacaaatatttagtgtctctgtgcagggcatgattttaggcctggttatcatttaatcaagagaaaaaatgcctactctcctgatgcttacagtctgataggaaagacagacaataaaaatagtagtattatgatattatataatatgcattcctgttacctattgctggctgggtaacaatcccaaaataaaactacctttttattagcggtcattctatgcattgactgggctcagcaggcagctcttctgctccatctgacatggtctgtggctgttgtcatctggaggctcaccctcattcaagaggtttctctcataaggccgcagtcagtgctgtcaacagctggcagccttctaggactactggcacggagccacccagggatcccataccacatcttctgtatccattcatctgttggacatctgggctctttccatagtttagctattgtggacattgctgctataaacactggagtgcaggtgccccttcagatcactacgtttgtatctttggggtagatacctagttatgcaattgttgggttgtaaggtaggtctattttcaactttctgaggaacctactgttttctagagtggctgtaccgactgtactcccaccaacagtactctctttctccacatcagcaccaacacttattgtttcttgacttgttaattttagtcattctgaccagtgtgaggtatatctcattgtggttttgattaaaaaattcatttaatacacctaacctaccaaacacagtagctaagtctagcctaccttaaacacacactcagaacacttacgttagcttagagttgggcaaaattatctcacacaaagccaattttataataaagtgttgaggggcatttggctggctcaaccagaacacgggactcttattcttggggttgtgaatttgagccccatgttgggtgtagagattacttatataaacaaaaactttttagggactgctgggtggctcagcagttgagcatctgcctttggctcagggcatgatcctagggtcttgggattgagtcccgcatcaggtccctgtggggagcctgcttctccctctgcctatatctctgccctctgtgtctctcataaataaataaaatcttaaaaaaaaaaaaaactttttaaaaagtgttggataaaatatgcaacttcttgaatactgtattgaaagtgaaaagcaagataattgtatgggtacagaattggtgtaagtgtattggttgtttaccctcacagttacatgtctgactgggagctgtgactcactgctgctgcccagaatcacaagagtactatactacatcactagcctgggaaaagatcaaaattcaaaatctgaattacactttctactgaatgtgtacagccaaaaaaaattgcaagtcaaaccgttgtaaattggggaccatctgtatactagcaatgcacaagtggaagttgacaaaaccctgataaaagaaatcaaagaactaaataatgaaagatattccatattcatgggtaggaagacttgatattgccaaaatgtcagttcttcccaacttggtctttaaattcaactcgatcccattcaaaatctcaagtttttttctttttttaagatcttatttattcatgagagacagaataatcagagacatagcagagggagaagcagagctccctgcagggagcctgacacaggactcaatcccaggaacccaagacctgagccaaaggcagacattcaaccaagccacccaggcgcccctcagcaagttattttgtggataacaaggtgactctgaagtttatgtggagaggcaaaagagccagaatagccagtctaccataagaacacagaattacgagaactgatactacctgacttcaagacttactataaagctatagtaatcaagacagtgtatacagtactggtgaaaaaagaagtatatcaatggaagagaacagaaaatccagaaacagacccacataaatatagtcaacttattttgacatgaaagcaagggccatcataaaatggagaaaaggtaatctgttaataaacagtgctagagggatccctgggtggcgcagcggtttggcgcctgcctttggcccagggcgcgatcctggagacccgggatcgaatcccacgtcaggctcccggtgcatggagcctgcttctccctctgcctgtgtctctgcctctctctctctctctttgtgactatcataaataaataaaaaaaaaaaaaaaaaaaaaaaaaaaccgtgctagaacaattgctggacaaccacatgcaaaaaaaaaaaaaaaaaaaaaagtgaaatgagaaagctctcttgaaaggttactgtgaaggtcacctatgacaaaaacaaaaactgtccagcagattcaatggatttcaatattcttaaggacccacctccacaagtttcatatagagggtacagtaattcaggtcagtcacctcagtcctgccaattcactgggtaggatgcagtaccagcacattggcctcagggagctctgcagcccttcaaccttgtggatgatgtttctcatactcctgtgcttctctctggctgaaaacaggctcctcctccagaagccagacccaactctcatttgaatgtctgtattaaacataaaagccggtagatccctgggtggctcagcggtttagtgcctgccttcagcccagggcatgattctggagccctgggattgagtcccacatcaggctcctacatggagcctgcttttccctctgcctgtgtctctgcctctctctctctgtctctcataaataaataaaatcttaaaaaagaacacctttaaaaaaataataataaataaataaacataaagccaggatccctgggtggccagcggtttggcgcctgcctttggcccagggtgcgatcccggatcccacatcaggctcccggtgcatggagcctgcttctccctctcctctgcctgtgtctctgcctctctctctctctctgtgtgactatcataaatacataaaaatttttaaaaaataaacataaagccttttcatataaagggggggaaaaagactatcaatacactatgacaggttccctgctcagcagcggggagtctgcttctccttctgtcccttcccacccccacgctcattctctcttaaatgattattcttttctaaagagacactgtgagatacccagaagtaaaaaaaaaaaaaaatatatatatatacacacagtaacacaaaattaggtaatctggcttacagatatttaccttcattccttcatttccatgattatgagatccaaaactcattcaatagaattgaactgactcaaatagtctttcccttataccaattctcatagatgaacatccaaattcagactctattttagagttcaggaatatctactgtaaattattggaggttaatccattttagagctcataacctaaaatagaaaaactcagatggtagaaatccctacttttcaggaaggatactttattattagtgcatcatttagattgtcctacagtagtctcatctgctgtattttcttaaaggctacaaatcttgcttttaatttatagatggtggttagtttagcttcaatattagttgcttatagtctctttaaccttatactggatagtttcccacattagtttgggcttcttatgttccaataactaatactttaagccatacatatacaagtcaaatatgaatcatacataaccctatcgctaagaaacatgaagcttctcatcccccaaaatcctaccaaagttcttggttctttttccactgaaaagtgagaacatgggatgcctggaaggctcagtggttgagcatctgcctttaactcagggcatgatcctggggtccaggatcaagtcccacattgagctccctgcatggagcctgcttctccctctgcctatatctctgcctctccatctctcgtgaataaataaataaaaatctttaaaaagtgataacatgtcagctaatggagaatgtgaggtcttggtggttcaactctccctgccccaagtttgagagccactgacctccaggaaggtcacccttcccagttcctggatctccatgctatggcagaggccatcttcccaccaaattcagcatgatgtcacaaaaacagtgagctggttagcaactgtccactctccagccatcttgtttcctgagatacatttttctgagggcctacctttctcccagatgatcaaaactgggaccatccactcccttctgagccacctctacacataaggacggaactatacactccagccacaggacatttcagaatatactgcaaaaaggttaacacatgtacacaaggctcacatcatacatctgttttactacagatttatagtgagggctcacaagttcaacaaagctcaaaatcgattactagtggtcacattcttttcaaaagccaagggtacaatgacacaacagtgctcaaaactactaaagaatgcaaatccctacaacatgcaatgcacaacagacaagaaatgtcattctgggccagcaaaaagagaaacaggaaataaaggggtaatcattacttcagccaagtcaatagatctgagcttttcaggtagacctgggaatgaattctccaggctttcccaccaaccagctgcagaccttgagcgtatctggcccagagagggactaagagatacttgctgaatgagcccttctgattgcaatggcatattagataaagggctagtatccaagatctataaagaacttattaaaactcaacagcaaagaaacaatccaatcatgaaatgggcaaagacatgaacagaaatttcaccaaagaagacatacacatggccaacaagcacatgagaaaatgctccgcatcactggccatcagggaaatacaaatcaaaaccacaagataaccacctcacacctgtgagaacagtgaaaacaagacaggaaataacaaatgttggagaggatgtggagaaaggggaaccctcttgcactgttggtgggaatgtgaactggtgcagccactctggaaaactgtgtggaggctcctcatcagagttaaaaatagaactgccctacgacccagcagttgccctgctggggatttaccccaaagatacagatgcagtgaaacggcaggatacctacaccccaatgtttagagcagcaatgtccacaatagccaaactgtggaaggagcctcggtgtccatcaaaagatgaacggatagagatgtggtctctatatacaatggattattacttggccaccagaaaggacaaatacccaccatttgcctcaatgtggatggaactggagggtatcatgctgagtgaagttaagtcaattggaggacaatcatatggtttcattcattcagggaatataaaaaatagtgaaagggactataggggaaaggaggcaaaaagtgggaaatatcagtgaggggtacagaacatgagagactcctaactaacgaacaagggatagtggaaggggaggcgggcgggggaatggggtgactgggttacgggcactgagaggggcacttgaccagatgacgcactgggtgttacagtgttatgttggcaaattactctaactaaaaaaatatacgaaaaaaaaacaaaacaccaaaaacccttctgagccagtttccagcacaccagcaatgtaacttttaccttgcagaactgagaaaggagaacagtttttagagtgttataaagcaagttctgcctcaactggcaggaactttttcacatcagtcttgtctagggccaggttgggagggaggttaagttaggggcagggccctgggcagggccagtcactgaagcgaggccaaggcctggagggaaggagccagttcctggtggctgttgggcagttcagacagctccctgctacaccagccatggtactccctctgccctggctctcctgttgctgccgtcgcctgctcctgccttcctggcccctggccccccagagctcctggaggtgctgctcccagagccccaaggcgagcacaaaagagcagaccagctccacaagcagtgggaagaggtcacccccaagggtaagtggcaccaaaagtagggagacagaggggtggaggaatccctttaatcttatattcacaggcctgttccaaatagataccaaccccaacccagtccttggactagtcccaactcccagatccccagcagtttccccacacgccctacacctcgagggctctctccccacagccctccctccctgcagagtccaagaagtccttgaccaggaatttcccctcctctaacagttaattatttcttggtggggggagggacagccagtcctctcctctccatatccttccttgcacaaggagtccagtttaacccctgagccgcaaactgccccccacaggcctatgcctaagaccagaagctaccctcgcttcacagtacagagaaccttattaataaaagggggtggaaatgtgagaggcacaacaccggacttccagcaagcctcagcttcctgccctggctgatgctccctcccctctgcccccctcattcagggtcccaggccccgccccacagctgagctggcccaagctgaggagttgctggagcagcagctggagctgtaccaggctcttctggaagggcaagaaggggcttgggaagcccaggccctggtgctcaagatccagaagctgaaggaacagatgaggagacaccgggagagcctaggagacgcctaaactttccatcagttcccattttaccttccaacactggaaacactacacaccacccacactggggcctttgggtcagaaacatcccagcccctcctaggccactgaaaaaaaaaaaaaaaaaaaaaagggaagacactttcacaaagggcagaaattgaagtagcaaggagcaatggcttctgcagtcttagtcacatccccctccccccctctgatccctcccaactgacctgagccccacagcagggcacacagtccttataagaatgaatatacactgaatcatgacctaatctcaccccaaacccaataaaggcatggagcacttacagacaccacagacgcatgtgttttttagttttgttaaaaaaaaaaaaaaaatttccgacaattcaggaaacagggattcaggagtggtggtgatgcaaaagggggaagccatggggtggggggtgggggttgtcacgggtaggtggcagtagtgtctccttcaccccatgtctactgtcgtctcctgaagagggacagactgtcacattccaaaatgggtgggtaagtcctctaccgcgtctgttcaactggagagaaaacatggcacaattacaagacatggaaaaggcaaggctggcagaaaacatgcccccaccccccactacatgcagatgtctgtagtttgtgggtgcaaaggatagactgggggtagggaaaaataaactagcttgttaagaaaagagacatacagatcaactaaacatcccagcaggggcatcaagatccaaaggacataattaagtgcctgttacacactagaggctctttgtgtacatgatgggatttaagacaaacacactaaggaacaaggagactgaagagttgagccagtttcttaagatccatactcactgtaagaggaaatgtctatctcatctggcagctcactaatattgacttcaaagcgatcctgcacatcattgaggatcttggcatcattttcatctgatacaaatgtgatggccaagcccttggtgccaaaccggcctgctcgggccacctggaaggagacagaggatagtcctgggagatcccgaagtaggaagacatccaaaaagaagggagaggctatcaggtatgaagatacaaaatcagggggaggggacactggaatgcacgtgtgggtgtggagcttacccgatgcaggtaagtgtcagaatcctcaggcatgtcatagttgaaggcaatgttcacccgctcaatgtccatgcctcggccaaataggttggtagccacaagaattcgtcgttgaaaatctttaaactgctgataccgagaaagccttcgtgagaaaggaaattagaaaaatactgagtcccttcgcttcaacggtctcttttccttcccaaggacacaaaacatctttccatttctgacttacctctcctcctggggcatccctcggtggatggcaatggctgggaagttctgctctaccagcagctgggcgagggcaatgcaacgctgcacagacttcacaaagatcaccacctgggtgtgtgacagttgggggacatgggtccatgtgggataagtgagagattaagtgtgagaagagttttcagtaactactcttttactcttcctgaaacttctccaatccccattacatattcctcttctgttctaaatacaacttagcctttctcactcagttctgatttttcctgagcagacatgctgaagagaagatacagagaaaagtaactaaaactaccagatatgttagggagacaaggatgaagctaatggtaaaaatgaaagtggtaaaaatttaaagtgtggaaaaaaaaaatttaaagtgtggagagtagtttctgctcatcaaaaacatcaaacatatgcaatttaccttaattttagaaagtttttggtgcaaacgaaccacagcaggtaaagtagtggaacatttcttctcagtaaacagtacaagaaaaaacaaattttaaaaacctaagaaacccaagatattttggaacttttacaagtttatgaaatcctctcaaggattttgagatttttctttactcaatacctggctgtgacagccaaagaacagaacagcagctcccatcttgttcacactcagcaccaaaggcacttaaattctcatttaaaagaatttcatttgaaggtaatttccccactgttctcgctcacatcacctatgtcatatcctcaacaaaaaggtacttaaccaggtttctgctacagttggagacgtgctcatccccctactggactttgaacaactgacctgattgaactcaaggacatcgagaaggtcaaagagcttccggttcttctcgttgtccttcagtttcacgtagtactgctgcaacccatgcagcgtcagcttcgtctcatcatccacgaagatctccattggctgggggagggaggggggagtagggggggaacgggaggagggcagagtgggggggttaaacctgggggggtggaggaacttgatctccaaaacaccccattgggggatgggaaaagagaagactgaaaaccccaccacacccccaaaaatatcctcattttaatgtggtctcttccacgttagctctaatttccttcctagcagttgttttaagattgcccaagtatcacgggaaggtaacctggcaaggagtttgaaaaggagcagtgagaccacccaatggcaagatgccatgacctcaaaaggaggtagcagaggaaagaaaacaatgggagaggatccccaaagggaaaatgtaatccaaacacctgggaattggtggacatggtgactcgaggtcaggaattccaccactattggttgtaaaaatagaggggaagacagggattgctccatttgagtattctcccaactaagagaatcagggggcacctgggtggctcaatcggttaggcgtctgccttcggctcaggtcataatctcagggtcctaggatcaagctccgagtcaggctccctcctcagtggggatctgcttctccctctccctctgctcctccacctgcttgtgcttgctctctctcaaatcaatacataaaatattaaggaaaaaaccaaacaactaagagaatcagatccacatcaggagggtggattatctgtcaagatcagaatgctaaaatgaacatagtcaaaaataccatgaaaagttactcaggatgagtaacaactcgccctcagaccacaagggaatagttcagatggcactggtctctgaactaggagtcaaatcaactagtgttacatggacagtaccaataaatggtgttaagaaacaaattcagagcagcagatatacaaccatcttgtaatatatatatgtatatatatatatatatacacacatatatatgtatatatgtatatacacacacatacacacacgcacgcacacataaaaccctttaaggggaggaagatagcaaaaaaaaaaacaaactgacacaagactcaactcctgagtccaagtttcctagcactcttcactaacctggggacataattaacatgaacacccagggcccaaggtttcaggaaaggatgagtggcacgggagagaaccagaagcccaatcccagaaagcaggcttgcaaaagcaggcttttcaaaatgaagcttcatggcctccttcaaatctagccccaagtataactaaaggtaactgacatcccacgggaaggagcagtacaggataagaaagaatacactgcactgtttatacaatagggcccgtctagtgccaaaccctaacacccacctggttacatccaagtggagctcctcacattacttttcccatatccctctccttggagtattaaaaaattgttttaaaaaagaaaaaaaactaccccccgtttcaggacacccctccccccaacacatatggggaaaaacagggagcacggcacgccttggattcaggaaaaaaaccgggaacagaaaaagaggctggtttggtcctcagcttcctggtcaggtttccccgcggcctccgctgccgccatccaccgctgggtgccgtctgcatttcccccgccgttccatggtgcttctccgctgccggctcacatcagccgagattccggatgggtgcgaggaggtatggacggaaggagtaagggatcggggactgaggtgccaaaggcccccacccctggaggtggggagggagcggattcatttgtgctgtttgctcttcttttggacatgccctgccatctgtctgtccctctcttgctctcctgccaccggggggttgagttttggggagcagaaggctccaactgtctgctccatgccaccttgagggtgcgtggctgtaaaggggtatgtaggagacgatgggtgggtagtagggcagaaaatcctgccctcccccaaaaaggaagaagaggttcaaaaatgctgtgatgaaaaaaaaaaaaaaaaaaaaaggtcgaacactacccgctctcaagttaacccgaccaagtcttccggagtttccctggcacccgcgcagaccctaacactagctgtctctgcctctgtgtgtctcttcaaggagtcatcactcccagatgggcacgtgcccccttcttggcatttgaaggacaagggagtctggaggaagagggcgcagaaggggaggaggcagtgggcggggagtggagggagagaaggtagaagggtatttacgtcttgcatgaacttgcggcagacaggacggatctctttgctcaaggtagcactgaacatcatgacctgcttctcatggggggtcatgcgaaaaatttcctggacatcccgacgcatgtctacaagaaaaaggaaaaaaatcctagaaggaaagaaggaaatgtcatagacaaagaccggagacagcctccccagtgaggtgaaactgctggaaacaggtaagcaagagccatttcccacaaagatttgtctcaggtactctatttacacgaaccaccgtaaaatcacatccattgcagtaacacatggaaaatttcaaataaagacctagaaccaaatttcagcactatgtgttttagccaggcaagaagataatgaaactccaaatctcacaagtatgatatggagatgaagtctactgcagaggctcacaaacctaagacccttgagagatgctttacaaggcccttctccctactttctccccacaccccaactgtctacaaatactgcacacataattatattctagttgtcaaagtctagtccatgcttcctctggatcactgtcctatccagccaggcaaataagacctctacccagagcccatcttatagttcaccatctaaaataaccgaagatcacttggaactacttatccctggggctaagtccatccccactccctcatttattaaatgtgagttccaattttccactcatttattaaatgtgagttacaattttcctttcttgtggaacactgaattacagaaaatcccataaactctccacattaatcctagcacttaagtctattcagttacaaattctgatatatgtgcaggggatgccagaaagtaaatggtcttcctccttcagtttatctccccagtttatctacccagcataagaatctataaaggcaaagaacagtggtgtgactgatgtctaaaaaatcagcaaagttaatcccctcaaagaaaaaagaactctccatcacagaaagaaaggacaaaacacccttccccttgatcaccaaggttgcttaaaaagcctaacaaaaaccaacaggagagccagagccatcagtcatgggtgatagattaagagtcgtcctggcactaaagtgctcctctatcaaataaacatcatttggctctaaagagcaactcccagatcactagcttcaccccagcactgtcactcaccgagctgttcaagcatcttatcacattcatccaagataaagtgtttaatgtgtttgagattgaggctcttatttcgagccagggcgaggatgcggccaggggtccccacaacaatatgcgggcaattcttcttcagcacctcttcatccttcttgatagacagaccaccaaaaaacaccgcgacctgtattaacccaggagaaaatacggtctcacaaggaaagagtccaatctccccagttcccaccctttaaatttaatctacatgaattcttagaacatttcaaagctaaaaggaacatcaaaggtcagcaaatctaaaattcttattacgtttcccaaacactgaagctaagaaacaaaagtgtcttgcctaaagttatgtggctaatcaaggtagttaggactagcattcttctgacttaatctaataatcttccttcccacagtgctatggccagacttccaagaatgaggaatgcaaggggtgcctggctggcttagtcagtagagcatgtgactcttgatcatgagtttgagcccttcgttgggtgtagattatacataaaaaacttgaaaaaaaaaaaaagaggacagcaagaaatcaccagagtgcaaagtaccacaaaatgcctcatagaacatcaaattttcctaaactctgatttttctttttttagtaggctccatgcccagtgtggaacccaatcagggtgtgaactcacaacccagaaatcaagacctgagccaagatcaagagtcggatgctcaaccacctaagccatccaagtgcttctgaactcagattttcaaatgcctttttgcacaaaccctatcaaattattgatttaagctacacatactactccgtattaaaaacgttacgggggatccctgggtggcgcagcggtttggcgcctgcctttggcccagggcgtgatcctggagacccgggatcgaatcccacatcaggctcccagtgcatggagcctgcttctccctctgcctgtgtctctgcctctctctctctctctgtgactatcataaataaatttaaaaagttaaaaaaaaaaaaaaaaaaaaaaaaagttacagaagtatttgttgagaatctgagccttattattatagtatcgaataacaccagaaactgctttccagcttcaaagaatgaaaaatcaattacaagatcagactgttatgataaaactaaaagcactaattatgggacaaccaagtctgctgaagaacaggaaatatacagtgtatcaactctgaacaattcttgccaaaaatgtttaacttaaattagttgagctttcaaatacatatttgagttaaaggaaatactgaaaaaaaaaaaaaaaaaaacaaaaagcaagttaataccataagggagtaaccagacaaatccagaggtaggatattatgtaaaactagccaaccttgggcagccctcgtggctcagcgggtttagtgccgggtttagcgccgcctctagcgccgcctccagcccagggcgtgatcccagagacctgggatcaagtcccacatcaggctccctgcatggagcctgcttctccctctgcctgtgtctctgcctctctctgtgtctctatgaataaataaataaaatgttaaaaaaaaaaaaaaactagcccaacctcagacaagtcactttagcacaattttaaagaaaagtaagaaaatgtcacgacaatttgatcttaacaccaaaaatattgttttggggtgcccggttggctcagttggaagagcatgtgactctcgatctcaaggttttgagtttaagccccatcctggatgtagagattaaaaaaaactaataaactttaaaaaaaatctcttttgagcagcataatctgctaaattggacctacagaggtcaaaatacaatcctcactcactaatgagcccaacaataaatgtttcaatggtcataacagtggaaaccattttctggttttccactttttagaatcaataggccatcgagcctgctcaatgaaaggacataaaagaaatgctaaggatagctacaacataaggagatatgacacttaaattattgttaaagaattaatcttcaaatataaaaaaaaatcgcaaccaatctctcatgaaaagaaataaaaaacactcataaggttataaaacgagagaatagtacctaatacttggtgtcacagaccataacgaaaaaaaaaaggttaacaaatgattaccttctatgaagttcgattagaggtaagagaacacaaatcttttcatcatgaaccttctattacttcagcatatttactgcatgtttacccccacattgttatttattactactttggttcttaagactacttccaatttaggggtgcccgggtggcatagtccgctaagtgtcagctcaggtcccaatcttaggggtcctgggatatagccccatgtgggactccctgcttagagggggagtctgcttctccctctccctagacctccctccccacctgaccccatcccgttcgtgtgtgtttgctcgcttaaataaaatcttttttaagaattactatttttagtttagggctaggactcaacacatgagtaacaggagaatatcacaacaatccaaacaaaagtactgtttttcaccacatcctagtcaggaaggtaggaggttatacacatcagcgcttctcaaactccaattacctgaagattgtattaaaatgcatgtttaaaaaataaattaaataaataaataaataaataaataaaataaaataaaataaaacaaaataaaataaaatgcatgtttatactcagttaggtctgggatggtacccatataatcagcatttccatcaggcttccaaatgatgctctaactagaggtctgggaaccatactatgaaaatcaagatcatatatggaaaaccgcccaaacctcgtctgttgtggcccctaaatatctttcaattttctgccattttaaagaatcctcaaaattcacacaccacacacttaaagagatattttgaagcttccagctttctcttgcacacatcctagaattctcaaactgtcaaccaaagcacaatgaaatcattcaaagtcagtataaaaaagtagtaaacccaagtgtagtactgtggtaaacatcctccagaacccattccatgcagtcttccgctgctagctatattaacatgatgtgttaagaacaaactaaagcttctccaaaattggaatatagtgaacatatcagaaattgcaatgtgtattcaagtaaaccatagaatgtaaatctcctgcacaccaaagtttgcagaaactgaccagctattacaagtaaatgaccttcatataaagttaattaatcatctgaaaaaatgaagactgctggtctacaagtcttcaatgtctccaactccccacactctcccaggtttatcttggcttaccttgacattgggcatgtatttagagaagcgctcatactccttgctgatctgaaatgccaactcccgggtgtgacacatcaccagcacagacaccttgggtggaggggggagtacatggagataaacagtatatacttactatcccctctggggaaccaactgtcacaaaagcacatctgacagatcataaattacttcaattctgagatctaaaccattaaccccatgattactatgtaatatcccccagggccatcagtcaaaggtgacagagttcatcttagccacaaacactcatggctctaaaagcatcacacagctgagacaaaacacccttctccaatattcctaaccaaaaatgtcttccatagcactctccccaagtgtacctgtccagtaactggctccaactgttgtagtgtggccagcacaaacactgctgtctttcccatccctgacttggcctggcataggacatccattcccagaatggcctgagggatgcactcatgctggactagaagcagggggagaaaaaagataaattagacttcagtctccagataactccacaaccttttttcaccatgtcaaacccatttcccaccccttcttaaatggttatcaatttccagaccccttctacctctctgctccctcagatttatctcaaaaccagatagaccttcctagttccttctagctttagcctcctccaactccagtgccctccccccaccccacaaactgcaaacaaccctcttgcacctaccaacagttcacctttggtgcttctgactctgtcccgactttccttgatctgtaacaatccaggacatgtgactgcctgccccaagccatttctcctacttagcttcccttgctttaaggctacaaaaccttgcaactctgaaggggttggtagctgatccagaagccacccattttagaccagctatgaagatttccagagaccagaggtggcctggcccaacagggagagactaaaggtccaaccagtcctctcaggaaattcaaatttagaaacctaaacaacaaaattaataacaagtagacaagaataaatgctggtcacaagcacaaacctctaagttgcttttaggtcactagccttttcatgttatcgtgaacaaaaaaaccaatctatataaatctttcctactgctgaaatagtttttgacctttatttcctaaagtagcctaaataagaacgttattacattaagtgactgtttaacacacctttttcttgtatccttagagagcctaatgaacactatgacctgcagaaaatttaccttctgatggatgttcaaagccacagtcaacaatggcccggagcaactctggcttcagcaggaagtcacgaaagccagagctgtggatggagacgtaggaacccttgacatccttcttggcaggggcctcagacccgtctcccccagctgctgtctctacttcatcttcttcatagtccaagagttcattgtccacatcattttctgccataactgggccggcagggggagaaggagatgggtctctggatgggttcacgcagaataagtaaaaacagaggaggagagtgggggctggagcaacagttaaaaaaaaaaaaataccctagtttgtgatagaagagctaggaaaaaaatagatggaggacttattagtcaggagcagagccttcgcccttcttttccatccccacactcttcccactttccctaaactgtgacccctttacctggggataaaactaacaggaacacaaaacataaaagcaacagcaaacataacacagtggtcccaagtgaggtggttgagacacaacttttcaacaaaattaggatcagaatagcattaagcaggaagtaggaaggggacaaccagcccatgaattcctcatctgtaagcaacagtaatgaagaaaaacgggtaacgaaaagcaaagtaggacaacggagtgaagaatggagatgacaaggtaagtgctgaaaatcctcacaggacctctctgctttcctggtaatctccctaacaaagcagccatcagttactggtgatagattaaggtcatcctagcgcaaagcgctcactcctcgaaataacatcatgtggctgccatccacctcccactcctcaggaacctcccggtgtctaaggggtccccgtgtaacgtgggggaggggatacagaagacgtggctgggacgggaaagtactcgtctcttctccatagaacgagagagagacagcattcgctccagctctaccaggaactatagcaaagggtcttctgttactcctcagatcagactcctctccgataaccgacatgacaccacgcatgaacaagtggaaaatgttccaagtgatggttggtgagctcacagaagggtccaaccaggctcagtagtcggctcctcctccagttcccaccttgggccattaagaggacccacagaagagaggaaaagtgaaaggagccccgccctccgcaaatgccctggactagaggacatctacgccgcctctcaccatagctagggcctcggataaacgagaagcccaagcgaagaagcagtgagcgaagggaacacaatggcgctggggccaccatcttggattgggccccctagcatcgctacccccccccccagaaactcttaagagctctgaaaagggatgcaagcaatagaaataatgacccaactaggccccaaggaccagactatagcctgtggaaggggtatcaggagtccagggaacaggatggccgcaaagaaacgcagatggaggcggatgataccgaaggccaaagcttacctgagcaaggcgagcgcatatggcggcggcagcagcgacgaaagagggactctgtcttcacttcctgttttcgccttctctctcccaggcgcctcgccttcccgcctgccagcacgcaggcgcaggagaccggaagaagaccctttcagattcgagagttccgcgcgctccggggttgcctttagaaaacgcctgtgtgagtttttttttttttaaaggcacttctaactccttcgctactgcaagtaacaaaagccttgaaggaaactagcatcgtctcccactgttacctcttttctctgtcctcgtccactccgcgtccctcacctcttccctcgggttcttgccggcaggtcttctctctggtcacccctccgtgggcgccccgctcggcaacaggctggcggggctgagagttcccacggggtcctccgcccggtagtcaaggtgaccggcgcgtcctcgctggagctagtctgaccccagctgaggggagggagtgagccggcgctgcgcccgcgggtcctcccctaccccttccccagcggtggagacggtgggcggtgtcttcccaaaataatttggccggtgtaattgactgatgggcaggaaattcgagtcaagaaggtgttctgcaaccaacgggttggatcgtctccaggtgttaaaaataaatggtaggactcgagggttacgcagtatcccataaatattatttcaatcagaatgtcgccaaccccgcctccagcaggccagccccattattcaccttgaattttatcctgaatgaaaccttcgatacccccgtctttgatatgctagataagtcagatgtgatgtccacaaaaatgacagcaaacgtttggcccttgaccacagttaatcatctaacactaaggaataggtaccattagtcccagcctgtaacaagcaaacgaagcagcatgtccaaagtaacaaacagctagtaagctgacaaagccaggatacaaataccttttgttctctattatatcctgcctctctgctgaaggagtctggttaatatttacactgtggattacctcattggttcaagtcttcggtctggtgaagcaggcattgttttctgagagaagacaccgtgtccaagagaacggtgacccaagaatcgtgtggtagaagggcggtttttccaaccctaagtatccgtcgattcaacagtatttatccactgcctaccttatgtcgagtgctaacctaggatctggagactcagtgaacagccctgtcatcacagagtttccactccagggaagaaaacaaataagcaaatgtcaagtagtaataaatgtcattaagaaaaataaagaggggatccctgggtggcgctgcggtttggcgcctgcctttggcccagggcgcgatcctggagaccgggatcgaatcccacgtcgggctcccggtgcatggagcctgcttctccctctgcctgtgtctctgcctctctctctctctctgtgtgagagataaaaattaaagaaagaaagaaagaaaaataaagataaggggcaaagagcgcttgttcggacactgtagcttttcactacagttgccatctatagttctcaggttcccaatgagtaaccacatgtttctcactttggaaaaataacacaccagttccttctgtttttccaacaagttttaaagaacaacccttttgggtatttggggaatacataaataagacacgagagagggtgtctgaaaatgagaaatgatgaagtaaaaggaagctgcttccacacacaaattgatttgtccatagttttttattgacactttttcagtgttacataggggaaggtattgaggatgtagaaaggaaagccatgcatacaagggaatgcagcatcactttagatctcaggaaagtgagcatctggtgggtctttggggaaattgggaaagaggaaatccaataaagagaaagaccaacttagagacaaaagaaagactaagaaatgtaacatcttcctggaaccataatagagaggctaaactaggtcttcattctttttcatggaccatatagtctctgggaaaagagaggtgggaaaaactaattcttcagagaattactagttcacaatgaacgagtagaattagagagccattgacaaacgtgaggaaatagctgtgtttaggttttggcaggtgggcagggagtggtaataatatcatagggctgccatttaatgaatcacaactattacatgccagagaccatgctacgcccgccctttacagagtgattcttaagcattgcagcaaccccatgaggtaggtatcatcattattgttatcatcatcattagcattccaatcttgtagaggaggacactggactacaggttaagaagcttatcctgtcccagcaagtggcagggttaggaaaaggaccaaagcctgccaggctctgaagcccaagtgctttacatatccctacttctccatgctgcaaatttcaaagaggggtcgggtgagggtgacttgggagtttacaagttcccattgaaggttaaagaacaataagattcagatctgagcaagttatcttgctaaatttcacagaattattggatcttgcccctagaatttcccgggaatggagagaaaatgagaaagaaccagtgaagatggtgggaggtaattttgattgggggatttctttgaggaagggacctggaagggaagagtcaggccctgcggtggatcctagacagcaatccggtagttgggatggacctggggcctgacgtcgcagaccatgccaagaagctgggccaagacgcgttcacggtttctctgctgggagctctgcatgccctgcacctggcgtctggtagcctgttccacctcagccgacaggttcccctgggagcccatggcctggggggattgggaaagagatggaagagagaaaggcaaaagcagaaaacagagaaagaagggtccaggcatgtggagggaaagattctggagcaaccaggaagaaaagcccttgccaaaaccatccccatcccatcaaaatatccagacaccaaagaaagcaacacaattccctttcctctgagacttgacatgcaactgcatccaaaaacagtaaaatcccctctaccttaccacacataaccgtaaaactctgccttccaccccaaatgacatcatattccatgtagacagtggcaatcctcccccaagttgttcaattctttcaaaactctcagattctcttatcacacatctttatcaataatgtggtccttgctaagggtccctttcagccctttatcatgttattttcttgtagagccaccctgtacacaccttatcatatacacccaccaccttgcaccttggggtcccatctcaactttcccacaactcaccgcctgttgcttgctctggaactcctgctctcgttctctgcggtacagctccacttccatctgtgcctcctcctttgcctgcttcagacgccgggccttccctggaagcagaagaaaggagggggggtggggatagaccccctaacaccatccatttcttccctcccaatcagccatcccagtcccagctttctcccaccagccttagattttcccagggactcatatgtttgctgtccccccccaccccaattttctttccagactccaaagggagaggagactcactctttctggcatctgccaccttctcagccgcccgtttctcagcttgcaggagctgctggataccctgggactgactggccatttctgtggttatggctaatgctgttttggatgctacagaggtaccaggtggctccccccaccaccactacacatgcaccctccgaagtcctccccttccaccagctccttgctgcagtcctccactacccctgggtcttagtgctcccctgttctgctcagcctcctgcaccaggtgtctcccccaaattgatcctcccatggatggctggtgtcttctccctctcgcaccggcagtacctaggaggaccacctgggggcagcagaggccaggcccaacgctgcccgccgcgggcacagcaggtgccgcgttttcgccgtcgaacatccaggaatgggagcaggggcagagaagagtgagaagggggcatagaggggttgaagatggggtgacaagtaagaaagtgtgtcttgggagaagaggatgctggctttctctgaattcttcctatttgtcttccttttttcgctctccctcccgtttccttctctctttttttctacatatttcccaagtctaatttatgcatccatttcaatgccttctcgtacggttgtttatgtctttcacacatgccttttttttatctgtccctgttcttggcttcgctgtggcttgagttttagtgttgcgttttcactgtaatttttaatcttttctcctccgttttctctcttttcgtctatcgctgaaccgtctcctctcttcccggttgggggaggggaggatacattaagtcgctgtgtccccccctcccgtgctcggctcctcttccttgtctatggtccagtcttccgggttcaggcggacccttatcttaagttcccaagtttccccccgaggccagactgaggaaacacacacacacacgcccgccccctcggagagagaggacatccggtagcgcgttcccttccggccttacctgcgtctcggcttgcgccatttccggccgcctagagcgtcccgcccttcccgcctccttcctcggagcatcttaaacccaggcctcgggcctgctgctccgcgggtactgagggggcggggggcaggtctgatgaataacccctccccccaggccccagcgggagaagcctccacatctgtctgccgggtacatcgtgttccatttctagatcgttatttgaaattatctgtgactttaaattcagggttttgttgataacaattttccccatcatttttcattcgcctttttcaaagtcttattaaatattacctgggctcgtgagcctcaaagcaattatctgtccttttctcaaattttacgttaaaaaatctgtgccccgagcccccttcaggattttcttcagacccacggtgtggtaaaggggtgagagtgggagaggcccgattcctgccgatggggaggggcgcggggaggggcggggatgtcagagccggcgggaccctgaccactgcctttcgtcctccgtgcgcagcccaagacgtccatggcctccgggtcccgccgccaacgccgagagcgtcgcttccgtcgttacctgtccgcggggcggctggtccgggcccaggccctcctccagcgacacccaggcctcgatgtcgacgccgggcagcccccacccctgcaccgggcctgtgcccgccacgacgccccggcgctgtgcttgctgctccggctgggggcggaccctgcccaccaggaccgccacggggacacggcgctgcacgccgctgcgcgccagggcccggacggtgagtctgcctgctggggaacaaggtcgtgacccggggacatgacggggagtctgcctgctggggagcaaggtcgtggctggggacagggcgctgcacaccactgcgcgccagggcccggacggtgggtttgcctgctggggaacaaggccacgagcgagcccctaactgacggggaggagatgaaggccaatcgttgaaaaatcggctacttctatctaggaaggtagttgaccccattggcatgtggcagtcgtttctgactttacatcactgagctaccattgtcccaagagcccagcattctcaaaacagcaacttcaaatttcccatctttctagatgagttgcaaatttgtcacttgactggtgttcccctacagtgcaaaaagtgagagagagggtaggttctgcagttaggttgcctgggttcagatcccagtgccacacttagctgtgtattcttgagcgacttactaaacttctgaggcttagtttgccctcgtatactattaacagcagctcttgctgtgtatgtgccggtacttctcacaaaacagctcatttaatcgtcacaataagtactaatattatccctggtttctcagatgagaaaacagcacagaggggatccctgggtggcgcagtggtttggcgcctgcctttgacccagggcacgatcctggagacccgggatcaagtcccacatcgggctccgggtgcatggagcctgcttctccctctgcctgtgtctctgcctctctctctctctctctctgtgactatcataaataaaaaaaaaagaaaagaaaagaaaagaaaacagcacagagaagttaagtaattggccaaagtcacccagtcacaaagtggtagagcagggattagaacccaggcagcctggctagaccatctgtactcttgaggactgttgtatacattataggattattcagtcatagtgcccacgttcacagcgcccatgccatcacatatgtttagagaatcacctgacacaacgtgtaattagagcacctgacatgtgattagcactcagtagatgctggccagtgttgttcctgttatcaacagatccataccctttaccctcagttctacaacaactaaaaaacgggatccctgggtggcgcagtggtttggcgcctgcctttggcccagggcgcaatcctggagacccaggatcgaatcccacatcgggctcccggtgcatggagcctgcttctccctctgcctgtgtctctgcctctctctgtgtgtgtgtgtgtgtgtgtgactatcataaattaaaaaaaaaaaaaaaaaaaaacattcaaaacaactaaaaaacagcactaagagccaaacatttttctcatcagtctgccagcagacccgtgtggtgagaaaacccaacctgaactaaaatgagactgtgattcatttttatcctactaattgtcgatatccgtacatttctctgcagtgtctttcatgtgtttggttactggagctgcccaggccctctaggctacttaatacacagtgtatgtactttagatcagctctaccaaatctgagttctgaaagacctttgacactgagggtttcagatggggacctattgactgtggaagcagctctgtagagataatagcctttaggaaaataaagcctcgtagagacttttcttctagaataagaacattagaggaagatccctgggttgggatgaacaaccttacctcagtatgattgctcctattgccatcttccagctccccaacagaaacccctcttaccccaaaaacttccctcatagagtaaaaaaaaaaaatcctcttttctttaattccccttaacagggcagccccggtggcgcagcggtttagcactgcctgcggcccggggtgtgattctggggactcaggatcgagtcccgcatcgggcttcctgcatggagcctgtttctccctctgcctgtgtctctgcctctctctctctctctctgaataagtaaataaataagtaaataaataaatattttaaaaagtatattaaaataataataataataattccccttaacatagtgagataggctggcatattcagatttttttttaagattttatttatttattcatgagcgatacagagagagaggcagagacacaggcaaagggagaagcaggctccctgcaaggagccggatgtgggactcaatcctaggacctggggatcacgccgtgagccgaaggcagatgctcaacctctaagccacccaggtatccctcaatttttttttttaaacttaaacagaggaggtttgcaaaatgtaagcatctaatttgacagctgacattttacatggcaagagagcagagaaccctgtgacaaatctcagtcctgttcattcagcctctaacacttataggctatgtaccagggacatgcaacttaacttccatgaccctaatttgcctcttttcattattattaagttttttttttattttgtttttaagattttatttattcgttcatgagagacacagagagacagaggcagagacacaggcagaggaagaagcaggctccatccagggagcccgatgtgggacttgatcttgggactccaggatcacaccctgagccaaaggcagacactcaaccactgagccacccaggcatcctggagttttttattttgtaacttgtctctctaaaatggaagctgtgacaattaaatgaggcaagcacttggtacaggtttggcagtcaccaagtgagaagtattgttatttgtattcttatattatccaattatggctttgggggtaataaaaagatctctcatagtatggtaggatattctttcattatattgacatctaagaagcatatgagatcaatactgttatcctattacagaagacgaaacagtgtctagaaggttcaggaacttactgcaatctaatagccaacaggttgttgtcttccccgtacttgggtcactcccaagccttgggatcctctcaggccttacttcctcctgttcctctgacagccatgccaccagatggccttctggctctttggtaaatggctcatcatagtcagcttcaaactgctttagagactattaggtcttaaaatgcaaatattttctttgaacaaatgaaatgacccaggatcccctaaggaaggggaggttttcccccattcccacgttagctatgttagctgttaggttcgagggatgaggcagttgatgctggattgactgggctctgtgatcacaaccaatgagatgctagtgaatggcttttggtaacttccttttgggacccatcacctcaaggggaagtggtcttaactgtcaaaggcccccatataaacataccttagtcagacaataaccattctctacacacgagtattggtgaacattaagaaacagtgggtcattttctcacagactttgcaaaaagaatgaagtccaaagccagacggcttttctttttcttttgatgtaacattcaccacacttctgctctgcgccagcacagtaccagacaactgccatccattactcactttgacctgcacagtaggagtaagctgtggccctatttggcagataactgagccattttctggcgtatgttccattcgcctttccagcctttcctaccacagcacaaccacaaaactgcagtttcagctacgtagctctgttttgttactcttgatcttcaggatcatgagttcaagtcccacattgggtatacagattacttaaaatctttaaaaaatggaaagaaggggggcaccagggtggctcagtggatgagcatctaccttcagctcaggtcatgattctgggatcaagtctcacatcgggctccctgcatggagctccttctccctctgcctgtatctctgtccctctctctgtatctctcatgaataaataaataaaatctttaaaaataaaatcttttaaaaaaggaaaaagccaaaaaacgtattaaaaaaagaaaacttcattaataaagtcatctttttaatctatctgatgagcaaaattacagggttagttggtgataatcttggtaaaggatgacacatgcactcatattctttgtaggagtgtatgttggcacaaatttgagagcaaatcggtaaaatcgcacatgttctttgactcagaaattccacttctgagaatctaccccacagaaatactgtaaggagtctacaaagacacgtaggaggccaaacatttttggaaacaaagtctcttgaccaggggtggtgagatgtttatttcatacatatagcggaacactacacagtcataaaaaagaatgaggtagacttgtttatgctcctgtggaaaaatacaaatgagacatcaggtgaaaaaagcaagttgccaaacaaaaacatatagcttggttacacatctctgaaaaaaaagtcatcccgtgtatgcattttgtttgtttgtttttttctgggtatgcatttatatgcaccaagacaggactgaaagggaccacaataaactgttaccaagattaaatttattcttcgttctttaaaaagaaaagatttaggacacctgggtggctcagtggttgggcggctgccttcagctctggttgtgatcccgggatccaggatcgagtccctgcatggagcctgcttctctccctctgcctatgtctgcctttctctctctgtgtgtctctcatgaatggataaataaatctttttaaaaaataaaaataaaatatttttcaaattagttaaatccctttcacattaaaatgttacccaggtaagattggaggacagccacccatagtcctaccacccagagactaggatttttacacatttccttctagcctattttttttttcagccataggaattagccccttattttacacaattgtgattggatcctatgtataggtttttagccagctttttccacacacaaacatcatttttagtggctattgaatattctgtaccatattttacttgccatgttttatagttggaagccttactccttagagcctatgaatttaaaaacctcctatgcaagtctgaacacccacccaccttcatacctgctgtgaaccctgtcagggaataagcagttgaaagacaggactaggtatatgttgggtgggacaagttgggagcgctgtgataggtcatgtcagtagtaaagagacatagcccctcctctcatcctgatgtggtttgagctgggcagcactcaagtaccaagcgtgatgagtgaggggcaacaggccttgaccagccaaggtgggcccattctgtcttcctacctccctagcagtgacaggacgacccttcccttgtccatccttttgccaggtgaccagtatgttgcagcaccacaaagtaaagatttaaggactggtggcccatttcctcctgccctagggagagaaagtaggtccacaggaagggagggtgcctcactcaccttcctctatccctgcagtgaaagaggtgcttggtagccatagtgggtgggcttggccaggggtagagcactgggttggcagtaaagtgaacagcttgaccttcagcttacgctagaatggatgcagtaggtcagggctcgggaagagaggaattcaggaatatcagtcctgcttctgtttaccccagcctcctgtcagcaagcccctgggcaagaccctaaatctcagcccctttctcctgccctacatcagtagtcatttggaaagaacttgatttgctgctaggaacatttctatggcttgaactcgttgctagtctggaccctcatacctcctcacccccctcccagtatgccctgtatgaggttggctgagagaaattcccctgaaaacatttattttactcagtttattgagcagcaatatgtaaaggtctctgttatttattcgtatgtttataattgtgcagagtaaaatattcaattattttacagtctgaagtacagttttgggtgagaaacacaataagagttgtaaagtgacaacattttcatatgaaatacatagaggtttttgacattgcccagggtggctggaagcaggctgcaaaatgtcacttaacatagtaggactcctatatttgtggacactaaaattgtttgtagggacgcagactagaatattttaaactaccatgcttatcacacatgcggtaaactatcagtaaatatttgtcagtgatggtgatttcctaatacccaggaggctaccacgtgggcaactctttccatggctctaagaccaagggagtgagtgacccgcaggattcaagatggcagtcctgccgaggagtgggagtcccagctaacgtctgcttactgctcttccaccaacagcctacacggacttcttcctgccactactgagtcgctgcccctctgccatgggaataaagaataaggatggggagacccctgggcaaattctgggctggggacccccctgggattctgctgaagaggaagaagaagacgaggcctctaaggagagggaatggaggcagaagctgcagggagagctggaggaggagtggcaggaggtgattgggaggtttgaaggtaaggaatccatccccatctatagctgccctccttcccttgaccgctcttcctgtaccaccgcccctctcctgcccctcctgcctatcaccttctcacagcattttcctggctaccctcatcctgccctcccaaacagatgacgcttcccatgagacccaggaacctgagtccttctcagcctggtcagatcgcctggcccaggaacacgcccagaagcaccagcagcagcacgagacacagggagcctgccgacccccacgggccgagggttccaatcacagctggcaacagcaggaggaggagcagcggctcttccgagagcgagcccgggccaaggaggaagaactgcgtgagagccgagcccagagggcccaggaggctcgtggggaccgagggccagagccagccagggctgggcccagcgcagagcacccacgaggagcagggagaggcagcctctggcgctttggtgatgtgccctggccgtgccctgggggaggggacccagaggccatggcagcagccctggtggccaggggcccccccttggaggagcagggggctctgaggaggtacttaagggtccagcaggtccgctggcaccctgaccgctttctgcagcgattccgaagccagattgagacctgggagctgggccgcgtgatgggggccgtgacggccctttctcaagccctgaatcgccatgcggaggccctcaagtgatctagggaaagagtgagaactgcagggaacacagtgttagaggcagggccataggaaggggaaagtcaagtatggggatgacgaggaagaggccaatgccacaggatgaaggatatggggtgggagcaaaatttgtattgagtgggagtggggaggatatgggccaccaccactgctgcttggcacctccatttcctaataagacctggttccacatctcactccctgtgtctcctctgcctttttccattgctgtggttttcatcatacatgacatctctttcctaccccgcctgcccaaacccgcagctcctacacacctgcaacacacacgcacacactaagatgtgctctcagctggagccaggaaggccctgcatgcccacccacagaggcagcccttaggagacccagtatgcccaccagtctcactccattccctgcactgggctcctccactgtgcagtcaatgactggaaaaatagatgtgaactgaggcagaaaagggaacaaagccagtttccctcctctccccagttccccaggcagaaccacatcctcctccccatttaacaccccctcccccaacacagggctttccctttgctgagtcactgaatgctctgaattgggggcagctggagctgggggccctgaggaggttgtgggaggatggaatagaagcagaatggacagaggaagagccctgggggggggggggggagtggaattttggttgctaaaattaggagcaggggaaggagatggaaagagccaaattatgtaacctgggttgtctgttcttgggcaactagagatccacacccaaagctatctcccctggagctcctcagtcctctgtatcctccagggcgcgggtcctctccagcttctgctcccatcgcacccctggaattcatctctgggcagttcagctcagccttccagatagacctcttgtcctgaggttgaaggaaaggtcctgaggagcagagggagagggtctggcgccatccccttccctgttcacactccatttccactccagctccccagacctgtagacagtaccaaaccccactgccatcccccaggacacaacaaggaactccgtgaaaagaaaggaaagtacaggcatgcgccggcctgtgcaatctgcacgactctacatcagagcatcttatgaatcaggaacttactttccaggcttggagccctggtttactcaggaggatcccaggagtggaagcagagggcaatagaggatagggaggggaagcccgtggaagcaggggtatgcagagtgggcaagggacctgggagaagacagccaggagacccaaagcctcccagaccaggcagctgttcagggtcaggaggaggaagggctggtgagaaagatcctgtgagaggaagctgctgtgattcagagaagagtctttgagctgtgagcaacccaggcgtccggttcctctcacaggccggagatttcggaagtggcatgcaaagagcccacattgggagtggggggagttggggttgctggagttaggatccctaagctggggggtcgagaggtaagcattagaaacctttggcagccaaatttgctcctccatccagattttttttctggcttttaagcacatctttgcccttctacaaaagttacataaaaccaaagcaaaataagccctgatacctgacccccaaatctacctcttttcaacgtcccttcctggtgtctggcccccagccctgttgggggttcccctgagatgagggctgttcactttctctgaccacagggtttccgcttctgtgtctcttgtttcctagtctgataaaaatactgagccctagaggccctagcttcctctgaccccctggggccaggcagcaggcatcctgtccaccgtggtgggggcagggaggggggcccagggatccccaagggatgactcagtgcctaccgtgaaacactggagaggtgtgagtgtttctgctctcgacagctggaacgaggaatcttaagtgaaggacgatgcattggggttcagttagaaaaacaagattagagaacaagactagagagatcaaagagggtcaattagggactggggtttaggcaagtttgagttaaattgagaaaaggatctggaaaggaatctattcagtgtagttcaaccaagcatcaagtagcccattggtaatccaaactgcttcaagttttcagtccaacagcggaggtgaggcccatacctaattgtgattcagggcatgttgcggagtgaatgccctagagtaaatcctagtggatccagaaaaggggaggtgaattccatctgaaagcactggggcggtggggctctgggtgtaagtgaatggaaaagctccgtagatcaatgaaatggcttcagcagagaccaggagtcagaaaacagcatactgaggaaaagatgaacatcctgtggtagaccaaacacaggtgtgagtgagcacgtgttgaagaagggaccatagaatgccaaggtaaagggtttaggacacacttcatgctgtgtgctgtggtgctggtgacagctgtgcagaagagggagagagaacgggagagtgctatatgtgttacagacaaggagtcaagaaaaaactatcattctgtgaacacctaccatgtcaagccccttcctaacatgagtaatcctgccaacaactgttcagaaggtgggtggtccatctccatcataaaaaggaaaccggggctcatatacatgctgaacttgcttaaggccacacaggtaaaaaagtagcggaatgagcacaaagctcatcttactccaagactctggtacttgtatactttaacttgggtcccagtaattccaagtggtattaaaggagggaacatgggatccctgggtggctcagcggtttggcacctgccttcagcccagggcgtgatcctggagacccgggatcgaatcccacgtcaggctcccggtgcatggagcctgcttctccctcttcctgtgtctctgcctctctctcattaataaataaataaaataaaataaataaataaatgaaaaaggagggaacagatcttaaaaaactgagaagataagtcattagcccaagacaactgatgggacactgggaggaatcttagaagaggaattttagatgactctgaatttcgagcctgaagattagaaagatgctgcccttagcctagctgaggggaaagataaggaattcagttttagacactgaagcaataaatttttattaagcacctgagaggagcagggcactctactagacaaaaggtttaaatgaaatataaagtcactgccctcattagagggcttgcagtataacaagttaatataaaagtaacaactacaagtaataatgggaggtgcacctgcttagagaaataaagtgttcaaagaaggcttgctgagtttgaggtgttagcataatatgcaagtggagatttccaacaagcaggtccagaactcaagagaaaagtttgaactggaggggtagatttgggcatcattcccttcctagcagagacagtctctggagtggacaggagccctgagagagggtgaccagaatagcccctaaagacggtgaggaatcactaagggagggaggtgggggaagcggttagagaagtagggcaagggaggggtgtgccaagcagagaccgggcaactacatctaatgcttcaaagaggtctagtaggggaaggttgaaagatcctttgggttcaggaactagacaattacaaattttgagaaaacagtttccacttaccagatgggcagaaatcgctttacagaggttgaggaatgagtgggaggtgaggaaagggaggtggtaggtacaaagtcatagaatggtgaatatataagacaactaagaatcatctctagttcaacccacgaattctacagatgaggaaaattttaccagttcccaaaaaagtgggtagttaagggggcctactctcttaagacatcacacagaaaaggaaggtgagagatagaatggatatttgcgagaaaaacagagtccagggaactattttcaagaaataaaactggggactcttgggtggctcagaggttaagcatctgccttcagctcagggcctgatcccaggttctggggatcaagtcctatgtcaggctccttgcatggagcctgctccctctgcctgtgtctctgcctctctctgtgtgtgtctctcatgagcaaataaaatctttaaaaataaatagatagaaataaaactgaacatgtttgtaaaatgaaagcaagatgcatgaagagaaacatactgaaaatgtggggaaagaatatagtaaagacacaggaagtggattacagagtacaaaggatcagccttggacagaagaaagagtcttggagtcaaaagaaaagaaagatggggtgcctgggtggctcagttggttaagcatctgccttcagatcagatcattgatcccagggtcctgggatcaagccctgcacgggctcagagaagagtctgcttctccttctccctcaccctttgcccctccccctgctcatgctctctctcgctctctctcaaataactgaaaaaattttaaaaataaaatttaaatttaaaaatagatgaaatataaagtagaggaaaagggaagaagtgaagaggtcagcttggatggccgtaagctcaatgaaagagatgacagcatcaccaaccgagaggaaagaggtaaagttgaggtgtaagaggctcagagaacattgcgtgcagaaatgtaaaagggaatcaagaaagaaggattgaactgagaaatactgagagctctctgatggcaagggttagcagaaggcctcttttggtgacatgactctcctgcactatgtggcaaccttggagaaagcctcaagaataagaccactgagttcatccaaatcaagtttttcaagatcttggtagaacaccaagtgcttctaaagtgcttatgaaggggtgtctgggtggcccagttggttaagcacctgactcttgattttggctcagagtcatgagatcaagccccacgttgggctctgccctaggtgcaaaacctggttaagattctctccctccttctccctctgtcccctcccctgctcatgcactctctctctctcccaaatacataaataagtgctagtaaaagtagttgaaattgttgaccatgcagtgcaaattataccatatgggcaaggaaaacaaggaaagaagaggagttggaagccttggtgagaatggggaactaatttgttggggaagagtagggggtatgaaagtgagtggtcatgatgagagggaaaattcagagttcaagatctcaaagatgtagcccttccaggtgatgctgaggtctgaaatacaaccttgctcgtgggtgcctaaacaggagcagggaaagaggctataaagttgttgtaattgagaaattttaaggcactgagaggacagtgtgagactcattctgcgtggttttgatgtctctaaagatgttggtagggatgaaatatgaagaagagctgagttaggtataaaattgttaagggtgtgataaagatggtgaagactgtgctgtacagatagtaagagaatggcaaatgcaaaaggcatgggcttcaagaggagaaaaggaggttgctaatggtgctgaatagtgatctctcctctgccccggtagggacagaggaccttgtgattgggaggaaggaagagcagtgttcaccaaagagaaaaggagcatcattagggtaaatccaggtttcgtggtgccagaggaagactctttcaaaaatgagacagagaatttgaatatatgaggagttccatcaaatattgtgaaattggctgaagtgtccctgtcaggtaagaagtctaatccagagaggttagatcccagtgagacttcaggagaagacaaggtctggaggagttttgcttctggagataggagattgctgcttctggaatttagaatggaagggacatagcatttattacgagggaagaaacattaagtacctttttaaaaaagattttatttatttattcatgaaagacacagggacagagaaaggcagagacgtaggctagagagagaagcaggctccatgcagggagctcgatgtgggactccatcctgggacccggggatcatgccctgagccaaaggcagacgctcaaccgctgagccacccaggcgtctcaaaacataaataccttgaaggaggtctcagggggatgcacaagacaaaatatgtcttccagttgcatggctttaaatgccatcctcatgctgatgacttctaatgttgtctctctagctctgaccttgcctctgaaagccagactcctatccaactggcaagtgaaatctctacttggatgtctgcccaatggatttttttaaaggttgttttttttttttttttttgaagatttcatttatttattcgtgagagacacacacacagaggcagagacacaggcagaaagagaagcaggctccatacagggagcccgatatgggactccatccccaggactccaggatcacaacccaagccaaaggcagatgctcaactgctgagccacccaggcatccctacccaatggatttagacttaacatattcaaaatcaaacttttggttcacccacttcatcagaatccgtgtcccagtctccctatcttccatccccacacacatccactcaaattgaacatcaagtcctgtcaattctacccctgaaatatatcccacatttgtctacttctctccatttccacgtctgccaccatcttctctcttcctatcactgccattgcctcctaacttgtgtccctgctttcatttttttccttctacaatccaatctagacacaggatctttttttttttttttaagattttatttatttgagagagagtgtgagtgagagaaagagagcaagagcagtggagacacagaaggagaggacgaagcaaacttcccactgagtagggagtcagatctagactgtatcccaggactctgggatcatgacctaagctgaaggcagatgtttaaccgactgagccaatgaggcaccctagatcttttaaaaccctaggatctgggatccctgggtggcgcagcagttttgcgcctgcctttggcccagggcatgatcctggagacctgggaccgaatcccacgtcgggttcccggtgcatggagcctgtgtctctgcctctctctctgtgtgtgtgtgtgtgtgactatcgtagataaaaaaaaaaaaacctaggatctttgaaaaacacaaatccaatcacctctgcctcactccattccatcctccacctcctccccagtcctctttcccctcttcccccttatacacaaggatacatacacactgacaccctgcttctcatgatttatttacctttgaatggccctgcatggggatccctgggtggcgcagcggtttggcacctgcctttggcccagggcgctatcctggagacccgggattgaatcccacatcgggctcccggtgcatggagcctgcttctccctctgcctatgtctctgcctctctctctctctctctctctctgtatgactatcataaataaataaaataaaaattaaaaaaaaatgaatgtccctgcatgatctggctcctgccttctctctctgactccatcccctaccccgctcccactgtctctctgctccagccacacaccagcttcctttctgttcttcaacaccccctgctcatttctaccttccagcttttgcagtagctgttccctttgcctggaatgcttctcccctaaatcttcacctggtcactcttacctgtcatttgggtcttagcttaaatgccacttactcggaaaggacttcctgaccactgtgtctaaagtagttctctgccactcctcacatgtcctctattatttcctcatagcactacttattgacttcatcagggtatttcctttatgctttgctttactaggatgtctgatttgcttgccactatatccctattgcctagaacagtgcccagcacataataggtactcaaaaaaccttcttaaattggggccaaaaaaaaaatggggccaaaaagaaattcttaaatggagggatggatgaataatggaataaaacaagagaaagcccaactttaggtttgaggcttagattggacttacctgtagaatcaggtttatttatttatttatttgtttattttattttattttattttttttaagaatcaggtttaactatagggtcaggtgtggggatgagttaatttcaagattagctctaggaaacaaggttgggttagtttagaggataagtttattttcaggtttatttattggaatgtatttagatttgaggttagggttgagtttgagttgcgatttgggttgaggttaaatttgagttagggtcaaagtattaaatcccaatttaggttttgaggctaagttcaagtttgaagctaatgttcaagtttcaacctcatttaaaggcctcagagatttcactagttctccatagagccaactgtaaagactgtatgtccctgagtttggggcacaagactccagtcatcacccctcccacccagggaaagccccaaaccaactgctggcctccccaagaaagaaaccaaatttcacacaacctccgaaactgagattgaaaccaagattggtccatctcgaggagcgtccttcagcacatcacaaacgcctgtgacactgagcctcagcccagtcttgcccttccttcctctctgtctctcatgtcctatcactccttgccttcccctttttgttcctcaatgccctgtcttcctctctgacctaagtttctccctttctcggtttctcaccattaattgcaacactgttttatattttaatataactgaggtcacttagtccatcagctcctaccattagagacgcagaaagagacaacaggaaggaaaaggaaccccagagagagacacacacacacagaggaaaggaaaggagcagagaccaagagggaaactaacagtgacataagagacagtaggttagggatccctgggtggtgcagcggtttggcgcctgcctttggcccagggcgcgatcctggagacccgggatcgaatcccacgtcgggctcccggtgcatggagcctgcttctccctctgcctgtgtgtgtgtgtgtctctctctctctgtgattatcataaaaaaaaaaaaaagacagagacagtaggttaaaagaattaagaagaagccaagttacagactaagatttttttttttttaagattgatttctttattagagagagagcatacgcaagagctcaggggaggggccgagagagagggagtgagagaactcaagcaaactcctcattgagcatggagtccaacatagaactccagctcacaaccctgagatcacaacccgagtggaaaccaagagtttgatgtttaattgactgagccagtccccctcccagaccaagataattaaaagggacatctatggccactcttcctccatcacatctggtcagcccccaagacctgtagatttttcctagaaactctcttgtcctttctgtcctcctgctgcctcctcattttgttatctccttgctggattattacacaattttcctgactgctctccacattttgcttttccctccagcccctcaattcctgtacactaatccattcttcatgcagcttctagactcatttttctgatgtaccaagtgagaccctctctcacttaaaaattttggtggcttcccatcattgttagaatgaaacaaaaacttttcttggttttaaacccttcagaatgtgttctcagcttccctcgcaagcctcatctctaccccttctatttgtacccaaagtgtgaataaagtgaaagaaaaaaaaaagtgaagaaattcagcttggatggccagagctcaatgaaatagatgacagcatcaccaattgagagtgaagaggtaaagttgaggtgtaacaggcacagagatttagaacatctaagatagagaacccacaggactgtaatggggaatcaagaaagaaggattgagaaatactgagggctttttgaggttagatggcaagggagaaggcctcttttggcttcataactctcctgcaatgtatggcgacctagaagaaagccctaagaatgagaccattgagtttacccaaatcaagtttttcaagatcttcttggtagaacaccaagtgctactaaagtgcttatgaaggggtgtctgggtggctcagttggttaagcacctgactcttgattttggctcaggtcatgatctcagggtcgtgaggtcaagccccatgttgggctctactgaatgtggagcctgcttaagattctccctctccctctcccttatgtcctgctcaggctgtctctccacagttaatgcctgacacccacccacccccaggccaagttcaacggcttttctatggactgccataagcccactatcacactttttattgcaatatctggtaactttcctattttccacactggtctttgagctcctagaggtcatggggaccgtctttcaaacctgtaaccttgatgccttgtgcaatatgctcaataaacatttgtgaaatagagagaaagctaaagaggtagaaggagaatgaaaagaaataatactcttattggaccaggaaggcatgaaagacaaagagcctcaagaagggggaggaaaggggatccctgggtggctcggcggcggtttagcgcctgccttcagtccagggcgcgatcctggagtctcgggattgagacccacgtcgggctcctggtatggagcctgcttctccctctcctgtctctgcctcaatctctctctatgtctatcatgaataaataaataaaatctttaaaaaaaaaaaaaagaagggggaggaaagcaggagaaatgactgatacaaaccctgaatgctacttatgtgtgccacagggcaccaagaccactcagaacctttgtgccagaggagaacagcaatatgcccaatgccatagtgggggtgggggtgggggtgggggggctttagccatttaaaaccctcaaagatgaggtttagcatctgccttcagctcaggacatgcgtgatcccagagtcctgggatcgagtcccatttgggctccttgtgtggagcctgcttctcctgtctctgcctctctctgtctctcatgaataagtaaataaaatctttaaaaataaaataaaataaataaaaccctcaagatgaaagcataacaacaccaataaaaatggtgatacttgagaaagccagttgtgattttctcagtcttctaaaacatggataaaatcatacttagagggatgcctgggtggctcagcagttgggcacctgcctttggctcagggtgtgatcccacagtcctgggattgagtcccacatcgggctccctcatggagcctgcttctccctctgcctacgtctctgcccctctctctgtgtctctcatgaataaataaataaaatcttttttaaaaatcatattttaaaaatcatatttaaaaaaaatgtttttaaattatatttagaaaccttgcttttttttacatacaaattaagtgaaaactggctcatgtatcagaatgttcatatcgacatctttcagagtaaccaaaaactagaaacaaaccaaatgtctctcaacagaaaaatgggcaaataagttagagtatattcacacaatagattgctgcatcataatgaaaagcaacaacaaaaacaacatactgaacatgcaaatcacatggatggatctcacaaacatcatgttgagtgaaagaagccaaacccaacaagtacattctgtatgacttcatttatatgacattcaaaagcagagacaactaatctatggtgatagaggtcagaaagtggttggttatctttagaggttatcaactgggagggagcatgagagaaccttttatagacccaaaaatatgttgaactgggtggtgactacatgaacagatggaaaagctcatcaggctgtaaatttaacagatacgtaccttactgtacccaagttaaaagggggaaatctttttttttttttaatttttatttctttatgatagtcacagagagagagagagagagagagagagagaggcagagggagaagcaggctccatgcaccgggagcccgacgtgggattcgatcccgggtctccaggatcgcgccctgggccaaaggcaggcgccaaaccgctgcgccactcagggatcccaaaagggggaaatcttaaacattatactggtgctgcaaatgcagcttccagacgagtctttcagagttgaccctagctcagtaccctcaagctcctcctgccttccctccctgtagagaactttggaagttgctacattccttaatcccagagtgtgtgtttgtttgcggttatataaatccgatctggagtgggggggtgagcctgggtggctcatctagttaagcatccagctcttggtttcagttcggtcatgatcttgaggtcttggaatcaagccccacttaaagctccacgcttggcagggagtctgcttagttgggattctgtttctccctctccttctgcccctcaccctgttcacacactctccccacctcccccacctaaataaatgaataaataaaatatttaaaaaaaaaaaaaacctggggcacctgggtggctcagtgggtgagtatctacttttagctcaaataatgatcctggggtcctggggacgagtcctgcatcaggctccccatggggagcctgcttctccctctgcctgtgtctctgcctctctctctttctctgtttctcatgaataaatcaataaaaatcttaaaaaaaaaaaatctgatctatggaggtcacctaaggtggggtgaggtgaaggacattcttcacgagtgagatgagacttcatcatatgtgagcccaaggcaatatccctaagtaggggaaccatgacattcatcttccaaaccaggacacttttgagagcaaaagggagatccatgaacattttcaccaggacaacaggcatcaaccagaatgtcccaggcaaagggatatataatgcaacttcttgatctaaaacctgccagacggccaggaaagtacacacacggggacaagtgtgatttgaaccatttgggacaaggctgggggtatacgaggaggaaatgggcacagagagtagcctgtgatcaatggtgcagaggtgttctatataatggctcttcaaggaacctggcctccagcccacgccccagctgctcccttcctcctctccgaattgactgtcccttctctggaactcctgggcctgaccccgctcgctccctggccctcccagcccacggttcccctgacctgctccctttcccagaactcagtcgtctgagcccccagcctgtggttcagtcctaggcctcagcctttcctgccttcgactgaaacggcagcatcttctaagccctgggggcttccccgggcccagccaggggcctagaacccgcccgcctgccacgctgccactgccgcttcctctataaaggggacccaggcgtccggcccaggcacccagcctagcaggtgagactctccgcccgtcgtccccgtgggtggcagaccccgctgggcactctgcccctctgcctgcgccccagccccccagtacctcctgcctggggctgggcctgggtgggttcactgtcggtttgttcccctccctctgatgcttcatcaatcagactttcttctctgtctctgtcacacgttctctgtttctaccacatacctctctgttcccctctcgtgtctgtttctctttctgtgccccccttgttcagccgggctttccctgactgcatcctgttcccttctctcgctgcccggtctctcccgggctctgtccgccggcgggaggcccgtcctccgccccccagccccgccccgctcacgctcaccgcgcggcgcaccactcaccggctctctccctgcaggttctccccatgacaccacctggaaggctctacctcctgagggtgcgcagcgcccccgtcctcctcctcctggggctgctgctgggactgccgcctggggcccaggtgaggcagcaggagaatgggggctgcaggggttgtccagccacactttgggccttaagccaccctccacccttttgtcctctaggggtttcctggtgtcggcatctcaccctcggctgcccggactgcctaccagcaccctcagaagcacttcatacaaggcaccctcaaacctgctgctcatcttattggtaaacagcacctggcgctctggacatgtggctcccaactctcctcccacacccccttcaagggaccaagcatctagtgcacttctcccctaacttcccccaccctcccacatagaggtatcccactcccatctgtcctcccagccacccccaggaactcagcccagtaccttcttcctcagggtttaagactgctgacaccccaggttcttgacccctcctgttccctctttctcctcctaggagaccccagcatccagaactcgctgcgctggagagcaaacacggatcgtgccttcctccgccatggcttctctctgagcaacaattccctcctggtccccaccagtggcctctactttgtctactcccaggtggtcttctcaggggaaggctgcttccccaaggccacccccaccccactctacctggcccatgaggtccagctcttttcctcccagtaccccttccatgtgcctctcctcagtgctcagaagtctgtgtgcccagggccacagggaccttgggtgcgctctgtgtaccagggagctgtgttcctgcttacccagggagaccagctatccactcacaccgatggcatctcccacctactcctcagccccagtagtgtcttctttggagccttcgctctgtagaaaaatccagaaaaaaaaaattggtttcaagaccttttccccattttgcctccattctgaccacttcaagggtcaccgtgcctctcttttgacccttccaatagcctcaagtctcccctgctcgagttacctggagcttccaaagaaggaattctaaggcactccaggggaccatacctcccttcagcataccccaatgctaggctgaggagttcgagttctgcctagaaattcctgccggttctccaactgtcctaccagtctaaggaggacctagccatggacatggagggggcagacaccaggaggagcttgggtggataacagaaggcaggggaggggggattatttatgaaggggaaaaaattaaattatttatttatggagaatggagggaaggaaataatagaagtccaccagaagagagagagagagagagagagaaatatgcccaagagatgaagagcaagagaacatcggcataaggataacccagtgaaagagaaaccaagcatgtctgagacaccagggagctctagaaggaagcaaaggactcttcagatcaaccactgcttgactagacatcccatgaggagacatctgcaccttcaacgaagcccaataaacctcttttctctgaaatgctgtctatgtctgtctgtctgggaggggagaattttcctggtctcaaagaaatggaagggggacaggggcctcagaagagacagtaactgtggagctgcaaggagatgaaggggcctaaggagcttggggggcgaggggggatgtggcaggatcacaggggtgaggcagccagactgctcagggaaactaaaggataagctgggaagagaaaggaaaaataagagcccaaggtctgcaggagtggaggtcagggcccggtgggctcagacggctaagtgtggaggctcagaggaaaagggattacaggagtcctctggggagaagcgaccacaccgaaggctgggcacagggaccctctggaagaatggctgtgcaagggccctaaggaatgggagacccccaggttaggggggtggggaacatgggagacattttaggagacatggtcacggtcacacagaggggctctgacggctagggctatctccagaaatctgggggcatggagttctttgggacacaaggccacacacaggagctctgacagaggagagctcatgcaaaaatcggggctcagagtcccttggaagccaagactgaaaccagcactgctcagttcccggtcagaatgaaaggagaagcctgccctcgtggggtgaattcccaggcttgatttcgctcccacaggggctgccccgggtgggtccctgccatttaccgcccctccccagcccatcagggatcccatccacatctccagcctcatgctcccttctctcaagctcccttccccccccccccagggacccaacacacgtgtcaggaccctgcatagctccccctccaagctctctccccaccaaggactcagctttctgaagccccaccccttgcacctttctggctctatacctaccaagtccagtctggaaatcagaggaaaacaggccgcagacctgaacctcaggaaaaaaatggagggaatgggaattgggggcagagggaaactggggtccagtctccagggtcctacacaatgtacacagcagtgactggcccaggaagtctccctcagaatccgaggggggcgagtaggaagtatccttgatgcctgggtgtccccaactttccaaacccccgcccccacgatggagaagaaaccgagaccgaaggtgtagggccccaccgcttcctccagatgagctcatgggtttctccaccaaggaagttttccgctgcttgattgagagcctttccccgccctcctctcgccccgcgggtatataaatgcagctgtttgcacacccagccagcaggagctccctcagcgaggacaccaggggaccagcggggagagagcacgcaactccagaggcccctggaaataacttctcagacgacgcccccccagacaagcagccaggcgattctctccctctaatatacaaggccccagggctctacagtctccccactggacttgagcccctctcagaagcacaccatgagcactgaaagcatgatccgggacgtggagctggccgaggagccgctccccaagaaggcggggggccccccgggctccagaaggtgcttctgcctcagcctcttctccttcctcctcgtcgcaggggccaccacactcttctgcctgctgcactttggagtgatcggcccccagagggaagaggtgagtgccccacggaggacttggctcattctcccgccagggagggtggtggtgctggtggggaccattgagagaggaaaatgtggagaaagatggggaggcagaaggagatatggggagagatggaagagggagagcgaggagcacatggaagatgctcatggattgcttcttgaatgaatgaatgaatgaatgatgaatgaatgagcacgcagacagacatatgtaaagagagatgtgtggagagatgtggggtgtgggtagagagatggggacagaacaagtgatatgaataaagatggtgagacagaaagatatggacaatatgagagagagataaggaaaaatgtgagaaaagagataaggaaagatgaaggtgtctggctcatggaagccactccgcgaaagtgttgtgatatggatgaatggacaagggatggatgggagagaaaactaaagtctgagctgcataagctgtttctcctataggggtgacttgctctgatgctaaacctccttcttctccccaacagctcccaaatggcctccaactaatcagccctcttgcccagacagtcagtaagtatctccaaagcctctctcctcattctgaccttgtgtgggagtgaatcctgggagagaagcaggagggagattcaggcacttgtttgaggggaggaggcatggaggtcaaagtagtgggatcttttccaggaagcttaaggatctcaccattttctttcctcttccctcctcagaatcatcttctcgaaccccaagtgacaagccagtagctcatgttgtaggtaagagctctgcagaggcaactgggtgggggatggggaagcacatcggctattgagggataggatttgggggctgaccccaggctgagggtaaacagaccttagagatggtatgagagggactcactggccttgaggcggatactcagaatctcatggccagatggtatgtgggaaggcagaggggacaggaaccggatgtgggggggggggcagaacccgagggccaggatgtggagagtggaactgacaggggtcacactgactcacccctctctccttctcttcttccctccagcaaaccccgaagctgaggggcagctccagtggctgagccgacgtgccaatgccctcctggccaacggcgtggagctgacagacaaccagctgatagtgccgtcagatgggttgtacctcatctactcccaggtcctcttcaagggccaagggtgcccttccacccatgtgctcctcacccacaccatcagccgcttcgccgtctcctaccagacaaaggtcaacctactctctgccatcaagagcccttgccaaagggagaccccagaggggaccgaggccaagccctggtacgagcccatctacctgggaggggtcttccaactggagaagggtgatcgactcagcgctgagatcaatctgcctaactatctggactttgccgagtccgggcaggtgtactttggaatcattgccctgtaagggggtaggacgtccattcttgcccaaaccgaccctttgatcactcacttcctctgacccctcacccccttcaggcttagaaagagaattaagggctcagggctgggcctcaagcttagaactttaaacgacacttagaaacctaagatccagggatgtgagaccccgatgacatgacacagcactggccaccaccaagaattcaaaccagggcttccagcactcactggagacctcaggtttggatccctgaatgcaacttggaattcttggaatgtaggggtcagggaaccttcagttctggctagaacacttcagaacaacccttgagaagatctcaactagaatctgacatgagtggatctcacacctccctttcgtcatatgttcccagactcttcctgagaaggaaagcccagtgactcccacgtggagccagctcttcctatttatgtttgcacttgtgattatttattatttatttattatttatttatttactgatggatgtatttatttgggaagttggggtgtcctggaagaccgaacgtaggggctgccttggctcagacgtgttttctgtgaaaacggagctgaactctaggctgttcccacctggcctcctggcctctgtgcctccttttgcttatgtttttcaaaaatatttatctgatagagttatctaaacaatgctgatttggtgactgactgtcgctacatcgtggaacctctgctccccaggggagttatgtctgtaatcgccctactggtcagtggcgagaaataaaatgtgcttgaaaaagaaacacagtctctttcttggaattaattctgaatcttcctctcctccggggtgggaggccactccctgaagtcctctctctataagccttcagatccttgaacctggggcgcctaggtagctcatccagtgggttgagcctctgacttctgatttttggctcaggttgtgatctcaggctggtgggatcgagccccatgtctctgcagggagtccgcttctcttcctctctctctgcctctccctctgctcactcacacgtgtgcgctctctctctcaaatagatgaagaattttttttaaatccctgaatccatataaaaaatgcagagaagagtttgtttttgtttttattttttaaatgatccctaggcacctaggtggctcagcggtttagtgctgccttcagcccagggcgtgatcctggagacctgggatcgagttctgtgttggactccctgcatggagcctgcttctccctctgcctgtgtctctgcctctctctgtctctctctatgtctctcatgaataaataaataaaatatttttaaaaaaataaaaaataaatgatccctgaacacggtccccactcacaggactactgaggctcaggagaccctccgtataacaaagccctgtcaaacaggcccctcccccaggaaactgaagcctgaacctaatacctctccctcagggcgtgggaatttccaactctgggaattccaatggggaagtcctgcacctgaaatgctcaggtgaggtttcctgctgttgctgcctgtaggagagtctgggaagggccacattctcaggcatctgaatcacagccaaaggacttccagatattcagatcgcctgatcctaggctccccagcagccctaactgtacaacatgaaccagttactctgcctcatctacccaccaaagacagaaacacatcccgcaaatgggtccacaaaagaagagaaggcccaagctacatctgagcacgtagcatagcacttggcatagtaaccactcagtgaattctgactttctatctgctttcatctctcagtgagtggaattgaagagacgaaagaaaattcagaaacaggaataggatacgggtgaaggactcacatagcagctctcacagatgttcttggtgaatatgagggagggtcatgaggtagatgggctggaaagagaaaagggccctctctcctcaggaattcctagttcctgggcagcccaggtggctcagcggtttagcgccgccttcagcccagggcgtgatcccggaactcgagatcgagacccatgttgggctccctgcctggagcctgcttctccctctacctgtgtctctgcctctctctctctctctcatgaataaatgaacaaaatctttaaaaaataaaaaaaggaattcctggttcttctggagacagtcgaagatccagagggtgggagccccactggattcaagcccgacagctctggcaggaaggggaaaactgtgtggtatgacgcaggggtgggatggctcactggagtgacctagatagggcctcctccagccgagagctgaaagtcggtcatggggtgcatggggtgaggggactgctgttactcgccctggggcccccacacttgccaatgatatatggaaagcagacctgaagtgtgaacgaggggtgaggactttccatctcaccctggacagggccagtggtcccagagtttcctcctccctttcctctccaggcttacccagcccctatctttccacctcctccctcacacccaatgagcttaagtttttctttggagggcagttgactgggtagtggctgaaggggcctttgggcagcagggaagaagtgctaggccctcagggcttcattccttctcccccagccctgttgctctggggaagctgctaaccttcccctgtcaccatcctgctctctgatgagagggacgccagagaaaagcctgccctgtggagtctggggaggaccaggtggctctgagaagaaggtgcttggagatgcttcggggtttgaggagatgcccttcttcccccttcccactgggctagtaatgctggggcaagttcattcagaggcaggaggtgggtgggaaccgagcagatgggcttctcagagggcagaggccagaggaagggatacgaattgtttcaagcaaccagaaaaagagagcctgtggggacacctgtgtagcgccccgacaagacccgggcgcagcgcggcacctgtgtttggcagcactagagctttacggactttattctcttggggctcgccagcagattccagacgggcccctacacttccccggcctcagcccaccatcaccgccccgaagaaggtcttcccccggcggtagtccaccatatcggggtgactgatgttgacgtacacgcgctcgcccctgcggagctgtaccaggccgccgaagcccacgctcgtgtaccagagcggcccgtactcgcgcggccgggccgggccgggggccggggtgacggtctccgcgccctccagcagcagctcgggagacccgggcccgtaggcgccccccgcgcggaacaggcggctgcgcagcgtcaccggggggtcgggcgggccccggccggcagggggcgcccggccccggtagccgacgtgacagtagaggtagtagaggccgtcccgggggagcgccagcccctcggcgcccgagaacagcgtcccgctcctcagaaacgcctcctctttcttcgcctcccagccgaggccctgccccttggtccaggcgcctgcggagagacgggcctgtcggcgcccggggccggcctggaggagcgggccgggccggggacgtcggggtgcgcccgggacagcacgcgggcgtttacgcccccgcaggcagcggccggcccgagagcgcgtgggcgcccccgccgcggcgacgacgggcaggggctggggccccgggggcggggcggggccgggcggggcgcggagacccagccgcgttttgcctgctccaggacgggagaggctgggatgcgggaggagaggaaggtgggcgctgtagggcccaggggggtgatgcaggtcccactccgagccccgcaacagcagagcaaagggagtctaactgtgacgagcagaaccggccccctgggaccacctacgaggtccttacctatgaggtgggcggcggggagcctggaactgaaatctgcttctgcttcctcctctggcagctcctgtgaccctggaagaggggaagagtccactattggggcccagggtggtcatccatgcgtggtgcccctgagaggacagggtgcccgggtgggattccagaggaagagtacatcggggtgcagatagatgggacctgggcatccctgaaaggctggagcaggggaggggaagatggtctgctcttacccaatcgctgctgggcctgggcctgcatccccgggtcagcggtcctggttacctgagcaggtggggtcacagtgcccaaagttcagttttagctgacgccagccccacccctcccatcgcagactcaagctccaggcctgaggtggattcccaccagtcctatccccagcacacatctccctgagagcgccagcaagtgaggcatatggacttggtcagagatggagggctgaggatgtgttggggagaggagaggagatagccacacaagcaggaaggagcttggagctagcaggacacaatagcgtcacagaacatggaaggaggaccagcaaagagacagacaaggcatccccaccaggcacagccaagccaactgagcaggatgacacaagagacccccaggcatcgagagaggtaagtgggcattagcatacagcccttctaaggctggctgcatctactcaccagtcctcctcctggctcctggggcaccaaggccctcacagccaagacagtgataggcacagccagcagcagggtcaccagggaagtggctcctgccacagccagcaggaggcagcccttcccctggggcctcctaccccagccctctagccacagtgcccccattgagactgagctagggccagggcaggggggctttcatacctaaggggtggggccaccccctccccatagacccacacacctggctgggactttccccacacccctgctcccctcacccagcttcctgtttacccagagctggggtggggcagctggatgtcaggttctctgaactggggaaggagttggggtgaagagacaggcctgcagggtagagctggagggggccttagagatcttctggctcagcggggagagatgatagcttacagaaaggcaggaaggaaagctgcatgaggagaacacccaactgcatttctagggcagtctgcattcttctacaccccagtgatgggtgctggagggagggctgtatccacatccttgaggtcaagcgctgcaataggaggacaaaaactgaggtcttgagggatggatatctgggtccctgagaagaacttatgctcgcactggattgatgcccccttccatcccctcacttacccctaacgcccagagcttgctgagaagcagagttaagccaatccacagaaatagtaggtgaaaggggcctcagcctccccactgactattgactcactgaggagtgatggaaatgagtattacctcccttgctccacagagtgtagacaggagagcgatgggggcatggccccaactcctaagagcttcactgtctaaagtgggccccatccatgtttatgaataaatgaaggaaggacaaatgaatgaatgaggaagcaaaatagagcagcaatgaatggtatggtagacagtgcagtgggagttgaagggaggaaagaccaggtccaaggaagttggaggtggtcccagatcatgtccccttcttaataacatctctggggatccccggatggcacagcggtttggtgcctgcctttggcccagggcgcgatcctggagacccgggatcgaatcccacatcgggctcccggtgcatggagcctgcttctccctctgcctgtgtctctgcctctctctctctctctgtgactatcataaataaataaaaatttaaaaaaaataagatctctgcaattaggtaatagtaataataatgtagctgttatacaaatagcacgtagcatgtgcttgccaccgatccatgcactttatatatagtaattcttttaatcctgacaaaaactctacgaagaaactgaggtacagagaggtaaaggaacttatagaaagccacgctgtagtggcagggtcaggatttgaacccaggcagtctggctccacagatttgaccacaagacagttaaacacacacacacacacacacaccctgagtttttacattttaatgtatgtaaatcttaacttcctcagaaccccaaaaaagaaatgaggaaataaaagctggattcgaatcactgataagcatggtaaaaggtttagaggtaagatgtgtactgatgtctgcaactttgaaaggtatccataaaaatgagatagattgataggtatgtgataaagcaaatatagaaaactgtcaattttagaatataggtggtagggatatgttcactgtaaaattatttcaattttgttctgtttgaacatcttaataataaaatgtgtggggaaataaaaccctgaatcttatcctgctgtccaacacggaggacactgtggatggggggagagggaagaaatgccagaaagtttctgaatgtgaaggaggaaatgtacatgcatatgaacgcaggcatggatggcaccttacctcctccctcaacatgagctctccagtctccaccctccttttttttaatttaatttaatttaatttaatttattttattttattttattattttattttattttattttattttttagtctccaccctccttaaggactccagcacccatctccttctctatctcagtgccactaacaggccttcatccaggttactgtccagaagttctcagatcacggcttttatttttgtgctcaacatcagaatgctgcctcctacaggaaatccacctagattgcctactcttcttttccaaccccaacttgtcatcagctttctgtcctagactctcagcagtactgaggtactcctatgcatctagtctggctgcctctgactctgtccgtcaatcagtcagtcaagtgcctgctagatacagcctcagaacaccaggcaagttacccccaaactaccagtgctcccattctggtgtgggagcctggaggtgtgtctacacatatacattgggatcatgagctcacagcggatgcagtgtgaggcgtaattgagggaaagttaatcaggaaaggtacctagagaaggtatacactcatggactactagcaggctcagcaggctggctggagctgagggggattataggcttggttatggtcctaggagtctgaaaggaaagatgtcataaccccaaccttcaaagccaaatttcctctcctgacaaagctagggaggtatccagactgggggagacggtaaagccagaggaggggcaagaatgtctgaagtggcaacacctctccacccagacagctctggccagtctggagtctctacccgcaggccacagctttggataagctgggagagagtaggcaccctggtagggaaaatgggggggggcgggcagccacaccccacagtgaagctaaaatgagggaagagagtatggcttttgaggttccctgagccctggaggcacctgctgtccagcctctgtctctgctccccaaagaattaaatacaatctacttctgctcccacttcctctcatgtctatctcaggccctcctctccacctgtgtttctgctccacagtccacacacacaccccacaattcctcctgaacctaggagggtcctagttgccagaccctggtcagtgcagctggctctggtggcatgaagtcagcaatcccctctttgccctcaaacaggaaccagtggttgcagggcaggaagtgcctgaggggaagttatggggcccacacgctcctccatgccacacttcagcccttgcagggtctgcccgtgggaagtggctctccacaccagccaagtggggccctgctctcctcagtggctctggctgaggggcggccccagctgccaggtagcactggataccaccctccccacttttcactagtccacacatatactggaaaccctgttcctcctcttccatcagcccctcaccagaacctagaactacccagtgctggagaggcccctaggaaccacctcgtcagtctagggcagaggaaggggggtgtgctctagattctggggttcaaggccatttgtgccatttctgggctggacctgctcctaagagtctggactcaagtttgggttcctcatcaggcaaaaggggcaccttttgatacctatgttgtggggattagcagtgacaaatggaaagtgcccagatcagggttggcacattagtggggctcctcagccttgggacagttgtaatggagggccccacgtcttacacatgaggaacttgaggcacgtgatgtggcccaggccacttagctgagcagagcagggttacatttcctgacctccgggtcagtcttcagtgctggacctaatgacagtttgtgagaaatggagagagggtaaggaaaccctctgcccagggagggtggtggggagagaggataaaaggcagtgtatgtgtacttttacacatagtaggtgggcaagggacctctgtggggagacccagggacagcagggatggcagtgggaagccttcgaggggtgagcggtcgtcatgcgtaggcctgaggtcgtaggcctgaggtaacccatgagagatgggcacctctggtagaggtgaggtaacccaatccaggttgaagaatcccagcatgtttctctgcctctaaactgttggggggggggggttgcagagacacccaaggctgagcaggaggatgagcaggaggatgggggaagccagagggacaaacgggtctccccttccctgcaggtttatgcccttacctatatggcgggagcttggggctgggggggctcctgctcctggctgtgctcattctgtccgcctgtctgtgtcggcttcatcggaaaggtgagccccacctttaccctcattcgcccccccccccttcacagaagtccctgtcccatcccatcccacccgccccgagacggagagtgcaagtgaggaaacaccctctgggccggggcgggagtgggggcgccggcctgctgagcttcttcttttcttccagtgaggaggctggagaggagctgggtgagtccggaccggaggcggcgagggcggcaggacgggccgagggccgcgaggcgaggcgaggcgacacaggggagggaaagcaggggcatgaaggaggcggaggcgggagaggaagaggcagacagagggacgtaagagagaactggtgtagggaaaggaaaagggggcaagagagaggagacagagtcagagagacannnnnnnnnnnnnnnnnnnnnnnnnnnnnnnnnnnnnnnnnnnnnnnnnnnnnnnnnnnnnnnnnnnnnnnnnnnnnnnnnnnnnnnnnnnnnnnnnnnnnnnnnnnnnnnnnnnnnnnnnnnnnnnnnnnnnnnnnnnnnnnnnnnnnnnnnnnnnnnnnnnnnnnnnnnnnnnnnnnnnnnnnnnnnnnnnnnnnnnnnnnnnnnnnnnnccggcccaggggctcctccaaccacctcccagcagcaccttgtccctggccccaggcccagctctcagagcaagagctccactacgcatctctgctgcccatgccctgccgtgagggacccgacctcagccacagggaaggctccaaggaggaccccggcactgaatatgcctgcatcgccaaaaactaagccccccgagctcccccagccgcctccctgaacccaggaggaccctgtggtccatgcagtaaacaccatgatctcgccaccttctgtgtttcagtcttctcagtccaattcaactccatcccaccaaacagcaccaccgtcaaaacctaagcaacttatctccccacccattcggtggtccaggagtgattcctcgggcaaagaacggtgttgaggggcccaaactctcctggaggccagaaagagtacacatatgggcctggatggagtgggggttgacacatagggctcaccagatctgatgcccccattcctcaggagactcagtctccatgccccaaagaggtagaagtgttgagccctgggatggtgatgggaaggggctccaggtatggctgctgggaagcttgctccttggacctttccaggccaggcttggtgaggggagagtaaagagtcgggggacccttgggacgcctgggtggctcagccattgagcgtctgcctttggcccagggcatgatcctggggttccaggatagagtcccacattgggctccatgcgtggagcctgcttctccttctgcctgtgtctctgcctctctctctctctgtctatcatgaataaataaaaccttagggaaaaaaaaaaagagtggggggaccccggggaggagcatatttgggtatcaagaatggaaaaagaagtacaggagactcataagaaggcattagtggtggggcagaggaggatttattggggtctcttgaagagggttggatgtctggggtctggaatcactcatcagagtccacctaagaaatggcagcgtgttcccaggtgaccgtggcctgcaggagagaggacagaagttgctgggcaccgcagccctcttgctggtctccgtccccacccccagctctcttccaccattgccctggccccattccttacatttgccttggtaatagatggtgctgcccatggccacacagataaagctgaaggcatagaatccagcccgaaggaagaggactgtgctggcccctagccaaggagatcctgcatggggaccatagaaggaaggggaggagggggccctaaggaagaagcacgcacaggcccagggagggacagagagctagggcctcagggaaacactcccaacttccaggaagaggggggcctcccacctcacctttctctaccaccagcagtgtcccattccctgtcccaacacctaggcccagaacctccactctgcacacatagactccagcatcacagtcttggatgtcccagatgtgtagctcagcctgatggtcacagaggaaacgggaagagggaagaggggccaggcggcccctgaactcgggggtcccattcctcacttccttccctggggccaccttgtcccggtaccacgtgacagagccaatggccaatttcctttcgctggcattgaaggaacacggcaagaaggcagcagtgccctcctgggtatgaatctcagggggctggaacacccagagagcacgggatcctggcaggcagagagaagacccagagaaacctccccggttacaatatagggtgggaaaggacaatagagcttgcagtagaacatcccgactgtgtccccacccacggagtatccagaggaacaagcactttggtacctcataaaacccttttctctctaccagcctagtttcttaacactgcttattaaatagtttctcaaatcctttcctataccaactctcatcctcaccccatcccatcattctccaactacattcactcgtagtatcttgctgaaactcaacctgttacattgaaattggagctcattaatgaatgtggctgtctagttaactaataattaactatattactccaggtattcttttcataccaatggcatactctataagtacaccaccctggctactttgcttttttgttaaagaacataaactaataaagtcttcgggtgaagacacagctataattgattgaaatccctgtttaactcatccaaattaattaaggcaattagtaaaatctccgattagattctctagttcatgaattttacctgtcattcttctgtttcagaggttcttaaacttgagggcctattggaatcacctggagggtctgttaacacaggttcctgggccctacccccagagttttttactcagtagatttagggtggggggcctgagaaattgccctaggttcccagctgatgctaaagctatgggtctgatggggcccctggttggctcagtccgttaagcatctgtctgcctttggcccaggtcagatcccagggtctcaactgagatgaagccctgtgtcagggtccctactcagcagagagtctgcttctccctcggtccctacccctacccctgctcatgcttgcccacttgcttgctctccctcaaatacataaaatcttttaaaaataataaagctgtggggatcccttggtggctcagtggtttagcatctgtctttggcccagggtgtagtcctggggtcccaggatcaagtcccgcgtcaggctccctgcatggagcctgcttctccctctgcctgtgtctctgcctttctctctgtgtgtgtctttcatgggtaaataaataaaatcttaaaaaataataataataataaagctgtgggcctgatgtccacactaagttcatggatatggctgatagttaatgtctctcagttaattaaaatcagtttcactaaaaaacttcccttagagttaattaggtcttccaaactcctaattacatctagactctagataataagccttgcttaataggcttattaagctcatcgaattaaaattgaccccttaaaaaaaattcacctcttcctcccctccagccctttatactggttattcaacttcatcttaccaagatggtggctgggaagaaaggatgtttgggatggaaactggggtgtgactctcccagtagcaacatggagaaatggagggaattgtgaactgggggtgtccacactgcttcgacttccagaagaccccacccactcccattctcctttcccagccacccacctcaggcctcaatgtcagcctcttccatcctcccttttcccaggcccacacactcccagggttctggaagaaagctctctcacctggatggaccacaatgaagatgagcaacagcatccaggtcatgtcagagggtattccaattggcaaaggggacctgagaagtaaggtctgggtggagaaagagcaacctactgcttgtggccaagcctttggtcaccagatggaggttaggagcttcctatgatacacaggactcacatatctcttatcaaggacttcgactgcctgggacctcaggcatcaaatgcatgcctcactgaggagagaggatgctgctgaagacagtatctgggtcactaagaggcggaagtaacacatggtcaagggcctaagtgtttgagggaaaggggggcttagatcgctgttcacagtagggtgggtctgtgagaccaggatgtggttcccctacctcctgaggttcaagaagaccataataagcttccagaaaccctcctgtgctcagagctaacatacttccacctcgcctcagttcagtggtgcccaggccaccccatctgttcccttccctttagtctgggccgtccccagagctgctctagaaattctataattgaggggattaggagaagcaagctgattggtgatggtggcaggcggttgctagggtctttgcttggaagcttcatttgcatagcaatcaacctgttttacttagatcctgttgacttgagtggtttggctgggtgattgcgaaggatggagaggtctggattcattcatattcagatctccattaaaggaatataccccttgctggggtctactctacttgtggtgctctgcaagcacttgtcacccactggtaaacccactctattattttattcactatttagctagcatttcttgagaaactaccaagtgcccattacatgaaaaatattcttacagacacaaaggaaagcctttgagttcgtaactccaaggttatacaaggattggtacaaggatatacctcaggggcccctgggtggctcagttggttaagcatctgcctttggcccagggcatgatcccggggtcctgggatcgagtcccatgtcgggcttcctgcaggaagcctgcttctccctctgcctgtgtctctgcctctgtgtgtgtgtgtgtgtgtgtgtgtgtgtgtgtctcatgaataaataaataaaatctttaaaaaaaagaatacaccacacattgttgtatatgtattacacacctatatgagatagcacagcacctagaagaggaggattatatgcacaatactagatgaggtatgggcccagcctttaccatacagttctctttggctctttttatattaatgcatcttttccctttgtgatgggggaacagaggactagctgaggacaaagcacaaggccagggcagcacattgacaagtccttaaaacaggcagagggaccttcctctatggactcaactgcctcaatggtcatactttgctaagggtaaaaggtaatcttagcccgacccccaggatcctacaagtctactttaacaggtaaaaattcctttagaaagttcctttatctccatcccccaagatacatgttggcaatcatcccccaagcacatagcccacccatacacatctgaagggtctcatgactcaggttttattagacggtaataagtgaccttttcccaacaatagctggtcccctcaaggtcctggaaaccttgcttccaaattccttagagagtacactatcctcaaatccctcccaactcccaggtatataatcagccacccctcatgggccggggcagcagcccttcctgcccatgggtcctgtccccctgctttaataaaaccaccattttgggatccctgggtggcttagccatttagcgcctgcctttggcccagggcgtgatcctggagtcccaggattgattgccacatcaggctccctgtcttgagcctgcttctcctccctctacctgtgcctgtgcctctctctgtgtgtgtctctcaggaatgaataaataaaatcttaaataaaaaaaattaaaaaaaacaccattttgcaccaaaagtgtctcaagaattatttcttggtcatcagttccagacctcacctatattccaaaacatcatcatttgtgtccctgtttctagctctgtttcacaatacatcggtaaactccaattcctattcttcactgtagtgattggagttttcttttggagaagcagcagtgtcatggttaagaatgctggcttgggaatgcataggtggctcagttggtggctcagttggttgagcggctgtctttggctggggtcatgatctcagggtcttggtctcgggctctctgctccacagggagtctgcttctccctcttcctctccctctctttctctctcaaataaaatcttaaaaaaaaaaaatactagcttggaatcaacctgggttcaaataccagcttctctacaaactagctatatgaaaaaaaaaaaaaaaaaaaaaaaaactagctatatgatcttgaataaattatttaacctcttcaaaccacctgctcaagcacacatgcctcatcatctggggaggactgtctcagccattctccatctgtagagtagagccattcctcttctgggcctctaacccgagggtgggaaatggacctgccatggtcaggcaagggctgccccctggtggtcatggagcagggggaggtggtttttctcactctgagacgcagaaaggtggtttttctcggatggatcttaactccagcttccttgcgcccagtacgttaccttgccttgccccctctcgtcctatcaacagcccatctccacccccaaagagtcaatgtagaggccattgtctcttctactcacctatgtatgagaagcctgcagtttgaggagggagtggagatcgtcaccagtagaatgggggtgtggggctgggatgggcacctggcctaaagatataacttccatactctcacagtacacacacatggcactgctccatgtcctagggcaatgtggcttagaagtaaagtcagccgaagttggagtcctggttgcactactcacacctgtgcgatgagagtaatatcttgtcaatgtccagactccactgtatgggatgctctgtgtatgttagctcccagttcctcctcagtttggggctaggatgaccattgttacagctgtgtctgaactcaagtgtatcctgctctctccacctcttgtctctacctaagatttccaatttccaaaaatgtggattccaaagattgtacttgggttttttaaaaagattttatttaattgagagagagcacatgagtgggatgaaagatcagggggagagaaagaaagactccccaccgagcagggagcctgacatgaggctcgatctccagaccctgggatcatgacctgagctgaaggcagtcacataactgaccgagccacccaggaaccctgtacttggattttttttaagtccatctagaataaatcctagtatactgtgtagattcagggacccttttcttttcttttctttttaaagattttatttatctattcatgagagacacagagagagacagagagagacgcagactccatgtagggtgccccacgtgggactcgatcccagggccccaggatcaggtcctgggctgaaggtggcactaaaccactgagccacctgggctgcccctggggtccttttcaatagctctgagatctctagggaactttaacctgcaggatggtaactgttgcactaattagcccaaggagggacttttttcaaagaaacttttactggggactcaagaagaaaggcaaccaataaagttgtgaagtggatgcacacacatcttgaatttaactcctttctttctaaacctactttaaaaaatattttatttttaattaatctttacacctagcacagggcttgaactcacaaccccaagatcaagtcacatgctctttgatccagccaggtgcccatctggtctaactttttaaacatctccctatgagctgccttgtgggtggtcaggaccaataaacacaactcagagttcagagcaggaacagaaatgaagacacagaaggaactctggaatcccagtacagtgatcttgtgttagtagtgctgagatgtgggtgccttctcctttagccaagtccttataaacattttcaaagaattagcagctcccatgttctacttttaacctctaaccacagcttctctgaggctcctgcatcagacctcaccaccttcagtctccttgctgacacagactaatctccttcccattcatcaagagcaggcacctaacttcccagcttcctatctatttcaacctctgccatctttctgggagacaatatccatgtaaattatgttttaaacactgagatataaatatatgcagtaaaattcacagatctttaaaaaaaaaatttaagcgcccagaccttaagcgtctagttcaatgtctatgcactcctgtaaacaacattgcaagtgagaaacagatcacttccatcaccccagaaaattctcccatgcttcttttttggtcaatccctctcttctcccagaagcaatcactgatttgtacccctatagattcatacccctatattatacctctatacctctattcttgaacttcatgtaagtgtaatcatatagtatatactcctgtatctgacttctttcattttgtataatgtctgtgagattcatctatttcgcatgtatcagtagtttgctcttttttttatcttttctgttttttttttttttttttttgctgagtggtattctataatatgggtgtactacagtttatccactcacctgatgatgtacaaatgggtggtatgaacattcccttttttttttaaagattttatttctttatttgagagaaggagagagcacaagcagggggagtggcagagagggaagcaggcttgctgctgagcagagagccccatgcagggctccatcccaggaccctgagatcatgacctgagttgaaggcagatgcttaactgactgagccatccaggcacctatgaacattcttgtacatgtcttgcaaatgatttttcttttcttttcttttaaattttatttatttattcatgagagacacagagagagaggcagagggagaagcaggctccacgcagggagcccgatgtgggattcgatccggggtctccaggaccacaccctgggctgaaggcaggtgctaaactgctgagccaccagggctgccctttcttttcttttttttagagagagagtgtgtgtaagatgaggggaagggcagagggagagaatcttaagactccatgttgagcccaagtgggggctcaattccacgactcatgacctgagtcgaaatcaagagtcagatgctcaatggactgagccacccaggtactccaacaaatgatttttcaatatactaatgtcccagttgcttaccttgtctactccagccatcaccttgattctacatgcctgcaccttagatcatgtgaccatggaatttgtttcactttggaatcttccctctctttcctaggaacataaaagcaattaggcctgagtccctccagactcctataccctgtatatgtgctttcacacaattccactgttgatggattttttttaaatttttatttatttatgatagtcacacagagagagagagaggcagagacataggcagagggagaagcaggctccatgcacccggagcccgacgtgggattcgatcccgggtctccaggatcacgccctgggccaaaggcaggcgccaaaccgctgcgccacccagggatccctgttgatggatttttgtattctttctctcccactttcattcaacaaatattgagcatctaccaggcttacctaggcaatcctgtcatagacagttttaaccaccacttattctctgtccagtctccaatctatatctccatcacagtctataccttcccctgaggcctctttcttgagccaagtccagaatacctagctgttctctagacatctcctccaaagtgttctacaggtgtttcaaaattatcagtgtccacccaaactgggtcagcctcctggtattcctcatctcagtgaatggaaatacaatccatctaaatcacttaaggcaaaaacctgggatttctatttttctgccttctccctcaattgccccatccaaatagtctccaagtcctgtcgattctgcctctgaaatctctctctctctttttttaaaagttttatttattcagagagagcgagagagaggcagagacacaggcagaaggagaaaacaggctccatgtaggaagcccgacgtgggactcgatcccggatctccaggatcaaccccgggctgcaggcggcgctaaaccgctgcgccaccggggctgccctgcctctgaaatatctcaagcatcttcccacctcttaattctcatagctagttaaggcccttgtcatctcaggatgaaattagtacaattgcttctctgacggatagtgtggtttcttctcaatatccattccataccttctgttccaagtgttgaggctcatctatctattcagcaatgcttttattgagttctttccacatgctaggctttccatctacctcttcttttatgtttttcttcacctttccccttcttggtcctatctcccacatctctgcacatgactcttctcaccaaaaattttaaaagatatttatttatttatttatttatctatctatctatttatttaagagagagcaagcatgggagcgaggggcgggtgagcagaggagagggagaagcagccttcctgctgagaagagagctggataggggacttgatctcagaaccccgggatcatgggatcatgacctaagctgaaggcagatacgcaactgactgagccatccagctgcctctcttctcacatctttattcatatcacttgttttttccttatgtctctatccacaacccacgtctctctccacatctttactctgtccccccaggtacatctgcttattcactaattctttcattcaacaaatatttggtgaacaccttctatttgtgaggcacctatctctccaaccctctctcttacctcatttctctctacatctttttccacctccccatctttccctacattttcccagcacctctctttccctcagcccatctctcatttctctttctcccccatttctttctgggtgggagaatgagtcagggctggcaaagcacttgcatttttcctctgggagccaaggaaagccttcccagactctatcaggctggctgggaccactcccagatgccctcagattctctgtgccaggttctttattcaaaaaaaaaaaaaaaaaaaaaaacaagaaaaagaaaaagaaaagaaaagaaaaaagaaaattaacctacgctattaaaagaaaactttattttattaaaatattttatttattcattaatgagagacacagaaagagagacagggacaggaagagggagaaacaggctctctgcagggagtcctgatgcagaactcaattccaggatcccgggatcacgacctgatctgaaggcagatgctcaactgctgagccacccaggtgcccctaaaggaaaactttaattcacatccatcagaaactggtaaatcaaacaggtaaataattactaaagacaaagaaaatgaaaccagatagtaaacaagcttgatctaagggaaatatatagaatcctagaaaaactagaaaatatgcacttttcaggtacaacatagacatttagaaaaagaatcaaaatcatatagaacacaattgctgaccaaaagccataacaatttaagagcaataacaaagaatatttattacatgcatagaaagttttaaaagtattttctttttttaaaagtattttctaatgtatttttaagctttagaaaccctaagtaatttaaatgttcaagaaaatattataatagaattcaaaatattttgaactgaaagacagtgataatactgcctatctaagctgtggaatgagctacaacaactcatggacgaaaataaaggtgtatattaggaaagaaagtttgtgaggcatctggaggactcagtctgttgggtgtctggtcttggtttccgctcaggtcatgttcttggtatcttgagatggagacccaagtctggctccacactcagcagggagactgcttgagattctctctcctttcctctgccccttccccatgcacatatgctctagcacacgccctgtctcttactctcaaataagcaaataaatcattaaaaaaaaaaaaagacagtttgaaaatctttgagttggacagataattcaagaaattagaaaaaaaccacataataatcctaagaaattgaagaaaataataaagatacttttagaaattagggacataaaaaatatacaatagagcagaaaacatttttacatatatataaaatatgtaatattctacatatttacaaagactactaatattaaaaaaatctctgggatccctgggtggcgcagtggtttggcgcctgcctttggcccagggtgcgatcttggggatccaggatcgagtcccgcgttgggctcccggtgcatggagcctgcttctccctctgcctgtgtctctgcctctctgtctctctgtgtgtgactatcataaataaatgaaaattaaaaaaaaaatctctgaccaaattgattacacaaaaaaaggagaaagggagagagggcacacacacacacgaataaataatttaaagggaatataatgtcagaaacagtaaatatttacattgtaaattttgagaaatgaataattttctagaaaaacatatgaccaaactgacttaagaaaaaaattaaaagcctgatatacctataaccattaaagaaattgaatcaattgtttaaaatttagccatcatcaatggagtgcctggctagctaagtcagaagagtgtgtgttcttgatctgaaggggaggaggacttgtgagtttgagccccacagtgaatgtagagactagttaaataaataaataaataaataaataaataaataaataaataaataaataaataaacttagaaaaaaaataagccattaaaaaaaaatcaccaagcccagatagttatgaaattttcaaaacagatcattccagggatgcctgaatggctcagctgtttagctcctgcctttggctcagggcgtgatcctggagtccgaggacccagtcccacatcgggctccctgagtagagcctgattctccctctgcctgcgtttctgcctctctctctgtgtgtctctcatgaataaataaataaaatcttaaaaaaacaaaacaaaacaaaacaaaaaaaacagatcaggcggatccgtgggtggctaaccgtttttgcgcctgcctttggcccagggcgtgatcctgaagtccctggatcgagtaccacgtcgggctccccccccccccgcatggagcctgcttctccctcctcctgtgtctctgcctctctctctgtgtctatcataaaataaataaataaataaatcttaaaaataaaaagaaaaacagatcattccaatcatataaagattgttctagtgattctaatgatcaggaaacaggaaaagtttctcaatttatttcataagattaatggaagccaggcaaaggcaatctgataaagtaaaatgataaaacaatttcactcataattagatgcaagacaaaaaaagaacttaataaaaagattaacaaacataaaccagaattgaataaataatataaaacaacttaaccaagcagaggcagagacacaggcaaagggagaagcaggctctatgcagggagcgcgatgtggggctcggttcctgggactccaggatcaggccctgggcagaaggcagacgctaaaccactgaggcactcaggcatcccaaacagcagtctttatcctaggaaagtaattcactgttcatgcaattcctaattctgttcatacaatttattgcattaagagattaggagaaaaatccatgggactctcaatcaatacagtaaaagcatttagttgcttttgttcatgatagtaactactcagattctaaaaataggaagaaaagttcacaagtcattcattgttttaaaaattacaaacgtagggcagccagggtggctcagtggtttagcgctgccttcagcccagggcgtgatcctggagacacgggatcgagtcccaagtcaggttccctgcatggagcctgcttctccctctgcctgtgtctctgtgtgtctctcataaataaataaaatctttaagaaataaaaaaataaaaattacaaatgtgtattatgtctatgtttttccatgaaatgtagtgttcatttttgaaatagttttgtattttttgttttggtttcttcctgttcccactcttgttatctaccatgttttctgattatttgcatttcttttttttttaagattttatttatttatgaaagacagacagacagacagacagaggcagagactcaggcagagaaagaagcaggctccatgcagggagcccgacatgggacccgatcccaggactccaggatcacgccctgagccaaaggcagacactcaaccactgagccacccaggtgtccctgattacttgcatttctgatatgtgtccttccttcactgctaaaaagctacaccaaattttgttgcttttcaatttatgatggaattttagactgcaattttcaccagcttttggcaatgtatctctggtgagttgtcatctgtcaataaattgtgttgcctttattattattattattttatttatttatttgacaaagagtgagagaggggggtgggcagaggtagagggagaagcaggctcccgcctgagcaggaagtcagatgcagggctcaatcccaaaaccctgagattatgacctgaacccatgagcctaagccagacacttaactggctgaaccatccaggtgccccactcttttttttttttctttaattttaaattcaatttagttaacatatagtgtaatattagtgtcaggggtagaacttagtgattcatcacgtgcatataacacccagtattcattacatcacattccctcctcaatgcccatcactcaattaccccatcccccactcccctcccctccaacatttcctacagttaagagtctctcatggtttgcctcagtctctgtttttatcttttttatttttcttttgcttcccttatgttcatctgttttgtttcttaaatgctacgtatgagtgaaataatgatatttatctttctctgacttatttctcttagtacaataccctctaattccatccacgtcattgcaaatggcaagatttttgtgttgctcttttttaccttctttctcatagaagatatctttcttctttttatcttctttctcaaagaacagaatcgttgttcatttcttttttctcttcctttttaaaaaagatttttatttaattatttaagagagagagatagagcatgagcaagtgggcaaaaggagagggagaagcagagtccctgctgagcaaagagccctaagtgggtcttgatcccaagaccctgagatcatgacccgagttgaaggcccatgcctaaccaactaagccacccaacaactgctctttttcttttttaaactctatgttcaacgtggggctcaaactcaggaccctgagatcaagttacatcctctaccaactgagccaaccaggagtcttttttttgtttgtttgtttatgtccatgtttttttttaagattttgtttatttattcatgagaaacagagagacaaagacacaggaagagggagaagcaggctccatgcactgggagcctgacgtgggattcgatcccgggtctccaggatcgcgccctgggccaaaggcaagcgccaaaccgctgcaccacccagggatcccaagagccgctattttaaggagcttctacatatctgtgctcagatctagattttgcagcctgtcagcaaaccatctatttcttttatctccatgttctcagtggattcctcacagctgccctctaatgcacccctgaagcaatttgctggcctagaagtcctacatccccttcacccttactattaggagccgccttgtctatgacccagggggcgggcccctgggtctggatgggccatgtcttgcctgttacttttcataggctttctccacatttgtgtttatgctgggttttgttctccacccttttgccctcctagatactcttacttttcacgtttgccctgtgtaagagcagctattgctttatctcaggaagtttctctgagcctctaagctctatcccactatggtagtctgccaaaccatccttgatagaaagaagagtccgggaggcagtctcacctcgaatacaggccagagccttcccaaaggcctatcatgccctatacaatctggcctcatatcctgcctgtttcccctcacacacctggctctagctacactggccatcctgctacttcacaaatactccagatagccagacatgttctcacctcaggacctttgcacttgctgtgcccactgcctgaaatgctcctctctcatatagccacatggcttatttccatacttccctgaaatagttttttttaagattttaagtaatctctacacccaacatggggcttaaacttacaaccccgagatcaagagtcatgtgctacactgactgaaccagccagacaccccttccttgaaatttttgctcaaatattttcttagagaagtctctctgatcaccctctttaaaactgcagtccagggcacctgggtgctcagtctggtaagcatccaacttcggctcaggtcatgatctcaggctccttgctcagcagggagtttgcttgtccctcttcctcttcctctgccccgacccctgctcatgctcccactcgctctctttctcaaataaataaaatatttaaaataataaaaatagggcagctcgggtagctcagcagtttagcaccacctttagcccagggcctgatcctggagacctgggatcgagtcccatgtcgggctccttgtatggagcctgcttctccctctgcctgtgtctctgcctctctctctccctgggtctctcatgaataaatctttaaaataatattaatattaatattaaaatagaataaaccagcagtccaccactgcacgttctatcctcccttccctactttgtttttctgtataggtacctgccacctttaatatgtttattattttaagaatttttcatttttaagtaatctctacatccaacttggggcttgaactcacaacctcgagatcaagagtcacatgctccactgactgagccagccaggtgcctaaatatgtttatgtttatagtctgtcttctgcagttagattgtccatgaggatgagaattgacatttgtttggatcactgaagtggcatatagtacgcatctgataaatatttgttgaatgaatgaatgtatgagtaaggaaatgaattctcctcaccaggcattgagacttgagtgcagggttgcagctttctctgaaagggacaaagcagttacagtaaagagaagtccagaagtcagagtttaccccagcatcttcccccacctgcatgggtcagggagagggcagtgagaagtgaacactcccagttgcagaaggggaagtaaggtgggggggagagggaaaggaaaagtgtttccatctatgctgggggagggtaggtggagctctgggtggggagtttgtttttattttattttatttttaaagatgatttatttgagagagtgagaatggaggggcagaggaagagggagagagtgactctcaagccaactccacactgagcagggagccccctcaggactggatctcacatgcctgagaaaccaagtgtcagacagtcactgaactgagtcacccaggcattcctgggtggggagtttgaacaaaaatgtctcaaacatttgaggggaacatgctatcctcacctcccctggaagtactacccatgcaacaaaaaaaggaaaaatgatatgcgtggggaagacatttattagaggctacttacccactctattgaacccagggtgactggcaccgaatcacatacacacacacacactgcctcctctaaggctggctttatacacacacacacacacacacacacacacttttgtgtccacaaatgctgcctgtctcagcaccactttcatttcctccaaagaatctacttaaattctctaattcctgagctctgtagatttcactaaatatttcaaggaatatatgatgagtggattacattgcacactctaaagcaaacaaatacaactaatgtgctagacatttccatatttccgagtgcctctggggagctcccagactgggaatgaagcttgtctccctttctgatcctataccatcttgccatcctcctagatctgccagtggacttcagatttttctcctatttcacggcatagaaaaatcccagtcagtccttcctaggctgtgtatccaaacctgtgtgcccagactcatgacatccaacaaaatgcaagccttaagacttacctgccctcctgacttgttcaaagatcatttatttgttcctgagagtaactacccctcccccatacctccagtggcttcttcctcccctgcacagactgggctctccttaagaggaaccagggagaatgctattttctcatctccatcctagagcccccctcccggccgcttgctcctggggtgctctgtcagcagaagctgagggggaagtgaggcctaggacaggaggaggagggaatgaggagaaaggggaagtttagggggagggctcaaagcaggctgatgggagaggaaagccagcagacggagagcactggcttgatctctatccacctgtctaccggcctctccatcagcatctgctgagctatgagccaaaccagggatttacagggtagggaaaagtagaagaggcagcacctaaaatgagggcaaggagatggacagacctggggggcgggggcaggaaggttgtgagcaagcccaggagggcagatttgtgattaccctgggccagtgtgtggctaagaagagggatgggtaatggggggtggtaaggaaacattaacctttgtgccccctcaggaggaaaagccttcgggctcctgaaggcccagcaggaagacagactggatgaaatcaacaaggtaaaaggaagatctaagggggccagaggggggagggaaccaggggacctatcctggctcttgctttctcccacagcaattcctggatgatcccaaatatagcagtgatgaggatctgccctccaaactggaagccttcaagagtgaggggaaaactgcaggggctgagatggggggtagggggtgaggagggtacaatttcctcaagaacagagaaaggacagcagagacagagtctacatgtatggtggggaaaagagaggctgcctctcctgccttcctggttgcagtctcttcccttgggctgcccctctcagcaccctctctggttccctgtatcttaatagggcccctcaagccatccagcacttaccctgcctgccctatctcccccttccatgtcttcccctacctagtgctaggtcagcagcccctttctcaagtccctgccctgctcctgcctgagaccctccagccagcacttaccctatctgctttctcccctcacccagagaagtacatggagtttgacctaaatggagacggagatatcggtgagaaaagggtgttccagggaagtgtgcggacccaggaagagggaggtctcccctggagtgctacattcctggtggtttgggagagggtccagctcctagaagaggaactagaatggaaatgtgagggtaaagacagagagagagagagagagagagggactcccttcttccacccctccttttgcacttctagatatcatggccctgaagcgaatgctggagaaacttggtgtccccaagacccatctggagctcaagaaattaatcagggaggtgtccagcagctctggggagaccttcagctactctgactttctcaagatgatgttgggcaagaaatctgccatcctaaaaatgtgagagtccagtttcaacctctactatgcgtacctgttttctcctccaccctcccccatccccaggctcacctacacattactcagtgtccatttctttccttctttgagggaccgttccacattcctgtccctatctgttgttctggtctccacacacccccagcactgccatccttgctcttcttccccctccccctaccataatgaccactatcctcttccagactttcacagcagcctgagatttattatcccgagaagactgacccctgatccctctgtctctttctatctcaaccagaatcctgatgtacgaggaaaaagcaagagaacaggagaagccagcaggtcccccagctaagaaagatatctctgagttgccctgaattgtggtaggggagatgtggtgggatttatggggcttctaatgactcccacatagaaaaggacacagaattgtgagccggaggtacactaaattaaataaactatccttcttcagatcaagttagcttggtctccatttggcggggatagttttcctgggtttgggaagaagtgaagcacctttgacgaaaaagcagcaaggatttgccgatatgagcaatccatccacaattttgtaacgtgtgaactacagtagatggttttgtactccaagggagattccagatatatgatagtctggatctcaaggaatttagatgggacaaaaggacatgtacagacaaaaaaaaatattgcccagacccatggggaagagcaaggatcatctctgtttttgtttttttttaagatttatttattcataagagacacacacacacacacacacacacacacagagactgagagacagagacataggcagagggagaagcaggctccatgcagggagcccgacgtgggactccatcccgggtttctaggatcataccctgggctgaaggtggcgctaaactgctgagccacccgggctgcccttatctctgtttttaaaaagattttactatttttaagtaatctctacacccaacgtgaggctccaactcacaaccccaagatcaagagtcatatgctatattgactgagccaccaggcaccccaaagaaggattatcttgaaccaatattctccatcactagtctttgttacctaacaaatcactaagcctctctgagtctttcatcagaaaatagggatgatatgacctcacaccaccgactgacatatcataagccctcaataatgtttaaaacttgaataaatggatggatgggtggatggatgaaagaactaatgttattaaaaaaaaaaagaactaatgttattgagtaaagcctgataattcaagtgttaaataagtcatggaggtccttttaggggacaagctgcagaaactgaatctaatgaagggagagggggcttgtatttggaggatattgagaacagatactggggatacagaaaccctggatgggatccctgggtggcgcagcggtttggcgcctgcctttggcccagggcacgatcccggagacccgggatcgaatcccacatcgggttcccagtgcatggagcctgcttctccctctgcctgtgtctctgcctctctctctctgtgactatcataaataaataaaaatttaaaaaaaagaaaagaaaaaaaagaaaccctggatggcagaaaggattaaaaggccaatctcagggaaggcaggaacctcagagttcccaaaatttcagtgaagctattcctggacctttcctccaacaggtccagatgaattaactctagccatctccagtcactggatactattcagatttcctgacattctggaaagagataatccaattagcccagcttgtttcacatactgaggacagactgttggctcttctcagtggtgatgccaggttggcctcctaaaaagtgctacagtaactatataggacttcagatgaggaaaagatcactgcaagttgggtaaaatacctgaaaataatgaaatcaatagctaaacttattgagagtccactctatactgggtattatcctaaatgccttctatgtattaattctcttaatctttgcaacaaccctggtgataccaaggaggatacaaaggacctggagcttaaaacactcattcattcagcataaatacattaggttctattcatacatcagaccattattatacagcaacgagaaactacaacgacatgcagcaacgtggatgaacctccttagtgtaatgttgagcaaaagaagatagacacaagaggacccttatgatataattccatctgtataaagtacaaaaatgggtaaaactaatatatgttgttataattcaagatagtagttagttttgagggagggcagtgacgggaagaggccctctagaggccttccatgttactagttaaggttctattttcggctacatgctctgcttagtttgtgacaatttatcaacaatcaatcgatcaataaaatatgcttttgataaaaaagactttaaaaatcgtttactgggcataggtgcttgggatatgagggtcaataaaacaaagacccttgccgggatccctgggtggcacagcggtttagcacctgcctttggcccagggcgcgatcctggagaccggggatcgagtcccacgtcgggttcccagtacatggagcctgcttctccctctgcctgtgcctctgcctctgtctctgtgtgtgtgtgtgactatcataaatcaaaaaagaaagatccttgccattgtgaagtttacatactattgtggaaaatggtgtgggaggaggacagacaaacatcatttaaaatgtatatgataaaaaaataaaaaataaaatgtgtatgatattagaagataaagtagagcaggttaaaggggatcaggggtaacaggatgggcagggaaaattaaaattttgagcaatcagagtaggcctcactgagaagatgaccaacactgaacaaagacctcatggaggtaaaggagtgaggcatgggggtttctgggggaagagtcaacttggtggaggaaagagaatcaaagggctccaagatgtgatatgcctggtagaggtagggagagtaataaaatcagagggccaggatggctgggtggctcagtggttgagcatctgcctttggctcaggttgtgatcccagggtcctgggatctatcgagtcctgcatcaggttccctggggagagcctgcttctccctctacctatgtctctgcctctttctctgtctcacatgaataaatcttttttaaaaataaaatgttttgaaggtctggagatgaaatgttcagtgttggacgtactgaatttgatatgatctattaggtacccaagaggaggtgtcaagtacatggctgtgtatccaagtctggagtttgggagagaggtctgcagtgaaggtatgcatgtggggagtcattaccacatgaatgctatttcaagtcaggagactgatatcctccacacacaagtggtaaaagattggggtgaaggtttgactggagttggtttaagaatgcatgacaggatggaaattggtgacagtgactatggaaactcttggaagaattttgctgtggtagtgaccgggagaggcaaaagggaatgatttgatgcttnnnnnnnnnnnnnnnnnnnnnnnnnnnnnnnnnnnnnnnnnnnnnnnnnnnnnnnnnnnnnnnnnnnnnnnnnnnnnnnnnnnnnnnnnnnnnnnnnnnnnnnnnnagcctcagataaattctttatctgattcttgttaccttttctcctctcaggcagtctcttaatctagtcacaccagcctaggcacgggaccctaaaaccatgcctctcatcaccacttcactaggcctgagctgtgcactgtctcctcaaacttgggtaaatcctaactagttattcatatatcttagtaagagtcacgtttttctagaatcatctctgaacctctccaagcaggatctggttttgttcctctacttccataacatattgcgggtatctccggggccttcgaaacatagttgccgaaccatctgcggaatgggtagcaggtctgattggggtacagtaacagaagacaaaggagggaactagcacatttcgtagaatgaaacccattgtgaagagaatacgaactgccagcagtaccagatatacaaatatattcaggaaaactgttataaaattaaatgtgtcttattcatgggctaccgatttgttgattaagaggtcgttccaatcctatctttgttcaaatgatttgcacgtattatgcaaataaatagaactagcaaaagaagatctcccaagccgggggccgacgaccacgcccctgggccctaggattggccgtctagccacctcatttgcatgacgtgatttaataactacaaggtcccgcctctccgtgctttcacttctcgcgaaaggacgcgtgagttgggactcttccttggttacgtaagctccgccccccagctgctaatcccttccgcccggtgctttcgctccgtctactccgccgaaagctctactacccttgcatcgtttccctccactctccgcgtccctacgtctctcagctctcatctttccacgaacacacgacgtatgccccgccccttcccctcctcaattcgtcgtgcaaatcctgcgccctaaccgccgggacgaccggcactgcattcccgccccctctacgcctcttaacggctgacgccgggggcttgtctctttagccaaccggcgtcctagcgcctgaaagtccttcctttttatgcaaataacctgtgcctgctccgcacgccttgctttaaaaaaaaaaaaaaaactaaggacagccctcgaagtaaaggaggctagggaaggtggtgccccgccctttatgcaaatcagggggcgtgccatgcgccgagggaggcgggaggtggggggggtgctcccgggggcggcggttgcccggatgggccgttagtcggagcccagccgcggagtgagcgagggagacgggaggagccgaacccggcgccatccgccgccatccgcccccgccccaccgccatcccacctcggggagcccctaggccccggtccccgacccccgcgcacccggccaggtgagtctggggagccgagtgctaacccccctttccggcgcgggagcggtggcggtggcggcggcggcggcggcggcgggccgggggagaggagaagctgccattagccgccgccattttgtcctcctgctgccggggcctgcctgcccctccccctctgataccccagcttggtacccgcacctccaacccctcacccagagtccgtggcgtgcccctaaccacccgccttcccgggttcatggggcgacccctctcctgggcccctggctcccctctcctagctgcactgttagcctcttcaccccaatctgtgggtccccttcctcgccgccactctggtgggccgcgcccgacgatcctcggagcgtctcctttcctccatattgggccaccctcccatcacccagtgctcgggttccccgttcttgacgcccctcttcgcctcgagtcactcccaccctaaaaccctgcttttatcctacatcgttgctttctacgttcttcagcctttctctgcttttgtattttccctatttttattttcctttctcttctctatttgaacccccctttttttcttgggtctcttgacattgccttcttactttgctttgtatcttttctttaccatttctggttgagtgtatgatttctcacctgctttcgtgttgtcatcttttattagtgttactccaccattttcctaaccttttccatcatgtatttatctccaaagattggagtctttcagcacctacacggcaacccccattccttcatcttacctattttaaagttcttggttttcatcctgattttaccgagtttttatcgtgggcctgcctggatttaacaccacctcccatgtctttcctgtacatcattccttcctataaatgaatgcctggtcactcaggaaccgactgacgatgcagagttcggcctgcttagggaggaagggatagtggggagagaaatgactgctgatggacattcttactgagggtaggaaaatgaagtagtttctggctttggccccatggttacaatgtgcttgaggtggctccataatgtattgtttttctcaaatctgcatagcgtaagccagagcccaccagtgtttatttcgtttggagaccagatttttttttccaagagctgggatgggggcaagtgggaaaagatggagtgaatattccaaatacttggggttctgtagcttggaagtatatagagccccaattccatgaggaattttctggcactagcccccagtctgactgagcaagcttgtaaaatcgttaaactcctggcataccttcgtgcaaacctccccagatgggagtgaggctgctgggaaagggcacagttagggagctggtgtctgataagtcagaaattgaaagctctgttccttgcaggatggagttcctatgcctctttctggttttctctgggactgggacttgccatgttttatcatacatctctggaatgttttttgtggagggagaagggattattacttgcgataatgaagcagcagctactttttataggctggcaccaaaaaagagtgtatactactaggaggatattggattttttatttggatttccttggcaagaggtatctggggggaagaggaaccatggcatttgggctctgtgggagttgcttttaagggactggggagtttgaattaggctagaggaaaagacagagggccacatatttgggcccgtaatgaaaaatgaaaaggagcatctggatttctcttggagtcagtaaaggaagcagagactgaaacaccttgtgtctggcccacaggctccggcacgttttgggggaggtgcctgcaggacccaacatactcaatgagcttccagcgcaatgtccgatcgctcggggccgactgccaaggggaaggatggaaagaagtattcctcgctcaacctgtttgatacatataagggcaagtccttagagatccagaaacctgctggtgagggtcctcctaagatgttcctaattcccaaaggctgggcatgaatggggcatacattttaaagttctttgaagggaaacggttgaggtacaagtatctgaagactagaggattactaaagactttccagctttatcttgggtcccataggggacattgggctttggatggacaccagttaccctcctacaaaggcatgtctgtagttccttgtctttggacatgtaagaattggaggcaaagaaatgtggacttggagaagtctggggccagcttgctccctgcaggctcaagatgaaccatccaacagagaagtatcaagtgtaatgcatcttagtgtttccactggaatttcagagattgctgaggacagaggcaggagtggtttctaagagaagttggtaacgatattgaggtataaatggggcctagggtaggaaactgtcagatcacccacctggggtgtttttaccctccccatcttttctccagttgcccctcgccatggcctgcagagtctcgggaaagttgccattgcccggcgtatgccacccccagccaaccttccaagcctgaaagctgagaacaaaggcaatgaccccaacgtctcactagtgccgaaagacggaacaggatgggcaagcaaacaggagcagtccgaccccaagaggtagacagaggcctgggggacccagagtgataagtattttaactttgaacttcaggatggatcggagactagtctagcccagccacctaagctccagagactgagggaagctcctttcttggcaatgcgagggctcccattagaggtctcaggaatgacacttttagctttgtgtcaggttgaaggaaaacaacaaacagatgacactgtatgtggggtgactaggttatagtattttgtcacaagtgcttgcgaataataacacatgggcttgggtctactttctgtcctccaccaattggagaagtaggggaggcatctcaggttccagataatctttctgttctactatcctcttagttccgatgcctcaaccgctcagccgccggaatcgcagccactgccggcttcacagacgcctgcctccaaccaacagaaacgacccgcagcagcccccgaggtatgaggaactggatggcatcaaagggctggtggctagaacggtttgtagttccaatacccacatcgctgtttattatttctctgcttcctcagaacactccttcggttccaagcggggtaaagtcctgggcacaagccagcgtcacccatggagcacatggagatggtgagtgcagggctgcttggggagcttgctctgtgcactgtggtaggcaggagtgttcactcactttagcaaagtgttttcagtcctctggctaaattttggtcctcatgttcagtttcatggatcacgtaagccgagggtgagggtatcccaggactgaccttgtttcttggggaatgaatacacagtgtaatagtgcatgagtttgaaaaaaatttgatgatttggtactgatcagccttcagttttttagtatcttctcagtaaatgtgatttttttttttggtttgctgttctgcacgccaacaggtggaagggcatcaagcctactgtcacgattctctcgagaggaatttccgaccctgcaggcggctggcgaccaggacaaggctgccaaggaaagggagtctgccgaacagttgtctgggcccggaccaagcctccgcccccaaagtgagtggttgccatttgggagttgaattggggggtgggtggttatattttgcccagaacaataccttagtccatctcagagctaagtgttggcttattcaccttgttcctcatcatttttggctatgttcttctttgtcttcttcaaaatacagattctacaacttggagggacggaggcgggcgtggccctgatgagctggagggcccagactccaaacttcatcacagccatgatccccggggggcgctacagccttcgggcccgccccagttccctccctaccgcggaatgatgccgcccttcgtgagtgtgcatatcttattttggagtggttgcacttgaagctggagagttagcagttaggacttagcctttgaaggggacagggaggataacaggtttagggagctggctgcgtatttgtccctctaagcagctactgttgggcctttttgcagatgtatcccccatatctcccgtttcctccgccctatggaccccaggggccttacagataccctactcctgatgggcccaggtgagtaatccaggtctgggcttgtggttggagacaagggaagcctcttaggaaggaagatggtcttctagcctagaggctgagtcttgtatgtggttctataacatgccatcttttactctctctccatttgtcttttcacacacagccgtttcccccgtgtggggggtcctcggggttcagggccgccaatgcgccttgtagagcctgtgggtcggccttcgattctcaaagaggataatctcaaagagtttgaccagttggaccaggagaatgatgatggttgggcaggttagtacatatgaaggatgaaacgttttggtttgaaaaaggcaaaatctgatgagtaaacaggggattgtgtgggagaaaaagagacgctgaagggtagggcagacacatggcggaaagccaagttctggtaaagaactgagatatgggaacgcgaagacccacactgtggcttcattcagaggggtttggtgttgggagtgcatcgcactgtgtaatattagaccccttcctgtgttccgaaagttatgagagttagagaacagaatgcttgggttatcagttttcactttccccccacaggggcccacgaagaggttgactacactgaaaagctcaagttcagcgatgaggaagacgggcgagactctgatgaggagggagctgagggccagtgagttagggggctcagtttctcttgcagtaataccctcttaaaggagctggtttctaactgattttaattccactgttggtctcctcacagcaaggagtcccaatcagctgctggtgaggaacggccccctgaagcagatggcaaaaagggcaactcccccggcagcgaactgccccctcccaagacggcctgggcagagacctctcggcctccagagacagagccggggcctcctgccccaaagcctcccccacccccacctcaccggggccccgccgggaactggggcccccctggggactacccagtgagtgtctacaatgaggggttgagaagggtcagttgtgggagaggagtgtcggctgagaagttgaagcactagtaattgagaaagctggagggagggtcaggaatgggctacaggaagtgtaaagcagtggagcatctctgaaaaggtttggagcctctttggtgttagaggattctggattaaaagaaattgggatgctagtgaggaaaaacgaggcctgggtatttgggtctctgaaaggagcgaagaagtaagaataggacaagttggtccctacccaaaaaggccaccaacccaaggccagttcctgcccctacagctagagacagttgatcagtatgtgacaaagataagaaacttgatgactgatacctctggccctgacgggtctgcccattgacaggatcgggggggccctccttgcaagcccctagcacctgaagatgaggatgaggcctggcggcagcggcgaaaacaatcttcatctgagatctccttggccgtggagcgggcccggcgccggcgtgaagaggaagagcgtcgcatgcaggaggagcgccgggcagcctgcgctgaaaagctcaagcgacttgatgagaagtttggggcacctgacaagcggctcaaagcagagcctgctgtcccacctgctgctgctgctgctgctgctgctgctgctgctgctgctcctgccccagctcagccacctgcagtccccaaagaaaattctgcacctccagctcctccacccgcaccagccccgacaccagagaaagaaccagaagagccgacacagtccccccctttccagtccacccccactccaggtgtggctccagctcccaccctggtgagtggtggtggcagtaccagtagcgccagcagtggcagcttcgaagccagcccaggtatggtgatggggatagggtactaccaggtgtcacatcttttctcttggggctgagggtgcaggtggtatggatgggaggcagttgtttcagtttattggattatcagtggcagagaaaaggagtccctttgcgcgtgtgggtatctatctaaggtgggaaaggttttactatctgcattcctggatgagtagtggtctgaagcacttgccattaggttagcatggagtgagactgaagacagtgtctgttttggcggttttttgggaagttcactccatcatcattggctcttgaagtaagcgcttatctttagagagggtgctctagagttgagtgcctggaggtgttttgtggcaggtctctccacaaactcgttcactctgattatctttttgtcgatgcagttgaaccgcaacaatcctcaaaagagggttctgaacaaccagaagaggttccctctcctgccacgacccctgccccaaaggtggaacccaaaggtgatggggtcggtcccacccgacagccccccagccagggcttgggctaccccaaataccagaagtcattgccaccacggttccagcgacagcagcaggtgagagcattttttcccttggtaagagcgatttccctccctgctccatgtgtacctgttctaaggtgtcagcttgaatccctctactattactgtctccagtgtgtcatcctggcttttatttagtcctgatcttttattttttatttttttgagtcctgatctttgttacgtctgtgtgttagcgttgtttctgggctggttttttctgttaggggcgaggcaagggttttgatggcctctgttgtctttccccaggagcagcttttgaagcagcagcaacagcagcagtggcagcagcatcaacagggttctgctccacctgctccggtaccaccatcaccaccgcaacctgtgaccatgggggctgtgccagctccacaggctccgccaccaccccccaaggccctgtacccaggtgctttgggccggcccccacccatgcccccgatgaactttgatccccgctggatgatgatacctccttatgtggatccccggctcctccagggccggccccctctggacttctaccctcctggtgtgcatccctctggtaagggcctttgaggggtgggtaggggacgctgcagtcccaggaaattgctgtggacgaagggcccctgggtaaggagggagggtgtgtgcttaatgttgctgagattgctctttgtttcaggaatggccttaggaaggaaaaagggggctttcattggccagatttattgggggggggggcaattcattgattcattcatacacttgattttagacagaaggccaagaagtgatcatcaattcattcatagggaagctgagtgtatcagataacactttcaggggagcatgtcaggaccagacttgcagggagtaagagctggaggagtagacgtcgacgtgactaacagaagtagatggggggagagatgctttttgagctggatggcctatcacatagaagagggctagctttctcgtccgtcttgttttcttaggcttagttccccgagagcgctcagacagtgggggttcaaactcagagccatttgagcgtcatgcacctcccctcttacgggatcggggcaccccaccagtggatccaaagttggcctgggtaggagatgtcttcaccaccacatccactgacccccgcccgcttacctccccactgcgccaggctgccgatgaggatgacaaggggatgcggtgagtctgagcagtggaagtgggtgcattgccagtgaaaggatttgggctaggaaaagaggaccttgggattattggttaggtgacaggaataaacattagaggagtgttggggtactaatagtgttctctttctctacctagttctgatttttctcattctaagttacttaattttcatttttttgcgtgtccctttttaggagtgagacccctccagtacctcccccaccaccctatctggccagttatccaggctttcctgagaatggagccactgggcccccaatccctcgcttccctctggatgaacccactcccccagggtcccgtccactcccctggcccccaggcagtgatgaagccactaagatacaggctccaccacccaaaaaggatacccccaaggaggagactccacagctgatggggacagaagccagccgaaagcctgcccgaggagttggaggccaaggcccccccccacctcgcagagagagccgcactgagacccgctggggccctcgcccaggcagcagtcgtcgtgggatccctccagaggaaccaggggcccctccccgccgggctgggcctataaagaaacccctaccacctacaaaagctgaagagctgtctcccaagcccctggagcagagtgatgaaagccccaaggttccaaagccagagctcctcaagacggcaaaggggaagatgggggtccccaaggagaccccacctagtgggaatctttcccctgcccctaggcttcggagggattactcctatgaaagagtgggtcctgcctcttgtcggggccggggccgaggcgagtattttgccagggggaggggctttcgggggacttacgggggccggggacggggagcccgaagccgagagttccgcagttaccgagagttccggggagatgatgggcgtggaggtggagcagggggactgaaccatcctcctcgaggtcgcactgccagcgagacgcgaagcgagggttcagagtacgaagagatccccaagcggcgccgacagcggggttcagaaacgggcagtgagacccacgagagcgatctggccccctcagacaaggaagctccccccaccaaggaaagagtgctcacccaagtctctcttgctcctccaccatcaggagcccctccttcaccagccccagcccgcttttcgactgcccgaggtgggcgcgtcttcactcccagaggagtgccatcacgccgggggcgagggggagggcggccccctccacccatttgtccaggctggagccctccaaccaagtccctggctcccaagaagcctccagcagctcctttgccaccaaataaggagcctttgaaagagaagctgatcccagggcgtctgtcccccgtgacccggggaggcagcagtggaggcagcaacatgggtatgggtgtggaagacggagaacggccccgacggaggcggcatgggagggctcagcagcaggacaaaccgcctcggttccggaggctgaaacaggaacgagagaatgctgccagaggggcagagggcaaggcctcttccctagcccttccagcccccagctctggagcagaggagacacacacaacagtgtctgtgcccccaccccctcgccgggcagctgccaaatctcctgatctgtcaaaccagaactctgatcaagctaatgaggaatgggagactgcatcagagagcagcgactttgccggtgagcgccggggggacaaggaggctcccccaccagcactgctgacccccaaaggtgtgggaactcctgggggcagcggaggtggaaccggaccaggcatttcaaccgtgtcccgtggagatctgagccagagagccaaggatttgagcaagcggagcttctcaagtcagcggccaggcatggagaggcagaaccggcgcccgggcccaggcaacaaagctggcagtggtggcagcagcagtggaggaggtggtgggggacctggaggaaggaccggcccagggcgaggggataagaggagctggccctctcccaagaaccggaggtgggtagggacaggctgttcagtttatttttaaggtggaagaggggagagaacctgaagggaaggttcagttgattgcggtgaagtttgatatgtgagggtgagggcacaggggctgctgggcaccaaacacctgtgtctagggaaagtaactggaaagcagttgattgagtcaggagcaaccgtgtcttttctgttctttgtttttcaccgtatagctccaggcacaaggatttcattagacgtagttgggaacacctgggttttaacaggcaagaggaaggggttataagattgactggtagggaaggagttaacaattccagaaatatcctagctaaagttctgttcgttttcttcagccgacctccagaggagcggcccccagggcttcctctgcctcctccaccctccagcagttctgctgtcttccgcctggaccaagttatccacagcaaccccgctggcatccaacaggctctggcccaactcagcagccgccaggggagtgcagctgcaccagtgggccacccaaggcccaagcctgggccttcccagacccctcaaggcccctccactcggcccccaacccgatatgaccctgagagggccgctaacaacaacagcgttagttcaggtaagctggaggggccgagggcaggaatgtctccatccccagggaagaagatccggtggcagagggggaagagtctggccaggggaccttgacgctgggtgcctgtactggacaagggtggaaagattgggagccaagtagcaggaaaggctaggctcagtggtagcgcagagtagaagctgacagatactgcctttttcccagacccccacttcgaggagccagggctgatggtgaggggggtgagcgggactccccgggactctgccggggttaatcccttccccccaaaacgacgggagcggcctcccagaaaaccagagctgctgcaggaggtgagggatgaagcttgagcttgtgctttactgctctatagtccttttttgtcttttctccattgtcctgttctcatctctgtgtcctcaccccagattctcagtattagtccctttctgccccatacctcactccggcccaggctcttccagtccccggcccccacctcattcatgttttgtttctggctttcctcacctttaggaatctttgccaccttctcatagctctggtttcttgggccccaagcctgagggcccaggccctcagggagagtgcagagatacagggacagaggccctgaccccacacatctggaaccgtttacatactggtaagatggagtggtagcaggggaagggctctgtcagagggccaagagggcagcctcgggatggtctctcacttctgtctggtcctcttcccagccactacccggaatagttaccggcctggctccctggaaccctggatggaacccctgagccctttcgaggacgtggctggaacagaagtaagtgacaatgggagggagtatcagagctgggattcttctccacctgttctgggtgtccgggctatgcagtcacgtagttgtgttatttgtcaaacatcagtcaggtattagggtgctttccaccttgacttaactgattccttctccactcctctcagatgagtcagtctgacagtggggtggacctgagtggggattctcaggtgtcatcaggtccctgcagccagcgaagttcccctgatggaggactcaagggggcagcagaggggcctcccaagcggcctggaggcccctcatccctgaatgctgttcctggtgagggtccacctggctctgaaccctctgaacctcctaggagacggccacctgctccccatgatggggacagaaaggtaaaaaaaaaaaaaaaaaaagataaaagaggaatattcttgagactctgaatttggccttatgtttttctcctccttcctgttcttgtgtgtcctggacattccttcatttgcccaaatttcctttacttccccaacccaggagctgccccgggagcagcctctgccccccggccccattggcacagaacgattgcaacgtacagaccgaggcccagagactggctccctccggccatcccatcgacctggtccccccgtccagtttggcaccagtgacaaggtgtgcatgggcaggatctgagcaccttgggtggagaggaggaaaggattggaggtgggatgtggaggatatgcatcttgaaccacagaatgatctcctttgcatcactaccacaggactcagagttgcgcctagtggtaggagacagtttaaaagcagagaaggagctagcagcatcagtcaccgaggtgagtgggacaatgagagcttggtggaaaggtcttcagttatggagatgatggctgggtgtgacctcgatggacgtcagggaagctgactttgcttctgaccaggcttctttacaggccatccccatatcccgagactgggagctgctccccagtgcttctgcctcggctgagccacaatccaagaacctgggctctgggcactgtggcccagagcccagctcctcaggccagcgcttgtacccagaggtcttctatagcagtcccgggcctcccgtttcccaggtaagtgacctgcctgcttcctatcccatgaaccccttctgcctgctgtccctcaaaatccaatcttccaatttgtgtagttgtaaaacatttatagttttgttttgcttcttgcttttactgtagtaggtggggtgggcagtcttttcttgaccagaaaaactggagctattccagccttgcccctcccgcaggtctcgggaggagccatagactctcagttacatcccaacaatggaggttttcgtcctgggacaccctctcttcacccttacaggtaagattggatgcctgtggatctcagaaggaaatgaactgtgtttcagtggggaggcctgtttcaggggtaccagaagctggtagacttttagctcagaacaaaggagtaagtgattcgggcttcctgactccttcctctgcacctaaattttgcctcccttcagatcacagcccctgtacctccccccgggcccagcgcccccctcagcactgctttctggggtagctgtcaagggccagtttttggatttctctgcactgcaagcaacagagctggggaagttgccagctggaggaatcctgtaccctccaccttccttcctgtactctccagctttctgccccagccctttgcccgacccacctttgcttcaggtgagagatgggcaggtgctgggcttttagggggttaggggtggcggggggatgcttttggggcagttgacattgctccctgttgtccccagcaggtgcgccaggatctgccatccccttcggatttttattctactcctctgcaacccagtggccaaagtggcttcctcccctcaggggcccctgcccagcaggtaacttttgtcctgccactcacccttttcatctgttctctattcaatctctggtttatttgtctgattgtatttttggttttctgatattctttcctgccctcgacacccctccctcatcacctgtatttcttattgtagatgcttctacccatggtggactcacagctgcctgtggtgaactttggctccctgccaccagcgccacctcctgccccaccgcccctttctctgttacctgtgggccctgctctgcagccccccagcctggctgtacgacccccacctgctcctgctactcgggtgctgccttcacctgcgagaccttttgcccctagcttggggcgagcagaggtaaggtacaggaactgaagtgttagggatctcccaagagctaggcgtggggattcagtatctcaggatcaattgggttgaaaggcaggaggctcatgaatttttttttctttcagctgcacccagtggaactaaagcccttccaggattatcggaaactgagcagcaaccttgcaggacctggatcatcacgtactcccccatctggaaggcaagaggagggtgtggggatgcagattacccatccatatggctttcttaggggaccagggagcaggttaggcttgcctcagacacccttctcctttaggtccttctctggcctgaattcccgtctcaaggccccgccttctacctacagtggagtcttccgcacccagcgcatcgacctctaccagcaggtgaagaaaagacccctgtggccccaagtctgaatccaagagttaccatctgaattcctgtctttccatccctggcatcccagtaggacttatttttgcacatgtgcctgttccccaggcctctccaccagatgccctgcgctggatgccgaagccctgggagcggacggggccaccttctcgagaggggccttcccgacgggcagaggagcctgggtcccgaggggacaaggagcctggattgcccccatcccgctgagggagttccccttgccccccaccccccggggcttgtatatagattataaatatataagggggaatggggtgggtggggaggtgtgctgggcctgggccctcgctttcccctccacccccccttccctggtcccctatccctggggccgtttgttaaaaaagagtaataaaaggattaaaaaaaatttctggaatgattttggggatgggttggtttttgatctcttctggcagtatagtgctcagggatctgtagagaggttttagggaatttactccccccaatgatgttttaacaagcggtctcaaatctgttctgttgtatattgaagtctcacgggctgggaattagagctggccttcactggtgaatgattcgtatgccattgagtgaggtctgctggctaccagtctgcagctggtggctaggctggtgccacaggtctaccgtcgtgtgtctggggctctggtgtttatctcaagggtagaaaaaatcccactgggttgtcaaccagtgtctggtttgtccagcaaggtggtagagtcccggagatccctgggtggctcagtggtttagtgcctgcctttggcccagggcgtgatcctggagtcccaggatggagtcccgcatcaggctcccggcatggagcctgcttcttcctttgcctgtgtctgcctctctctctgtgtctctcatgaataaataaaatatttatttatttattttttttttgttaaataaaatatttaaaaaaaaaaaaaaaaaaaaaaaaaggtggtagagtcccagggcctgctacgtccgagttagtgttccaagaggtcccagcggaaactgtgaagcctatgacctggccttagtgtggcttctgccacacagtctcagcccagcactaagctagccaacgggaacgggactgcaagcaggcgtgtgtctcaggagggagcagcaaagaatttgcagcctcctcatggttttgttccagctgcaaatgagaggacgtgcctttaaagctgctgtggctgcagcagagttctaccagtcactctgcaagtcatgccaagagtgtgtgaagtctgcagctgcttagaaatcgtttttcactgaaaccacttttgtccatctctgaactccatttcgtttacatgtaaaacgcttttgcatgaaagtgtgttctgaaaaccactgggctgggctgcttgtcagcattgtgctacacgagcaatgaatatgtggtagcgtgcagctccttactcggcaaggttgacagcggtcttacacagctgggtttctagggactatttattcattttagacaacttagagaagacaagtatttagattacttaggaaaactccgagacaaaagagccaggaaaatctgacttttattccttaaatactgtgaaggaagatgggggaaatggtcccctgatgagggagggccaaagagcaaacagctagggatcatcagtgaaggcccggtgggcattagggaagcgctgggggctgtagttggggtcttcctgcagtcgcttctgtatatcagcccggagctagagagagagaacaagcaggttggaggggcaccggccagggccctaggatcccagcaagcacgcgaggccatcccctaggagctagcgcttcccaccagccacgctgtcagaagccgaatacggcatcactgagccttcccagatgccactaggggaaaacttcaaaatatcacatagtagccccagactgaccagttagtctctgaagaaattagaaaagagaggccctagcccgacccctcccactacaccatccctattctgcttcaaggtgggggcacctgctgcctgtagctctcctgaacctctggtgcctccaggtcccggctcaggctctcggggctcgtcaggggccgagctccggctgccttagctgcccggctcacggcctctgagagaagcagctgggggccctcaccctgcatcgtctgggggacagggggtcgggagggaaaagaggatcgacgtcagatccagtgccaaccacccagctcaccctttccaggagccaaccactgagtttctaagctagtggagagaagggaactagttcacgagtggttctgccggcaaaaacacctccctaattttatctggctctgaccaaaacacgacacttgcgcatcctggactcactcttcaataccagaaggacagggtaagtggagccatcggcactcggctagtcagtgagaggaagccgcctgtgaggaagcaggccctcgccacacaggggagtcaggctgttgagggacgaccacactgctggcatatgctagcgtgagggtgtgccgcaaccaccacgagcaaatcaagtcccaggaaggtttcctcaccccataagtgataggacaaaagtaggaagaagtccttccagctctaactagtctgattctaaccacccggggggaactggatgaatcgagatcctcagggaagaggcagaccaaccttgcgtctcttggcaggcataccactgaggtaggcatcgctcaaggggggctgcggcttcactttccgctggctctgaatgtcctgctggataatcgggacccactcctgtggagggaaagaggacgaggagctggcgccacgtccagctatccctggtgctccagctctcctcccgacacttactggggggacggcagctgcccaaggctcagtctcggctgcagctccgtcctgctcttcacgggagccgccgccgccgccctcaggtgcaggaggaggccctcgagacatggcctcttctgccgttgttcctggggccggggaggcattctcccgctgcaagttggagcgggaaaacatgggcttcagcatccccagcctccagcccttccaccctcagccctccccgccaccttatctggcccctcaacctctccctggtacctgaggctcaggagaagtcctctctgatccctgaacttccatcggctcctcaggaagtggctaggaaattggacaaaaaagcagaagagcacaaaaggccttctcaagcctctcccgtccctgcaagtcccctgaccacactgcccatccaggcccttacctggggtgggtcgccaaccctgcggacgtatctgaggatggcatcggggcccacaggcatgtgctccagaaccacctgaagcctcagccccatcatagtggtcagccagctcaccagggacgggttcaccccacgagacatgcgacgctgagggcagaaagcagccttggaacacaacaccttcaaccagcttttgaaaagtatcaaaaggtaaaggacagcaatttggagaaggcaaaacaagaactgcaggacagcagagagaacaaaggcccgggggctgcgcggtgcttactatccggccattgatgacagcagcgagttccatctgctggccccccaagcagtgcaggttgagggccaggcactcaaacaggccctggttacacaactccaacaaacgggccccaaatccactatctgtggacaagacaagaggtggggatgctggcagctggcaccccgcgcctcgcacccccagccctgtgcgcctggccgccctcacctgtgcagtgcagcacatgagcagcaatgctgttgaactgctcctggagaaactccaggttggtccggatgatgtccacaccaggctgaacctgcaccaaagactgaaaaccaagacacacggagacccccaaatcagggagcctggaagactacattcgctccgaggcggtgggaggaacagcagctaccccggccccccgggagatgaggaactcacgaaactctcccgcacgtattcttccagccccgtgatcaatgtgtgggtcgccgtctaagggcaaaacagcaggagttcagatcccccaccctggcctgtgagacatgccctcccctccacctccagtaagtgcagggctcaggctggagcgatcggcactttaggtgacagagtggagtcaagaaagagaagctgaagaggagcatgcggcggcccccggccttcatttacccgtatgttaccgggtgtgggctcttggccacccaggtagtgctggtggaaaaaggaccgcagctggggctggagccgctgcagtggctggaaatggccgtgaagaagcatcaccacgtctaccatggaaaagttctggcacaaaagagaaagcagggccccgaagaatcctagggacaggggctgaagtcagcagtggcctttaccccctgccctgcctgtgcaccaccaacccatcgacctcatccagctccagcaacactccttgacaaaggtcatcaacctcccctcccctcccctccctggagaagaccaaggcaccctcgatggctcaccgagggccccatctgccccaggctcgaagatgttactggatccgctgaggcgctggatgaaagcagcgatgctctcactgctgccggcccgcgcccccagggagcccagcagggagttcagcacaccctgcaccacagatgtaaaaaactccggtgaaaggctctcaagacccaggcctccaggactccctgtgccaccagaaggggaccctggtgggggcacagtctgctgctccggtgctgggggcgggggcggcggcggcggcgggggtggaggggctgtctgtgctgcctggcaaacagagaacacacaacagaagacaaggtgaaaacggggacgagacaccagaaaggcacaggctgagagaagcccaacaggagagccccactgtggtctttcctccctggagcagaatgaacacatgtggtgacatagcagcagacttaggtggggctccagcccctctccccctgaacgcattaggttacaaaacagcaatgccaagtactatgtcctcatagcctcagctgctgcttctcccaaatggggataggtggggaatcggaatcaatgaggtcccagggctccctcccatcgacaggccaccagggaccgtagcccagcagcaacatcacagaaacaaggcaccagcacctggctggaccagcaggtgtgggggggagccaaagagcaagccagcaactcacctgcagaaagtcagtcatgccctgtagaaaggcggggacgccgggcatggccacggtgatggtgggagaagccatgccaggcccgccggccccaggccctgctggccccagcaagttccccaggagctgagagaactgcaggtcggcggccgagggctgagggggaggaggctgggcaggccccccgggagcagggccagctgtggtagcggtgttggtagtgccggcactagctgaagcagtggcaggggctggaggtggagccattcctggggtcccctgagctggagagaccaaaagagaaaagttgaactctgtagagaaacgagacaccacagcatctcattctggtcttgtcaacaggaaggcaaggaaaaaggatctgtggagaaaactgggaagcgctcgtcaggagactgaggagcaccggcctccagggtggtggacatcccttcaggttgagacgggcaagaacaaggactcacccaccagaacaggctgcatcaggagctgccccacaaggccgctcaccatctgggccagagaagcattggtacctagcccggagccctgctggagggagacagaaacagctttcagtcctgccctgcccattccccacgaggattcttttttttttttttttttttttttttttttttttttttttttttttaaattctttttatttttttttttaaatttatttatgatagtcacagagagagagagagagagagagaaagagagagagaggcagagacacaggcagagggagaagcaggctccatgcaccgggagcctgatgtgggattcgatcccgggtctccagaatcgcgccctgggccaaaggcaggcgccaaaccgctgcgccacccagggatccctccccacgaggattctttccccagactccccccaacgagagctcctccatccttactcactagagtacccgagacggggggccccccaggatgggaaggccgagcctgtggaggggtgggccgggcaatcaccacccgggtcggagccgtagggaagcctggcacctgctgtcctgtgggtggcagaggggagaccgaagagggctgagggccgggccctggcctgctagccgacagcacccgccaccatggaccgtgccccacctcccaagcttccccttccgggttattacctgcggccgcggaggcaacagctgccaccatggcctgatgagtgatctggtgggcgacggcgtgcatgaactcagggggcagggagggcagctggatgagggtggagcctggggggcgggtctgatgtaaccttgaacctggacccccttcaacccacccagtcggccctaccccttctctacccagagcttgcctgctctgataccctcactcttacccagggtctggccatgaccagggggtcctagggggccagtgggagcactcggaactccaccaggctgtgtgccggaatctgagcagggagacagagagagtggccctgaggcaggtggcaccaaggcttaaccacatcctcctgtgaccagcatcctgctggcccctaccgtccccatgagaaagcccgcttttccctccacctagaagggaggaagcactcccttcgccacgcaaacaaacctgcagggacaagcagtccctcctgcccttcccagcacatgtgcactcaagcttctgtcctggttcctctgctccatccccaccctcgctctctcacatctctgtgccaacccacctcccacatcgtgctgctcttctctaccgacaaccaaccctcattcaccttggatattcatgtgcatcatgaccacgggttccacgctctggtgggaaattcggatgaccctcgggtgactggtggttggggggggagctggccctggcgggggagccccctcggttgaagactcgacagtggtagaagtgggagccagggacgaggcctgcccaggaccagggggagctgcctccgcattggcagttggggggggccgagtcccattccccgtcatggtcacagtggttcccacattgatctggaagagacagatacagaagtcagaaataagtaaaacaagaggttaacccagagcatcccgaggtatactgctgcagtctccccgttctccaccactttgtgtttccgaggtctctaccccttctcaattcaagcctgacagctactctgggtcatgcgccatccctccaaggctccctggacccacctggatgggaatggctgcttgctgaagcaccatgggggtagtgtagtgagacatgggccggaccacatgcaggtgtcgtgggggcgcacaggccagattgcagcgcaggtcagacagcgccacgaaagtgttacccagcagccgcaggctctcccccactaagttgatcaagcgctggtcctcttctcggccctcctgctgtaacccccagggccgaggacaagaaagcaagacatattaggttgcaataaaccttgacgacaaaagcaggtaacacccttgaaaagccccatactctctatctctataccttcagctatagccttggaaggttccaggtagaccggtctcggcaaataacttctatatcgaatacgcagaaagttccctattacaacaggccttacagaaaatcagtacagcatcatctactaatctccctcactctacctaagcttcctgagtaattgaatcaaggaatcaagagacagaaacagtagatttacgcaaagatcatcaccttccctatacaaaagaacacgtcatttactcacaagtctatagaactgttttgttgcagacagtatttttttggaagaaagggttagatgtatttctgcctgttccatgtgggacacaactgggggtgagggggtgggtggcactcacgttattgttgtagtccgtggtggcagcagtacccagaacctcgtagtagcgctgcaagaagggctgaaggcggctctcaagccgctgtagctcctgaagcacttcgacatactccgcaggggaaggatgactgtgggcaaccccaagaggcagtgagccgaggccttccttagatccccaacctccaagctgacagactacacctgccctgtccccctgcagcctcccagacctctggccccatcccttctagcactagcagaacacctatccttcacctgcacccacgggaagacaagaagaaaaataattgcgtctgtctttcttgccgcacaatcccatccctacgatggcaagaaacttaactctcagaaaggaacataatctatgtgaactcaggggagagaaccttgattgggctcaggaaacagcatctgtatttcctcagccgagagaagagcttctggctcaactgccagccccaacctcattcagctggtccggaactctctctgccctgccatgctaaccccagaggtaagactgtccagcaattctcttctcctatcatccccttcctggttctcacacttcacttaggactcccaaccactctcccagagggtccctctggttctcacttgggtgcatttgtctctggggcaggtgctgggcccactggggctgggccagaaggggtgagttccgggctctgggctgaggcacgctcctccacttcttctgcctccataggctcccgaggaggcacttcactctcaactgcttctgatgtttgagagctcaaggctaccggctccgaggccacagctggtgtctgggggggcggctgactatgctgtgcttggggtccccctcgacactgaagtggagagattcgggataccagaggaagaggagactgctgcagattactcaggtcaacacagaacgagtggagaaggaactctaactaggctccctgaaggcagggctttgcactggtctgactccctagcaaccatgcaaaacttttaacaagacacataataaaaagctgtaatgcttaagggttactaacaaaatagaagaattatggttccctaagcttccacaagaagagtaaaaaatgtcacaagctacaatcacaacacaaacgaatggaattgggccatctcagctcaaatatgctaattaagaaactataattgagaaaagatgccatgagagttatctgaccaatgtgaaataaacttcccagataccaggcacccagaggattggcaggaacaagatagcccaacaaagatactttttcaccccaaagagtgaagactgaagagaagagaccagattaggcaggaagaatccagctgatatggccagtcatgccttcgccaccaggtggacacaaaaccattaagaaagaatgaagaaacggacagaccctagccagccttgcccactgacctccatccgggatagtaaggtttgtatatccctgatcatgtgttgagccatcaccagccgtactcggggctcactctacggtaaaagaagtacaatcagggtacgtctgagatgaagccatgcactctaccacccactgaaccagggccgagtgggctcctcaccaggtccatcccatctcatggcctccttctcccagatccccttccctgaccctcccaggcccgtgatacctgaatcggggcctgttccatgttgatgtgaacatccacagcagagccgtcactctgggaaaagggtaagggaagttgctctgggagaagccaaatactaaggcccccacacctccaactcattctctggagccccaccctttttctcaaagactgaggccgtatcagaccgcaggaccctggaaacccaatctaaagaccaagacacctttcttatgagctctctgctattaccacaaccaaaccacccctccccacaaaaactgtactatgtggaacacaagcttacaggaaggttaaaggttccaaccatgacatagctgttggcattccggtcatgaacagaggccccaggcccccgagtaccaggcgggggtcctccaccatgggtggctgaggcagatcctatcccagaagatgccccagaagggagcggagtctgaggaggagcccgttccaccaggtgaataacctttcccccaacatctgcaggaaaaacacacacacacacacacacaccaaagcattatataatcaggtaagcccaatgcctcaattcatctctctagacagctgcctcaacaacctctgaactgcctcccccaaactcttactgtattcctggagcttcttatcatcctgcagaactcgtccctgataaatgagccgttgtttctcagagggaatactaacagaggcagcaatgtgctctttaaactcctttacattcatctacaaggaaaaagagacaaaaaactagcagcgattggaggagagaagtacggaaggggaacaagtgacttttgggagtgaggggtaaaaaccactcaaccataaaaccgctacccatttgtcttgactgtgaggtaattattatgcaaagccccaaactaagacattttaacacctgtcaaaaaagacaataaacattaacaaagttcagattatgtgcccagagaaaaatatgtggctgagaaacagaaatactgagtgacatatccttctctccccgctcccaaaagaatgtgtctacagataccaatgacccctccccaaacacaaaatgctacaactctgcaatctcaaagacaaatgcaatgataaggaagcgggagtagaaaatcaagaaaggaaggttcaacagagcagaaagaaaagagcaaacactttcctaactgtagtagtgattcttgggaagcaccagtttacatacatctaatcacaaggacctatatgattttttctatatgttttaaaagctacggaacaacccctcatgattttgtctcaaaatatcacaggaattaatggcataacagccatgtctgtggcgctaaaaacaaaagattcaaattatgccacacacactagtgattccgctcagcagtgtgttagagttctacctgcattataggctctgacttctagcctttaaaggcataaaacagggatcccttggtggcgcagcggtttggcgcctgcctttggcccagggtgcgatcctggagacccgggatcgaatcccacgtcgggctcccggtgcatggagcctgcttctccctctgcctatgtctctgcctctctctctctctctctgtgtgactatcatacataaataaaaattaaaaaaaaaaaaggacataaaacagacctgaccaatttttaagacttgagttttggatctctgttctgtttcccttcccaaaggcaggagccatgtctgtcctcttgggctggggttcactcatgatgctggcatacgtatttctccctccgtattttcctctgcactgaattctttcaaggtgggaaaaggcagaacaaaatctgcctcattcgacagaatccataccttctccctcaacaacaaacaccagaaaacgtcctatctagaacgtgaacaaaggaaccaatgaagtaagatttaaggaccaaagaaattcggttctctcaggataacagacctacaacagaaagagttaatgggtgtcttccaaaagtactggggtctcacctgggcccccacaataaatgtccgagtctgagagtccaaggtcttcaccagcacctccaggctgtcaggctcctccatactggaagtggtactggtactatcagtgggctccatcgcagatagatctctaaagaatagagggagggaagcctcctgtcgcccagagctgattttatatacccggaagcctcaccggcttgagtctccgccctaatatctgaagagtttttcccgcacgagcctacacactcacacccgcccccattccccttctgattccgaggcaccaggagagaaacacaaagggcaggagatcgacggcacagggagctggaggacgggcaggtgggaggggctccgcaatgccaatcacagtaagggagggccagtcaggctgggaagccggcaaagtaggaagcaggagactcgtgtcatcaccagtcgcgatacgacaaaggccccaaaggtcggcaaacccccgggagcacacgcgagcggggggaggggggagtcgcgccagattttgcggagacagtggtttcgcgcacgcgcgccacgccacgcccaccgaacccgcctaaatcacgacagacccgaaatgacggacacgcacggggggccagattggctagctgactgcccccctcttccgccttccctcgatgctccaggagagcggcgcaatcaacacacaccacacacacgcacaaaccccaccgcaacccacaccaccaccccgggctccgcccccgacttccccacggtaccgtcacttccggtctcccccaacttgccaccgatggtcacttccgtttccccgatagtatttggggatcgcaaggcggtacttccggctccccccaggtcccgaagttttacttttgttgggaacgatgaggaagttcgcggccccaaacagtgagttccttggggccagacgggccggggccggcctggatgggagggagccgaacaccccgaggagccaccgccaccgtcgcccggggggccgtcctgcgcctgcgcgcgtcgcactacgcatgcgtacacctttaggcaccgcccaacccccgctaacgctgttcttgtctgtgtacgggcttgagctgtaggtggttgaggtggctactttaaatgcctgaaaataattaccaggtgaaagactatgtttcaagaggcttgggacagttgtgtgcctctagcggtttggcgactggggattatgcctcgtgaatctctgttaaagtcttggccggccgagaatttgaggcggcactgcgctggcctcctaaaattctgtcttcggcgcctccggaagtcctcctttctctaggcgttggaggtggttcgcgagcagccggggcgtgccgccgcgtggttgcggccgacctcggcgctgcgtggtgggcgtttggctggacgcgggcgccatgttcctcggtggcagcgtgcggccggtggacacgccatgttgtggagcaactacggattcactgcttcacaggactctcctcagaaagggcgcctccgagtttgggaattggaagggagtggagttggactgggccgaaacacaggattccggccctggagcactgaaggggccaccgaagggcttccgcaggccggggtcccccggcggactgggcagtgctcaccgcctgagcccccaacctcggcctcgggtaggcctgcctgcctcccttccgggcccacggcctttgtggggcctgtcgttcctactcgattcccagtactgattcataagagccctaataaataattgtttagcgagcacttggtttgtaacaggaatatactcagggctttgcgtactgtcctgtttaaaagcctttcaataccggagatggtcattacatccattttataggtgagtacacttaggcaaaactaaggcagaaccgacaaaccccggcctaccagcccccgggtcaagcacgtctactttactgccccaataaactactgtattttatatatatttgcttcttactataagaaatggtaaacattaaacaacaaaaaaaaaagaaatggcaaacattactcccagatgttataatgagccctcatatacccgttacccaaattttcttttaactaaatcacaatcccataacaaaccctaccactcagaacaaattggcagtctgtggtttatacataatctattaggaagccccatctttcattgcattaactgccccacccccttggcactatcaaatgactgcttcttgacaactattttcttgctatttgagaacctggagcccaccagaaactaagtgcctttacaaacattaattatagcaaatacttccttcggatttaacaacaggcaggcccttgccaagggctttatgtgcataatctcgtttaatcctgtgagattgacgatttggtcatcaatgaaatgaaaatggaaaaaaaaaggcactgagattaataaaactgcaagatctaagatctaatacatagtggagttagggtttgcacccactctgcctaataaccaatatcttctaacccttacatcatgtattctcttctaatgataaacattaagtgagtgaacttttctcaggggtgtacatactgtttccccaattacttcagaaagaaggcctcccatccactaggccccagcacctggttcatacctgttttaaagaacttaccaggctgtgtactgcaatgatttgttttgtttactcagctatttttctttttactgctctcaaggccagggactgtcattcatttttatgtccctaggggcttagctggcacacagctgggcctcacaacagtctgctaagtgaatcaatgaaagaatcagtctgcctcttttcagtgctatacaactgagcagatatccagctcggatacaggttgaagggccacaggcttctacctggagggctcagctcccattaattcataagagactctggacatgccagggtgtattatggagtgatggcatttagaagagggggaggaaggcctgaacactgtaagtaatctatgattgggttggaaaacaaggttgaagttactcattagcaggtgaaagggtcaagggtcaaggcaagggggctggaagcagagtggactaagtaacaagggggtggggggagagcagttaaggcaccagccacttcacgaagagcaccagctccctgctacctgaagatgttccaccaagtatgggcagctctgctctatctctttggtattctccttaactccatctaccagtgccctgagtacagtcaactgacaactcagggagtggatgggaaagaggtatggactgagaatggggaaagctgatggtgggagctctgagggacttgagtgggtggccttggatgaccagaagccatgctgggaacgaaagggagaaaggctgtgagtatcgtgataatgaatgcaagaacaagtggaaaaaaaaaaaaaaaaacacagtactgtggccatcaatgtggaaacacggtagaattgggggctgggtggttactcaggttgattgagagggctaaaaaggaaaaattgcttaatgactccatgtcataacccacccctagtcagaacaaagcagctgccacgccactcctctaagtcttgctgtcttaagagtaaagatgaagaggttgaatgggccctgtggtggggacccaccctcttctgatcccctcattctctgcagttcccagagccacacctgggcaggtggtacttcatcgcaggggcagctcccaccaaggaggagttggtgacttttgaccctgtagacaacattgtcttcagcatggctacaggctctgcccccatgcagctccagcttcgtgctaccatccgcatgtgagtgatgaggcaggggcaccaggaggtgcagtctctgcccaaaatatgagcacccacccaccaagagctaggctctttgggatatccactgtttttggcccactaagttcaacaattctgttagtttccctctgaaaagagatgagcctacccaaccatcccttggtagtttgaaacttcagagagaaataagatgggataaatagaggctggtactgtgtggctgggaggtcactgtcttttgtctttgccaccgcttctgtaggaaaaatggacactgtgtgccccggaaatggatctaccacttgactgaggggagcacagatctcagaactgaaggttggtgtactccggccttcactctccccatgtcccctgggcttgcttggttttgcatctctgtcctcacacttccccccccaacaggccgccctgacatgaggaccatgctcttctctagctcatgccccggtggaatcatgctgaaagagtcaggccacggttaccagcgcttcctcctttatagtgagtggggatgccagacaggaagggttggagagaaacacaggagggcggaagagcctctcactctgggccttatgaaatcatcccaggaaggactgggtgcttcccctcaccagggcagtgctgagaagctgggactttgatgggcctggccctgccctgctcttccagatcgctcaccacaccctcatgagacatgcgtggaggagttccagtccctgacctcctgcctggactttaaggccttcttacggactcccaggaatcaaggtaagggggtaaagtcccacagaagaggactaggactcaccaagtcttctgcaggtgctggatgaaagggactcaagtgatgtcactggagggcaggccaaaggctgacattattagagtggctgtgctgacacctccatttgtgtcataggctgtgatgtcacctgagggagccaggctgggctctgggctactcaaaagagaggttcctgagtttgtggtggataaaaggaggggggggggtcagacacagggaaaaagacctcagagaccccttctttgatgtggggaagagcagaaatgcattctcctctaccccaccatcaccaaccttgcttttttccctggagttccttcctttccattctcttcttttctccctcctcccaccagaggcctgtgagctgtccagtaactgacctgtggcttcatctgtgccccaaatggatatggtgagagctacagttgtgctgggggaaggagaagctggagactcccaactccctttcaagagtaataaagatgatttttcagtcctcatctcatttcgggtttgtctccagacatcagtcttccccacctctatctcagtacttccttgcactttctactacctaaaccccctgctggacggcgtcaggaaatgacactgagtggtggtaactctctttgtagtggtatatttaggatttgatgtgacacatttattgctgactgtgcaaacacctagtcccagagtgggaactccaagctccagttcttccccatactgcctgtctgaactgccaacccctctgaatcggtcctcctgcctatatgacctgcaccatacccactccccctggctcctgggaagatccagatccttcctgcaggctcctaatcactgtaggcccctatccacaccccttaacccacctgcctcagtcccattcttccctacatggcttagatcctaggatccaagggatcccttgggtctccaaccaccctcttaccctagtcagaagcctttctgtcctgcttctggtctccacctctgggtagttttgaaaggtaacgatgactctttagtctttatttttcatcactatgcttttttttttttcttttaaaaagtaaaggtggaaagaataaacgaaatgggagaaatgtaaaagcaagaagtaacaacagctggtgaattcaagggccatatccccattgtacataaacagatgccctaaatagctctactctcctgtgtgtgaaggaaggccatgccctcatactctggggtttcttccccattcctgaggtccctatgcttacatctgggtcatggcccccactctcctacacctatctttctcccaccccactcagggttgggtcactaggtcacaccctatcctgcaggcataacccctctcctgggtctcctctattccttaccctccctctccaacttctcatcctccaagtcagtggcttcctcctccccactgggctcccggaggctgactgccagcaccagggcctgtaggagaccaaagaggcaggcaaagtgcagagggtgagcagtaagtaggctcaacacagcatggagcccatgcagagcagctaggaaggatagtagcccatgcagccagaggcccagcggtccacgcaggcccaacgcgtccaaagctgctctcagagggcgtgagcacagccccagcagggctgaggcaagcagctccaacagatgcagagtcaggttggttgatatctgcagactctcctctgggctccccaggtactgcaagggagcccctgttcttccacctggatccccctgcagccagcccagcagcttctgacgctgccctggcttctccactggggcttcaggcacaggggggctcagtacctcttcaggggacactccaagtctggtgccacttgagtccacaggatcccagcccagtttgggaatggtccctccagtctccagtctcccagactcttgagtgttagaagcagtcttgttccacttgaaggaatccattctgttgctccccagttgctcatctcggtactctctgcttggttctggagcagccccagagctcctccgtgcccctgtgtccttggtcttgggaggccccacatctcccatggtttctggggcactatcccagtcactccctgaattctcagaggagctatccattcgtctgagttctggggtaggcaggtcaggcttcgttggtttccggtggccccaggggcgaggtagccaaccaccgaggcgtcgcaggaacatggttgggatgtgtagtgagtccctagattctggggctgcttcctggcaccgcttagattttcaggtttggggcctgagtgtctcctctgaagccagtctgttccagctcagaagaactgttatctgttttgtgagttctactctgaactcagaagtggctctccacttctcgggatgctgtgcagcctcaagtgtggaaagcggcttgtttccttttcaattttgaggtaaagaagagaggcacatccaaattcgttcaccaccaccactaccaccccacacccaagatgcaggacaagaatcccaggacctgacaaggcctgggttacccccacggtgttctccctgggtttctgggtttcctttcctgcaggcagcaccccaagtttcactcaccaaggccacgccccaaggtgccccagaaactggggaggcggtactccatccaagagggaaggaaggaaggcaggtggccctgggtctcaggtaatcccaatctggagagtcctgaactgctgacctaagggagctcaacaacaggcaaccaatctcctattgggggttaggagagaggtgttgagcaaactccagccagcagcgttcttcccttgattcagagggttatgaatcctacacagcggcccgaccggcagctgagacgcagcctccacaaggtcaggccagaggtgtctcgggaaatcgtcgtcgcgaggccaagcgcgggcctgccggggtacctaggcgtccgggcactgtgcactgcgacccctcccgggccgcggcctccccaggccgcctggagccgcagagcccggaagcagctgcaccagggctggagggacagacgggggcggagcctgcagctcgcggggcgggccctgcggatccacccccccctcccccccccgcgcccccgcgcgtttgtacgcgccactctgcagggtgcccgctgagatttggccgggcccgggcaggaggggaaacctggcagtgagttttcactgcccgagggtccctgggccgccagtgtttccctgacccttggttcttccctgcctcccccccgccccccctaacgccagcttttcatggccatgacttcatgaaaggcttttccggaaaagcaagctgcttctccggtacccgtgttgatcttcctgacccctccaggccgattctacttcccggggtcagtcggacaacagttaagctctccttcagccaggaacctggtatgagcagcaggagggcggaggagacaagtgtagacaaataatgtgcttcctacctctggagtttcaggtaataaagtgaaccttgatttaaaggttacatttgggaggccagagttctggctctagttcagctaacaccattgaggctggagaattcctaggccctcccagcccattggcctcttcctgcaagaccctgcctactctcatcacctcagagcttgcccaagcttcccctcactatgcattgtgtatttgatcatgtagctgcctcccccagctgtgagcaattagaagtttgggactatgtctcacacctcttagcacatagtatctgaacttgtttaaaatcagtaatcaggggatccctgggtggtgcagcggtttggcgcctgcgtttggcccagggcgcgatcctggagaccgggatcgaatcccacgtcgggctcccggtgcatggagcctgcttctccctctgcctgtgtctctgcctctctctctctctctctctgtgactaccataaataaataaattaaaacaaaaatcagtaatcaaaaggacacctgggtggctcagtggttgagcatctacctttggctcagggcatgacgggggaggggaggggggggcgggcgcaggatggagtcctatatccggctccctgcagggagcctgcttctccctctctctgcatctctcacgaataaatacaatcctttaaaaataaaaaaaaagtcagtacttgaaaaaataaaacagtgattgaattgactggagtggtcaggggacacttactggtgcaggcaagcctggcatagagcttgggcaattcctggttcaggggattgaaagaatagctgggggcattccaggctggggctagcacctggaagtgaaccagacgggcgggtaggtgaccctatcctgccaccagaaagggctaccccttctggctcaggtaggatttgcatgtggcccccagacttgtttggcctttcccacaatagcttccagaaaagtgaataaaacacaaaagaagaaatttgatttatttttcagctctcagcttctctctcccaaaggcagagcccactgactacaatctgagtgtttggaacctggacagacccccagaagtaaaagctaaagtgcctaggtccaagttcagacttcagcaatagatcaggatcagaccttaccaaggtcagaactcaaggttcatgtatgtcctcagatcccactcccaggccctgtctttctcctcctgccttctctcctctctccagctcagtgtggtcacccgaggggctctctccctcccagctatggcccgagtatctcgggccagaaagtgtgtgactcggggttggggcaccgatctgtagcctaatccttcctggtccctcttgaggacagtggggatggggttggtgcggccctcaccccggggtcccagccccattccaggctcccagcctcccctcagcagcagcttaaagcctgggctggaggcgggcaccccaaggggcaggttgggggacctgagatcacgaggcagtgacagcaggtgagcagtggatgtccaatgattagagtcttggaagtgagcattgcaggtctcgcagtactggaaggaaggggattgggacctgtaggggaaaaagagaaagagatgagggcaggggaagagtggagggagtggagagggaggcaggcagagcggggtggcaaggtgggaagtccttctagcctttctgctaagaaagaaattgccttccaacccacttagcaatgagggacccagaggggaacagctagaagaaatagcaaccaggcttcacaagatcttgggcaaggcataataactacaatttatatatatatttatatatgtatatttatatatatatagtttaaaaaaaattttttttttttttatgatagtcacagagagaaagagagagagaggcaggcagagacataagcaggctccatgcaccgggagcccgatgtgggatccgatcccgggtctccaggatcgcgccctgcgccaccagggatcccctatatatatgtatatagttaatcccctatatatatatattaactatatatatatatatatggtaaaccgtcatcctaacactttacatatattgacccattaaatcctcacaattctttaacaggtgctcttgttaccccccatttctcagataaggaaaatgaggcacataaaaattaggttgcttgaccaagtaagtagaatcagaatttaaacccagggagctgggacacctgggtggctcagcggttgagcgcctgcctttggcccagggtgtgatcctggagaccttggatgagttccacatcgggctccctgcagggagcctgcttctccctctgcctctctctctctctctgtgtctctcatgaataaataaataaaaatcttaaaaaaacacacacacaaaaaaaacagggagctcacatttactactactcgattccattgccatatcaacctacactggggatcagggagagaatctttgagtctgttccggagcctctggcatggagggactaggaagggcagaacacactgaaagatgggcatgggttaaggcttcctctcaccggttctctggattcctcgtctctccgtggctctctcggaccatgcgcgccacctcaggaaaacccgcttcttcagccagctgagcagcatccttgccacccagctcacagacacccacccaggcagctccacggcccaggagatagcgcacagcagccccctggcctgctcgagcagcacacatcaggggggtccaccagaaggcatcccgagcattgatattgccccccgctccccctgcctcgtggggatccaagagccttcttagttctgctaggtcaccctcctgggctgccctcagtatccaatgggtcatcttgtcctctgcctcaagggatctcctttgtccatgtcctgctgaggctcctacagcagcttcccccatcattcttctcttcttcctctttcttttcctgtcaggttcaggctgagatctctgggatgcagggatgctgctctcttctgcaatcagggcctcatagaaagcccgggctgcagccccattcagggtgggctccagctcttcaggctgtgactgctgctgcccatctttccagaggtcactggggttggtggccggggtgaaggtgatgagggagggcctggacatggcttttgggagaactgagacaatgagactaattaaagggcgtatgagacaagcaagccaatcccttggtggctctgcactgaccagaaccacctccacagatctgctgggatgaggaaaagtagccttttccaagtcaaaaacccgtcttatactctaagtgaccccacaacctaggaccctacagggcctaaggaccataggtcatgtggaaaaacagggagccatacaataacagcccatatccctcgtaaaggttaacttaacaaagatttaatgagaattgcccagaggcccatccctatcctcaccaataagtaaaaacagcttctctctcaaactacttgatcaccaggtaagacgtgcagttaagaaaacaatcagcctagccctttaaatcttccttgatcctatgtcagggtagggtctttccaaacaaaaacagacttttaaccttctccggatgcaagaagaagatttgggggagaaactccagtctctgtggagaccccacagggtctctgtaccacaaaaattttatctaagcaaaggtgctgccagtccaatagccacacgacccagacacacatgtgtgactgaaaaaaaaatcaaccaccacaaagcagaacttgagggtgcgggcgtgtgcgaagcgccaggctgagccttcgcacggtgggaccctccaggatgccacgtgcccaggcagcgcgaggacagaggctctgtcggttggggtcctacttctacataacgccccacaatgcccttcgcctcccggaacgtggccccccactctgagcgcagtttttggacctgcgaaaccaccgagttaaggagggctctgagaaggcgggaggaaacctgtggaatgccccgaagccgtgaagtgaaataacgtcacgccacccctcaccattattctgagcagggttcgaaggtcacacttagtgcccgcagcagaaggccccattcaagctctgagaggagatggaaaagtgcaaggggacgagcagcagaatggctggcgccacttcaggttagcgcacaggccgtcccaattctcacaccgctcacctcagcccagcccactcttcccacgtcccgcaagcaaggagcccggcctcacctcccgcctgaggagactagaccccggggtgaagcaccggcccgggtggggcctccagtggcgggcctgactctggcgagaggctccgcaggcaacaaggacccggtggggtagtcggggacgaggtcagcaccctgggctgccggcaaacacctggggcagagcctcgctgtgtgaggggagttgcaggaatccagccctccagccccgttccttccccgccccctcccggcccctcagttgcgcgaccctacgactctatttcccatactccctggcccagaacggggtactgcgcttccgcttccggtggtatcccgctgctccccacccccgagcgtcttgttcctgggcctcgcgacgccagggtcgttcgtgggtcatcctgggattcgtagttcgcctgttcttcgcttcgccagtttctctttacctgggactccatttcccggcgttcactgcggcgcccgacccttggcgcttgcgcgttgccctctccccaccctccccaatttccacacacaccgccccccgccccccccctcgctacttcgcctgccgcggtcgggtccgcggcctgcgctgtagccgtcgcggttctttggaagcagcaactcccctcccccacccaggtcccggtcccggtccccgcccagccggtgagtctgaggtcgttgccgcatcgagtcttccgtccttaggcgcggcacatggggtctccgcgcgttggtgtgggggtggggaaggaagtgacccggtccggcaccgggggagggagggttggcctgagaggcggggtgtggggactcctgtgagagggacccagggccacctccaggtcgtgaggggaaagggtcctggcttttgcttggaaaggataaacttcggaacccttgggaaaggtgtcggggacatgcggagacctgcggggtagggatctcgagccgagagccctgcgagggagggacttgacgtaaagaggagagggtgctggttttcgggattgttaggggtgtgggtaggacgggtgagcctagacctgtcggtttttcagaagtggtgggactccaaagagcctctagtgaataagaggaattggaggcaggtgcgccagggtctaggatcctttaagaaaagggggctccaaattcttccatggtcggggagcagagtgtggggaggagggaaggtaccagagacagggtgggggagcttggcctttgtttaccctcttttttttttttttcccagctgacgtgaagatgagcagctcagaggaggtgtcttggatatcctggttctgtgggctccgtggcaatgaattcttttgtgaagtgagttctcaatctcccagctatgtccgcacaaagtttggctgtatgtttttccacatatttagcttctacttctcttacaggctgtcatagaaactttttcctgtcaaggaagagtcccttcagtaactcccctcactaatttgtgaagtggcaagacttgcccatcccaagcctgttactgtccagcggtgtaatattggaaaagtcaactttattactactactactactactgttattcttattattattgctaggcttgtactagtagtgcttaatttgggagcctattaggattaaaatgccgtttatcaaaatgttttgtaacaggcaaagttttgtgctaatgatataatggattataactgcccacaggacccaagctgtttagtcgctgcttttcttagagttctagctgccggtaaggagaggacaaaactggtctgtagagatgggatcaagaataggaacaaggattttaaaaggagtgtctcgttaaggaagagattgttgtagctgcttatccttaggaaagaaaagccagagcttttatgggaaggcagtgtatgtgaactggggagagagactcaaggatttctgctgagttggtgtggggaattagggaaaacagaagcagttgtgttggaaacaaggcaccaattagagcaatgtgcccagatcaaagctgaggattctgctatgggtttcttcttgacttccacatcctgacaggtggatgaagactacatccaggataaattcaatctcactggactcaatgagcaggtgcctcactatcgacaagctctagacatgatcttggacctggagcctggtgaggcatcctcggggttatctttgtgtgtgtgtgtgtgtgtgtggtttttcttttttctcccaaattcctgttgatctgcttcttgaatttctaaatttccttttggttctctgattgcttttgtcctaagttctgtactttattttgctctctcatctgacttttgcctggatttgtgacagcctcattctacactctgatcctgtaacttggctctctcccttaatgttagtttcctcatggatctcatttcctgcttacctgtcttgccttgcacctttcagtctagagttccagcttctatgttgatctttttcatttatgtgttgagagagttgggagggagagaagagagtaaaggctgaagaggtatagagagaaggcagagctgccttgggtgggtgggtggaagggccagaggcccaggtttctgggtcaaatgcccaggtgatgggtggcgcaaagatgagtagccagcagcccctggaggtggatggggcacctaagaaagctgtaagacaagtgattgcaattggctgcggccatgtttcagatgaagagctggaagacaaccccaaccagagcgacctgattgagcaggcagccgagatgctttatggattgatccacgcccgctatatcctcaccaaccgtggcatcgcccagatggtgaggcctctctgctcccacttgactcctctgaggtagtaagggaaacaggttcttgcagcaaggagtcacgttttcaaacttgtcacagattatagctaagaagaggggaagagggcgcctgggtggctcagaggctgagcgtctgccttcggctcaggttgtgatcctggggtcctgggattgagtcccgcattgggctccccgcagggaacctgcctcttctcttgcctgtgtctgtctctctttctgtctctcgtgaataaataaaatctttaagaaaaaaaaaaggagggggaagaaccccagaacctgggcctggggattaaatcctaattggggttgtgctgactgaggtattttcagggagggagacgtgaccttggacaggaattttttgcagtctgcctcttcctcagggaacaaacagcaaatggctctgatggtctgtaacttgcctacctggagaaaaggaagcaggggagtaggagggcccatctggccagcttaaaatgggcatctggacggaaggaggcaggagtggaggacagagcaatgtgggttggactgaggaggggattgcctcttcttttcatacctacccaccggcccctttcattttattcacctcagttggaaaagtaccagcagggagactttggctactgtccccgtgtgtactgtgagaaccagccaatgcttcccatcggtgagtgttggagaagggaaaggaggcctcatgaaatggccagtcctctgggaaggaaatggggctcagcaagtctgagcctgagtctgggagggtggtggggcaggctcgggggtgcctggcctgctgagtctagctgtctcccaggcctttcggacatcccaggtgaggccatggtgaagctctactgccccaagtgcatggacgtgtacacacccaagtcatcgaggcaccatcacacggatggcgcctacttcggcaccggtttccctcacatgctcttcatggtgcaccccgagtaccggcccaagcggcccgcgaaccagtttgtgcccaggtggggagcagggatagagttacccagggtcaaaggaaaggtttgggattccccagagagaagggaggacagggcatggtcctttcttgaggtttgcttctcccagagcgagtaaccttggggaaggtgtttgcctgcctgtgcctcagttcccttatccatgaaatgggggtgatgacagtacttgactgacagggcacatttaagtagtgtggtgcttcgaatcatattggcacttgaagtcaccattcaaatgataactgttcttgtcatcatcttgggtgctcaaccttttgccaggagaaagtagtttaaaagtgcagtttggtatcatattgaaacaagtatgaatatgcgcacacacatagatgcgattacatgcatgtatgtatgtgtgtttaaagtaggctagaatttgagttttaatggttgttgaaggtacatttcctagtattctagagggaagatgtttgggagccactgtccttaatcactgagcagactcatggagaagctgaggtggggaggtggaaatacaggctgctgacaaggccagggtagggctcaccttgctgcctctctgacctctaccccttcccaggctctacggtttcaagatccatccaatggcctaccagctgcagctccaagccgccagcaacttcaagagcccagtcaagacgattcgctgattccccaccctacctgtccctcagtctttgacatctccgatcctttgctgccaccctttcaggaaccctctatggtttttagtttaaattaaaggagtcattattgtggtgggaatatgaaataaagtggaagaaaaggccatgagctggtctgctggtgcttggggttgggggacgggagggtactgctgtgcttcattccagggaccctcatggcccagcccaccctcaacgtgaaaaccagcacagattcagatttgtgcccactggatttgggtgatattcttagcagtagagcagaatttctagtatcagatgtggagatgtgcaaggcacaaggaaaagacccaggggaagatcagatttcaaaaactagagacctatttgttcttttttggccacctatggctgtatatttgtactgtaaggagtatagtcaacaacaaaaatcttccagtttttattttacagggccctggttctggcaaacagaactctaaggggtggagagagaatgaggttcagaattgctgctgggtggtgtctgttcgccccctgctgggggagctaagacatgcccatctctgaagaatggagatcctaggtacctggccaggttttcccagcactgtagggactggttttattgaatggggagaacagcaggtgataccagaggtagaagctgatccatggacccttgaggtgtgtgaatagatattttcaggacatgagggacaacaatagctggataaaggcccaagtgtcctttgtctgggccactgttcccacgttcaggaacccgacgcttgtgggtgaggacgcactgtcctccagccaagttaataacttcctcccccagtcaaggaatatagctctgcccctgcagcagctcctgctcaaactgtctatcaaaaccactctgcagctcaggatcaaggagcatggtcacaggaaggtggggtttcagaatacccctcagggactgcccttctccccagaattccatcatgaaagcccatatgcttgtaggtgtgctggtcatggtgggcttcgcagtgggaaaaggtaagtgggggcccaggggcaaggagagaagggtgacagtcctgagagtctgagaggggtggggttgtagccctggttcatgggttgcctgcaaggcagagaacttggaatgagccaacactcccgtctctcctgtcttctgctgctgcagctcctggtcctgaagtccggacctgccacctctgcctcttagaagacccttctacagggtgcatttcagggtcagagaagtgtaccatcagcagcacgtcaccgtgcatggtgatcaccatctattatggtaagtcaagccccaggaaggggctgctggtgggatagcccatggcccagtctcctttcctctcctaaatgagggctgcttagggcctgtggtacaggaataggacagcaggatcccggaaggaggagtctggggttttgggggttccactaagccagtttttctgaccccttctgaaggagtctgggatggaagtcaggtcttggtgagggattgggagagtttagggtgagtatatcaggtttggggactgtgggagacagtgggggttattagctgttccctcttctccagataccaagattcgtttcttcatccgaggctgtggacagtataattcctaccgctgccaagaaaaacgcaatacctacttcccggagtactggtaccaggcccagtgctgccagtatgattactgcaactcctggtccagcccccagctccacagctcccctcttgacccccctgctgggacctggggcctgcccctctctgagtcccagatccagtggttctaccgggccctgaacctctcgcttcccctccgcagcttccatgctgggggggagcctgaatgcctgggtaacctggccaccctgcccctgaatctgagcttatccattgctgacctgcgtcacatatatttgtttctcaacagttcgggacttttggttcttccctggactaagccctgatgcctgagccttgtggatttcactccattacagcatctctcccctaacaccacagctccctgtgctgtcctagaacacctactttctctgctctgtgatttctctggtctccattcccctgtattttcagtgtctctggctttagtgtcattttcttcctagaaactgggatgctgcacctcctagaaaataatgagttcagagtctgcccaggctggcctggggaaggcacagtggcttcctggtccccttctggtcaccagagtcagccatgcccctcatcttcccagtcctctgccaatctggtcccctgctgcctctgttcagatctgtttgtagatcacattctacgcctaccttgagacccagactgaacttgcagtaagaagggtagactaatgtgcacgtttccttactaggcactgtggtgtccctgcctcactgtgtctactcccacctgcttctctggtcaccttgccctggtcacctgcttctctcctctcgttgcagtccgtggtctcagtcccactccgcatcactgagtcctgaaacccgcttccatagatgccaggggagaggagagggtcccccctgctctgctccacatctcctgcttgttctccacaaactccacaataaatggactgggctaagtctgtgtcacactgtttatggggtcaggctcaggtatgggcaagtatagaccagttcaagttgattgggcatggggatcaaaccgtctacagcctgacccactccacttggcctttgtggcttcctcatggcttgctcccaaagagcctatatccatcccaccttccacttagctagaggtctgttcagctatgaggattatgacttctctcagcctttgacttaccccacagggctgcctggctggttcagtcaatagaacatgtgactcttgattttggatgggtttttttttgttttgttttccttttttttttttttttttttttttaaattttttttttaatttttatttatttatgatagtcacacagagagagagagagagaggcagaaggagaagcaggctccaggtaggaagcccatgggactcgatcctgggtctccaggatcacaccctgggctgaaggcggggctaaaccgctgatccaccagggctgccgatcttggagttttaagttcaagccccacattgggtgtagagattgcttcaaaataaaatcttcaatcaaaaacgaaaacaaatttgccctacaaaacctagaaagttaaaccccttagatggcttttctatctaagagaggaggaaaaatgcttttaaatcaggaaaattcaggagcagagcaaacagcccaggtatctgagttacctggtactgagggacctggcttcttgcctgctgttctttttaggatcctggcacccagaacccctcagtaaggagttagggtggacgttgttcggtgatacacagatggagctgcagtggttagatctttcattttaatattttatttttggaaaaagcacaaacgggcagccccggtggtgcagcggtttagcaccgcctgcagctcagggcgtgatcctggaaacccgggatcgagtcccacgtcaggcttcctgcatggagcctgcttctccctctgcatatgtctctgcccctctctctctctctctctctctctctctctctctgtctctacgaataaataagtaaatcttaaaaaaaaaaaaaaagcacaagcatacagaaagcaataatgaatattcataagtttttccatacagctggtaaacacactgctgtgggcagccaggtgcctgccattctgaatctctaactcagtgctggggatgtgctttttatgaaaagtaatgcagctttgtggttgggaggcctaatcccagctcctctgacacttgggcaagttggtttctgcctcactttggtcacctgtcaaggatgacaggtacctggtacctcaggattgaaagaatgcatgtagtgtgtgtacaagtgaaaattagagcctccaaaatagatacgtgccttgggggaaaaggtacatatggattgtggcatttgtatatgtacatatttattattactactactatttttttttatgataggcacacagtgagagagagagagagggaggcagagacacaggcagagggagaagcaggctccatgcactgggagcccgacgtgggattcgatcccgggtctccaggatcgcgccctgggccaaaggcaggcgccaaaccgctgcgccacccagggatccctactttttaaagtaatctctatccccaacatggagctcaaactcacgaccccaagatcaagagtgatgtgctctgccaactgagccaggcaaggtgaccctgtggccgatctttaaacctttttggcaaaacgtacagaagcttccacatactataacttgagtttttgtaaaccacatagctgtgttaccagtcctcgtcagtataaaggcctttatcaccacccagagcttccttgtgcatcctgtcttcccaggcacttctcccaattcagcctggttgctgttgtcctgagtaatagctgcttagaggaatttggttggcatttgatacaaatggcatcctacagcatacacttacacaacattctgtacatatgttaacagagcttcatggctccttaatggcctgtgctctggcaggaagtgccaatataatttgaaaggtcaggaagaagttggaggtacaaaaacctgggtgcacctttcctcatcacctctgacctcagtgtagaaagaagtctgggtttacacaactctagcaagtcaaactagaggacagtctcaggctgaggagcccaaggcccaaaattctgcagtaatttctcacaccgttgaagtgggaagctgagcccaggatcaggcctgggctccactagacttagcgacttccacagaatgcctcccctaccctctgcctgggcccatgcctctcagctccgctcccaccagcatccctcttttcctcctgtggacctcccctccaatcctcacacagctctgggtttcaccccactgccctttttgcctttactgcggtgtggagcttccagttccttttcactgttttgtgcctagaactgaatccaagatgtggagaccaggcaggagcagagctcagcagagcaggagccctttacctgctgccacagtggggcagtcaggcaggacctcagcctccaccactaccagaagagagacaagccatagagtttgtacaccaatttatttgggaggaacacctggggacttgaggcgagactggcttgtggtgggagatggggcaaagccgggcaaagaagcagctgagaggtgggagaagaggacaaaagctgtcagaccgtgaggacttgaaaactcagacttctggagagggagcctgggggaggggcagagtgggagtcggggagcttgaggggtgtcaactaagagacagggctgggggccagtaacttgagagaggcagggagggctggtaaaaaggattggaagttgtcctggctgtgccagccaactggaaatcaagaagatggatggcaactggcaggattttattccacaagtctttgcagaaattctaaggaatgtagaagactctgttctgagggttattgcagaactcccggaggcagcatcgagaaaatatccagaagccaaacactggagaagagcgggtatatgaacaatcactcatctgctccttgtggcggcagtcactcaccatgatgtcagaaccgctgctgcctgtggggaaggatggcagcatccagtgataactgatgtcccagttcccgggcacagcctcaaacccctccttcccctcactccacatggacttaccatcactgctcccacacccttccctggacccccaaaaggcagattcctgaaactgggagggggcagggaatgcccgggagtcaccagcaatggattccgtggaaggtcggtgggaaagagccattcaatggttggatggttggagggggctgagtagggttttgctgagggagaaccagcacttcaggaccatctaagttgggagatgtatttatcagtggtcagattgcaaagaaatggtgtttgtcatcattttatggatcaaaagtaagagaaggggcagcctgggtgactcagcggtttggcgccgcctgcagcccagaacgtgatcctggagacctgggatccagtcccatgtcaggctccctgcatggagccagcttctccctcttcctgtgtctctgcctctctctctctctctaataaataaatacataaaataaatacataaaatctttttttaaagtataataaaaagatttgagttttgatttgaaggcaatttcatgcagtgaaagagagcaccatctctgggatcaccacacattgtgactcagcttttaagagacttggccaaggtaactgaccttttgtgcttccgtttcctcatctgtaaaatggggataataacaattcctatctcagagggctgtaagtgcttagaacagtgctcgcatataatacatgttttgtggttgttaaaaagggtaagggaggggtgcccagctggctcagtcttagagcatgtgacttcttgatctagaggttgggagttaagctgcagttagcgttgagccaacttaaaaaaaaaaaaaaatgaacaaaagaaaaaaggagggattgtgtggaagaacaggcatgggggggcagcccaggtggctcagcagtttagtgccgccttcagcccagggtatgatcctggagacctgggatcgagtcccatgtcgggctccctgcatggagcctgcttctccttctgcatgtgtctctgcctctttctctctgtgtgtgtgtctttcatgaataaataaataaaatcattaaaaaaaaaaagaacaggcatgaggaacagggaaatatagtaaattttcagcaagttgaaaatgaaatgggggggcgggggggatccctgggtggctcagcggtttggcgcctgcctttggcccagggcgcaatcctggagtcccgggatcaagtcccgcatcaggctccctgcatggagcctgctcctccctctgcctgtgtctctgcctctctctctctgtctatcataaataaataaatcttaaaaaagaaaaagaaaaaaatgaaatggagctgtccagaggccattcgacatgacagtttggcctaacattcaaattcaggaggaagcagagcaaatcctgtggggagagcgagcagcaagatagctaaggcccagactctggcgaacatgaaccctgaagggtcaaggagaataaggcgagacccagtgaaagagattgggaaaaagccgtggacgaggcagagatgtctgtagcaacggtggctgacaggcagggagaaggcagcctgaggacagactgggggacctggtcatcacaagggtcccccaccaaggctccgtgctgtcaggaaggcagaagccagtcggttgcaggctgaaggaacaagaggttggaagcagagacagagagtgagtggctctgaaggtaaggaaagagaaacaatgatggaacagagtctaggggttgcaggacccccaaggtgaggtgcagccgagatgcaatttggtaatggactgagccaaaggcaagcagctcactgttctttatgaggagagtcatgcagctgctgccaggcggggcgaggcagatgtcagatcccagaaggcatcccaactccttggtctccaagaggcatcgatagcagcgcaggtatttggggaactgaactggatgagggaattcaggatcaaaattacctagaacacagagaaacactgactccaaacccacttagtttccaggctcatcgccccactgttccctctatcttcccatctcagaaaaccataaaaccaccaattctttaaaagcatccagcttgggatgccagggtggctcagcgttgaatgtctgcctctggctcagggcgtgatcctggaatcgagtcccacatcgggctccctgcatggagtctgcttctccctctgcctgtgtctctgcctcagggtctgtgtgtctcttgtgaataaataaatcttaaaaaaaaaaaaatctggcttaatcctctaccagagactttagtccttgttaaaatctccattctgggataataaagaactcaataaaaaattcattcactcattcaatatatttgaggtactaaagtgtgcccagcaccctgtaagcttttacattcacaggttaggcaggggcagctcattccagctttgggaagttctgtgaggattggttcttcctctgggaccccccactcctatggacttgcttctgaatatgctttcttaatctgtaatgttcagaagtgaaaacaagatcgcatcatcacaggacaggaggaatccatgctttgtgccaacagcagacttcaagcaacctaccgccacattctttctttggtggtcttatcactggaaagattcctattaaactttgtctaccaaggccctccccaaccacatgtctgtacacctccctcttctctggttccaggcccagaccacatgttactgaatccccaggcccagcggagcacttggtgcgaggcagatagagaacaaacactttgaatcctgtttctacataagtcctgtttttcagccaagtgaacaagagattatcaggctcgattgaggcttgttctactctgtggatcccatcctggttctgtcatttagcatgttcccggaaccctccctattctgcactgccccacatttgaatggggttccttcagtatctccaggtcactgctattgagacagccctggagtgataccaagaaatctccctcagagtgaacatcagcccatcaccagtccctaggcattatcccaccaagcccatccatcccacctctcctcctgcctgggtttacctgaccatcctgggcagatgtacccagacacctggtgtctgtgggtttctctatccagccgaccaggaggtctttacagccacttaccaaacaccaagctcatcctgaccagcactattaagaggatcacgtacagggcttgagaggtgctgggaaggcacccatactccgcgcccatactccggctaccttcaaggcctgcggtaaaatgcatgactgcctaacagccttcagttgggggcttatattagtggaagagaaattggtcaagaggaaggaaacaggtaacacccatttggggtggaaatcagtgccaaaatagccagagggacagagtgtcctcacccacggccactctaaggcctaacatcctggcttgggaacagaactctggcaagaggggaatgggagggaaactttcatattcatcctacagaagtgtattgaatcactgtatcaggtgttgggatacaacattgcacaagatccctgccctcgcagagcagtctagtggggaagacaacaaagaataacgggggaaaggggagctcctggggcgtccaacgcactgaccaaaggagtggcaagatcattgttctgttggtccaagactgcggaggccggggaaaccggctaggaagctattgcagggtccagtcacaagacggcagcctggtctagcggaagggaggcagggcccccccagaaatgaaggactccggcatccttagaaggaagactggacagatttggagttagactgaaaatagagagggaaggtcggggataggcttgcacaaggaggtgattggtggtaccatttccaagatggggagaacgtgggacagtcagaaatcccaaagcgaggccaccccggtgcccagcgacctcttccgtccaggggcctgtgggcgccggggagcccgcacctctctcctgcccgccccactccgctccgccgaagctcactgcagctcagtggctctcatctccgcgcccacaggcccggcgccgagcgctcgccctccgagcttgactgcactcggggcccccgggaggatgcgggggcggcccccaggccaagctgcggtccccgccgggtggctgggaagaaaccctgggaagcaccggccggcgtcggacccaggcgtgcacccccgacgggcgcccagaactccgcggctccctcggaaggcggcgctgcggcgctacggagcccgcccggcgggagcgagcgcaggcgggggcgcagccggccgggctcctccacctgccggttcaccgcctgccgctccaggtcagtgtctcggagactcggggtttgcacgttaaggggtgcagagctctgggaagagctgggagtacaggagcgaaccgcctgctcccgttgccagtctggggcttcgggctgcggccctgcgggagggagcgctgcctccttacagtcccggaccagcccagagccccccggcctcggggacctgatggggacgatgggaagagatggacggagactcgcgccaaggaagacgctcggcaaagaagaaacacggaaggaaagcacaccactgcgcttccaggagccttgggatgtacgaaggaagaaaatggtattgctggaaactcaagagtaatgaagacggggaggagcgcctggcagcagcctaaatgcggactgaacgactggtagaggagaatccgcgccggctcctcttggagcgaaggggcccagggcagccaggagggagtttcacagagtcctcggaacccctttctggaacacaatcgccgctgaaggtcccagctctcgggagttagggataagtgagctgcgcgcccacggagtcaccctgaggagttagagacccgaggccgagcgcggagccggaggaacacgcggctggtgttcggcggccgggggggggcccggagccgtgtcctccggcagcgcgtggcctcagggccgtccgcgccgctccggcctgttccgtgctgttcccccggctccgcgcgcagagccccgtgtgtcggtggcctcggtggcctcggtggcctcgtgacccttgcggaggcggccttcccggggtgcggaggcggggcgctgctgtggccgcgtggggacgccggcggggcccgaggggccgagcgagggaggtggggcctgaggaccgaaggccgaggtcgggcggcggcgggacagcaggggcgggagcggctggaggagcgatctttagcccgaacgcaaatgaatgaaaaaaggacggactcggttcccgagggagttgggatggcccgttgagcgggcggacggggcagaggtgcccggcctccctcgagccagccggcgggggcgggggcgggggcgggggcggagcaaatcctcggccctgacgccgagtccagagcccgctcccgcagctcccggggggaccctggccctgggagacggggagggatgggggacagcccagcgcggggcccaccatttcccaggtttcccgctaatttttttttgtcccagcccccccccccccttccagtgtgcccagctcctcggggacgcctggccgtctgggccttccttatccctcccctgtaaggcaaggtccaaagccccagcagatgtgcggtctgcatctcagctgttcttttccgaaatctgtatagggtgaggagtggacaggcagctggtcccactctgatgggtgttctgaaaacaaacacccgatgtgagatttatcaggtggggcgtaatttaaggaggtagactgaggcccatgggtggaggggggtccaggattcaaatgttaaacctcccctctcctcaccaacttccaatatccaagggttcctcatgctatccactgttctttatagtatgtgcaggaagaaggggggtggggggagtggtggtagaggcaggtcaacagagtccagagtccctagtagcctggtcagggagagtcctttgtctccagggtgtggaaggtgggtccaggtgccccctatttgcattcaaggaggtggttaactgaacagacttgttttccaagggaataactaagtgttctggtggatcagggagggtgaggttcagaaccatgcagctggtcctatagcttcatgctccacactttgcaccctgttcacaccaaggacagggacagaggaatgcagtgccagtatcaactctccagtatttgctaaaggtagagcattctggagctgtggccacctcctcttttaaccccaagtaccaggtatcgtatcacctgacaagtctccgatcactcttccagtgaagacttggaatgcccctgcctaaggagctgctgagctggtgtgggcagacagcctctgccccagagactgcagagaagcctcatgccctggggttccaggagacactcaagttagccagaggccatctaggacatcagagcattattagtggcccatgttaagcctgttcaaaccctggtagaccaaggggcacatatgtgggggagtttcatctagaaaaggggttttcaaaggggaaggtggtcaggcaacatacagatgggtggaagtaaggcccattctgttccatgaaatccaaggatcggcaatcacagagaattaggggaaaccgattcctcagnnnnnnnnnnnnnnnnnnnnnnnnnnnnnnnnnnnnnnnnnnnnnnnnnnnnnnnnnnnnnnnnnnnnnnnnnnnnnnnnnnnnnnnnnnnnnnnnnnnnnnnnnnnnnnnngcccttggtgcccaggcaggtggggcaccaggcagggggtgccaggtccctggcagggcctgttgttagactgcaaccgatgtgtgaagagaggtttgatgacactgaggtgtgcagggtttgcttgcatgagacgtggggagtgggctgatcttcaccacccccccacgccccagggaatagcaagagctgagcaaggaaccctgcggacactgatggtgaagccatgtggggttgaatctggaaatctgtagaagattctcaagtaggggaaaccaggtactagaagacactgtgtaagtgacaaacccatggagttgtaagcaaagggggcaaccgtgagttcctggggtggcagcagggttacacaggaaggactgtgttgcagcctggggaggctgtacgtggtgatactactagacacaccagcaaacggggaggcctggggacccaccacgtgcagacagatcggcttgggggctgcaggcctaggggaacagtgaggatgaggagggttacattggctggttggggttgggttgcccaaagcacggccttctgtggcttcagctgtccccactcccagctccaggctcctgtggacatctgggaagtcaaacaattaaccagcctgtagaaaaaatacctttttattaattattaggaataatccattcattgaatgcaggatgtgtattggggaaggttaggtactgccagatggctgaggggaaacgtgcaagagggcagtgagaagggggacagtccccacctttccacaaactataaacagcaacacgaacacagagaatcacaaatacgaggatccttcctcacatctccctccatcccactctttcaaaacaagtgccagtgtggtcgctagaggtgccagggcatctggaagttctgggccgggagcggggtgcaatgtgtggcctcgaagttgtgcagatgcttctgagcctgaagaaagagcgcaggatggggacgggggagggtgcgtagaacatgcagtgagcagcagccaccaatcgcccccgtgaaaccaccacatgttctctacgagctgccacttccaacgctgtcctcaagccccacaggtgccccctggccatcccagcacccccttcctgctcaccagaaacaaggccagctgctgtcgtccatctgcgttcatgtcttcccctgcagaggggggtgctcacacatgggctgcacatctgggtattgggcccccccggcccctccccaaaaccctatcctgccccaggccctccttacccacactccagggaaagtcaggcccacgctctgcctggtaggagcggaggacggacaggcaccagtcctcctccacctcccaacggctgaaaatcgaggctgctgggggagtgggggcagggagggaagaggcacttgtcagccacctggccttgccagggccccacccaaaggcctcaccgcatcctactcgcaccttcctccagctgtgaggaggcctccagccactgcctcaccactcgaagaccctcctctgccatcacacagggatacctacagggggagcaccggggtgggaggtcaggaccccgttctcttcagttctcttcactcctcatccctaaccctctaactccccaccccctgccgcaaggcggtgctggtgtcagcacacatatgtacacacacaccctggctcaccgatactgcaggagcttcagcaggaggtcgttgcctcggttggacatgatgtcctctggaaccctgggggtgggaggaatatgcactggaagggctggaggttggggaggaagggtttggatacctgggtttctggcgggcagaggtgggtggggcaacttcctagctctgtctgggatccaggagggcagaggctcctaggcactcacgtggtagtgatgatctcatccttggttcttcggatcagcagcacagggccctggtaccttcagaggacagcgtggtgggagggagtgctcagagggggacaggtgacaagtggccaccccgcctgtcttgtccctgccttcccagcccctactaagcaggggcccaggagctagcccatcactcaggggagagaaaatattgaagaataggcactgcccaaactctgatcttactggatcttctggaacacccggcagagcctgtacagtggggaggcgggaaagggtgtttcatgctagaggcaggcctgccctcacctgcacagctgttctgcgttgtttagattgagatgctgcctcacagtcctggtcaccaggccccctgcagcgagataaaagtgaagggataacaaagacaaagcccttgcccaacataatggtccccactgtccacagaaagagaaaactaaggctccagacacgggagccctcctgcttctcaacaacggtgtgacccactccccatccatctccagtcaagatagctcccagttccagcccccgcctccccttccctggaaggcaggcctgggagcttcactcactccagctatctggcatgaccttcaaggccaagggcaccaggtcatcgaaggaggcatccaggatcacggcactaatgtctgggtaggacatggctgcccacgtggctgggatcaagacagggaagaagggtgacatccttggcctcctgtccactgccccaccctcatcccactgaccctgcaggctgacgccatgctcctgactaggtgagcccctggtctccctcaacctctcacttcacttggccagggctctatctggagaggatgtgcatgggagacaatgtgcaggggaaagactcactttcctgatccccctccaggaccctggtttacttcttttaataatgggcataggaggggcccctgggtggctcagtcaggcatccgactcttggttttagcttgggtcatgatcttgggaggggcgggggtgagatcaagccctgtgtcaggctctgcactcagtagggagtctgcctgggactctctccccttctcctttgctctctctctcaaagtaaaatcttaaataataataataataataataatgggcataagagtggaaggaaatgcaaatatgcacaaacaggataccatcttctagacccacatagataacccacctctatcatctcttcccttaagccttgaccccactatcaggcccctagtacatttccctacctcacctgggggtggggtgggggtggcgcaaattgtgggggtggttaggaggtaggctaataccagtgaagccgccaatggaccaggcatagatgatgatgtcctggggctggaagcccaggcggtagatggcaaactgcaccaccacatccatggcattggcctcattctgaggaaatggcaccccctgcaggaggaagggcaaaggcaggagtggttcagcacaaagggggcgagggccagacccccccacccccacctccacccccctcttgcaagcctgttgcttgcttgctgtggtgtggactcttagctcccctgcaacagccagggagtgcagaagaaaagcatggtgggaggggctgcactctccagaaagcagcctgcctgcaactccccactgccagaggagggaacctgggtccctgtccttggcgcccaggtgacaggtgagtgggagacccccagaaatatatacccctttctctaactccagtgactgaccagggaggagacacaccataattcaggaaaagaaagggatttcagagggtctcaccgtgcttccagcaaagcctggatggttccagcccaggactgaatatccagctgcaacagtgggggaggagctaggacctcatgacccacacctcccctactccagcccagggggaaagagcaacagaacactggagctctaaacaacccaaactcagaggcgaataaccccaagccttcccagaatgaggcgaggacaccagaggttctgaggcagcagaagggagagatacgtgactgtgtagtggggacagaatgaaggccaacatgttagggacacagcccaaggggagggatgtaaggttagcaaagcaaatggggagtacactctcccccaaatgtgaggtttaaacttcacacagacaaggcgatcaggcccagggaggttatgtcagtgtgggaaggtagaggctttccattccaaagggcaggacaagagagctgagcccaggcctaccttccagaggcgtagaaatgcagcccacctcatagaagcccgcgttcccctcacagcagatcacctatggagggaggcaggaggagggctggggaggagccaagctgggccagaaaatcccccatgtggctagaggtaggagctttgtagggtagaggaatgggcctgttctctttaaggagaatggaaatttctcttttcacaaggttcatcagagagaagcaaagtggatgcaaatgcttagcaaactgagccctcagaggagggggaagttggtcaaccacccagcacagtgtccacttctccttggaagaccagtgggggctcgctttcagaaatggggttagggatacttttttcctttctagtttttggctctatctttgcccatgagtgtttcttctgtgtggtatgccaactgctttccatctctgggctccagacttatacagtcagataaacactaattctatggtaccccaagcccagagatagggtggcttgcatggactctcacagcagttgggtagagccaagaccagaagccagctccctagactgctggctcagtgctccttccagggctgcttcctggaggcaggctgctttggagaccaggctgcccaggttcaaatcccagctctcatttactgtgtcatctgggaaaacgattctgggcctcagttttaatatctgtaaaatgggctgacataaaaatagtacctattctacagggttgtggtgaggattaaatatatgccttctatgtgataaatgctacgtggtgactgtcacaagattgttttttggtccttgtatgttacctcttgcttcctccattttgctatggcagggttttctgacaccaagaggtcttgagggtggggccaggagatgggcttttctccagctgtccttctttggggttgctggaggactgggatccccagagcctccactgcttccctctccccgacctgtgaattcctggctcccactcaccagcttctgtccctggggctctgatgtctcccgccggtccacaaacatggtgtcaatctcgttgccatcgcaggccagcagcttcgcccggcgcccattacactaagtgagggagatgtgaggagtgggaagtcacatccctggtggggggaggagcatcggggcgcaagggcaggggcgcctcacctcttccaccagccgggcctggccctgcagcagcacaggcatgagggccttctggagcaggtacactgagccgggatacagcatccggcgccccaaggtgtgtgccaccaagtagctgtggggaactcaaggttaacaaacccttgacctcaggggggcccagggaccaccccagcccttgcacccagaggttctggggcctgatgcacccttgaccttcacatttttgttttctttttagaagatttaacaaaatgctgtatggaccagactggtgttttcccaactttttttttttactacagcctttctaagatgcacattttatactgtggcccagtacacgcatttgtacatataatactgaaaatttcaggaaataatattttctacgtaaaagtaaaagcaaagttattaactatgattctcttaatgtataaatacaacttagggacacctcgggagcacagtcagttaagcgtctgaactgttggtttcagctccagtcctgggatccctgcatggggctgcaggctcagcatggagtctgcttaagattctctctcctcaggatgcctgggtggctcagaggttaagcatctgccttcggctcaaggtgtgatcctggggtccggggattgagttccacgtggggctccccacagggagcctgcttctccttctccctctgcctgggtctctgcctttctctttctgtgtctctcatgaataaataaaatcttaaaaaaaaaaaaaaaaagattctctctcctccctgttcctcccccagacctttccctggtgtacccgcatgagcacctgctcattcactctctctctcaaataaataaataaatctttttctttcaaataaataaataaatcttaaacaaatgcaacttattaaaagtccccaagtaaataatacttaaataaacaacagctataatttattcaattgatttcaagattcatgagtgggtcaagatccataatttgctttctgttttgagatttgagagagggaaagtggaggggaggagagagagagcaagagggggaggaaggggggcagagagattgagagagagagagaatgtgtgtgtgtgcatgaactggggaagagacagaggcatagtgaagcagactcctcatgagcacagaccccaaggtggggcccatcccatgaccctgagatcgtgacctgagccgaggtcaagagttggacacttggggatccctgggtggctcagcggttcagcacctgcctttggcccagggcgtgatcctggagacccgggatcgagtccgactttgggcctgcttctccatctgcctgtgtttctgcctctctctctatcatgaataaataaataaaatcttaaaaaaaaaaaaagagttggacactcaaccaactgagccacccaggtgccccaagatccacagtttgaaagacaccaaactagattgcacactccaccaagcagagacctggctgttctgttcactgcaatatgccttttatctgccatgtagctggtggctagagcctaatgcagagtaggggcttaataaatatttactgaaccaatgcactaatctagacagataagctgtggtaggtgctgttcctgaaagaccatttccagttaatcttgaagtaggatttgttcacagaaaaacactgtactaccccattcagcatcctctcaaaactgcaaatctggcttgcccctctgaccaatcagcattctgtagacaccgaccactaagccctcccctttcttcggtattccagaaactgcgtcccaggccacagcaacagaaaattcccacgacatctgcaccacggtaagatatggatgattactgctgctacttccaacaccatccgtgtccacaactatgatttacttgggctttgccatatgctctcaggcacccaggcaaggtagaaggctttgtgaagatgttactacacttaatctcgccaatcctatgaagtgggttaatcatggacacagagattgcaggtcgctaaggtaggatagcctaggagcagaggggccaagacagggatagctgccaccagaccctgctccagctaaggctatgtgtctccaccacacctccaacctcattcttccctcccagcctggttaacagagcttctgtggggacctggctggcccagtttgtagaagatgtgactcctgctcttggggccgtgagctcaaggcctatgtttcgtgcagagcttgcttaataaataaattaaaaaaaacaaaaacaaaaagagtagtaacatgaaagaacttttgtgtcagatagaattgtgtgaacatcccagtctttcattcactgtctatgagactctggagctctctgggcctcttttcttcacctataaatctagattaaaaaccacaaatatgagcacctgggtagctcagtggttgagcatctgcctttggctcaggtcgtgatcctggggtcctgggttcaagtgtccatatcaggctccctacagggagcctactcctccctctgcctctgtgtctctcatgaataaataaataaaatctttggaaagaaaaaaaaactaccacaaataatacaaactacgcagcacaaggccctatcttgcaagggagcaccctgtcctggaatcctcactccgaatcacctccatcccagctggcctctcttccctgttgcttcccacctggtgatctgacaaggcagcttcttgacccggttgaggagggtgtctgctgtcccccggtgcaggggctctgggcggagcagggccacaccttggtaagaagggccccctcgagactccttcctgaggatggaaagatgcaggggaggacagtcaggagcagcaagctgaacagcggaggtctgcaggagaggggggaggatgctgtctaggaacaaggagatggtgctggagagcagcccctggggcccaagatggggacaggacagagcagggatggaatgagagaactgggacctcaccggctgctgggctctttccagtggaagtcgaccggccagctcttaaagtcaaagttgtagttggcgagctgcctctgtggtgggcaaggagaggtaaagaggaactgaaaagttggggcaggccacctacccaccctaatcagccatgggactggcccccacacgtcatggggagacaaggagaggtcaacacccccatactcccttctcagagtgaagaaaaaaatcagccaagagaggatgcctttatcagctatccagctgcttccagaacactccttgctttcccaaaatataaaactgacccactcccaaaagggatggctgtaggtactggtgcttctgagggaggaagtgggggtctgttggctgttcatgcccccctcccctactgggtccctgatacaatgctgtcctggagggctgagtgagatggatggagggaagtcatgcctacagtggctccttcgcattgggcccacctcttgaatgaggccctctctcactgttccatccttatggccaccttccttccctcaacttctgcagccagaccatctatgcctccagtcaccccaccgagcccatccacatgctttgtgagggtggcgggagctgtgtcttctctgctgtactccctccctcaccctcgaagcacctggcactctatcttgagaactgttttttattttccgtcacagaaattttttgacattttcaaaaataacttgactaagagagaacaatagaaacactgtacaaaaatgtaaatggcaaaacaagacaaaatgaagaaaagcacatttcaggcagcttctgctcagaccctgactcagatccagacccagccacttcctttgctctgttcctcacttaatcttcctttgtctgtttcctcagaggtacaataataccacctcatgcaattgttgtgaagactgggaagggcatatgcaaaatgcctcagagggggggtccctggggggctcagtggttgagcggctgctgctgccttcggtaggatacccctgccctgcccggtaggggacttagtccctcatgaggctccctgcagggagcctgcttctccctctgcgggtgtctctgcctctctctgtgtgtctcaggaataaataaaatcttaaaaaaaatatgcctcagatggtggtagagcatcatcgcatagctctgcaaatgcggccagagcagccagtaacatgatgatggcggtcacagatctctgatcccaggaacccctttgttaacaggaaagagctatatagggccctaaagccccttctttttttcttaaggattttatttattcatgagagacacagagagagacagagagagagagagaggcagagacacgggcagagggagaagcaggctccgcacaggagcccaactgggcctaaagccccttctgaaagacaatcacactccagcaccagctgagctggcacaactccaaggacactgtgccctggcttttctccctcttggcaccacattgtgcttccaggcacaagagtggacatacctgtccatcttgtcccatccctgaacaaaactagcatggtgtgcgatgcacacggccaaaataaacaacatttacagaactgagctgctcggagagaagacccccttctaaaacactgtgaaatattctgttagaagtggtggggaggaagattccttgggtagatggtttcctcacacagaggaggagggacatagcaatatgcaagcaaaaagccagggtgttggatggcaaaacacactgcctcccccaggacagaagctggtgcccggtgctctggggaggcagctgaggaagctgctaccagggtacctgtctggcacctttcctggaaacgctcaccttgttttctgcagactggttcctatgtgttgcctccaagatagtgatgaactgccggtactgggggttggtccagcggccaatacctggtagaaagaggacaggaaacagtgttaggaaaagtgggaagagcaagctgagtgggtttcaggaagagggttggagatgggcaaggaaaaggccctggaaagagaagcaggaggaaaaggaacagatggcccaggatctggggaaacaggagagtcgggctgacccccttcctccatatctagcaactggcttcatacttctcctatccagcttcttcagttgttttgtttttttttttaagatttatttatttattcatgagagacagactgaaagaggcagagacatagggagagggagaagcaggcttcccatagggaccccgatgtggggactggatcccagatccagggatcatgacccgaggggaaggcaggtgcccaaccactgaggcacccaggcatccctcttcagttggtttcttgataggcgattgacttcccaccctccagaatgttcactttcccggtcttactacaagcgtcatgcaaccttactattcaccctggtgaacatgggtttccctgccagcattctctgctgctcgcttcccagctcttttctgtatggtctaactcccggccatctggctccctggctccccctcttgccccagaatcacttcctcactgacactgagccccttcctccatccccactcttcctacggtgcctctcagcactcttcctctccctccagactccatcctcctctgcttcctgggtccatctttgccaccttccgagtcccagacttctctcccccaccccccccacctcccttttacttctcggagagctacccttccggaaatcacatctgctccctcttcactgtaaaggagtctcaagccctgacttctctgcttccactaatctgataggtatcactcacatgccaggcaccattctgacacgaagacagtaggaaatgagacacacaggctccagccctgagagctggtactttggcccggggtggggtggggctggagaaagagaagaagcaagtacacaagaacttttcagggaggggtaagtgctataaagaaaataaaaccagaatgaactagaaggctagtatctatcatcaggagtagagaccccagacagtactgcgaacaaagcaacgagcaaaatgaattgtgtggaatgatgccgtttgtgccaaaaatgtaaaactcacaaagaaaaggtgatatattatttatacttcccatacttcatagattctaaaatgtctattttatttacatttgaaaactgaaatcggaatgcattttacaattcataacagcttagatttggtaagatgaggcatatctttcataagagtatacaaatatggaaccaggaaagaaactacgccaagtggcactggttagttctgggaaaagaggaacacgggactggggaagattccaatgggaatgtcaactctgaatgcaatgcttcagtattttattgataaaaggtatttgaagcaatatcacagaacacaagcatttcagttctttatgatactgtatttaatttctgtacccaaactaaaaataaataaaatttaaaagtaaggcaaaactgggacgcctgagtggcttagtggttgagcatctgcttttggctcaggctatgatccctcagttctgggatagagtcctacatcaggctctttgcgtgcagcctgcttctccctctgcctgtgtctctgcctctctctctctgtatgaataaataagtaaaaatcttaaacaaaaaaaaaaaaaaaaaaagtaaggcaaaactgaggagtgggagctacttttagaccgggcactcagggaaggcctcgctgaggggggagcccagagcatgggggatcaggaggcagaacaccgcaggcagaaggtccgcacccctgaccactgccaccacccacccacccgcccaccctctagacaggcatcccctcgcccagtttttgtcacgtgcactcgccaaggggcaatgatttgaaccatctcttcatttttaaatcatgagctataacatacacacctgcaacacagtttaaaagatacaaagcaaacattcatgtgaccatcacgcaagtcaaggaagcgaacatggtcacgtccccccacacagccccgaccgtccctctcccaggttatcactcccctgactttcaagatagtcacgcctgtattctgctaccgacatatgcatcccttgtgaactttacgtgagtgggaacaaaccacatacggtttctggaagtctgctccttgcattcaaccttacagttgtgagacccgttcttgctgctgagcgtagtttaaattcgctcacttgcatgctgtgttgtgttgtgttgcacaactagacctctaacatatccatcctatttgtggccatggacttgtttccagtttcagattatgacaaacatctacatggacatgtatggaattattgtagggtatatgcatcttcttcagataacagcagttttctgccaatgagtgtttttttcatacttacaaccaagccctttaaggaaaagatcacgtcttcaccattcccaattattccctttcagggcccaaaccatatatttgcaaaattacttaataaatatttaccccgggaaatatagatccaagccaggctccctctggacctacctcggagacaggccacgcctgccaagagtagtagcaatgtccccgcatagtgagaaaatggcaccactttggacaagctcaagtaacctgggaggggagaggcattatgtgagaaatttccccactgccccttggcatctcttcccaggtcaggcccaatttccgccccatattctctctttgggacatccatgcccttggaggaagaagacgcctgatggaagaggaaagccaagccatgtccgtaggttccctttcctctttggagaggttggctcatctgccaacaacctgcccaccacctttgaagccacactgacctttcctgtataagtagaagaaggcgaagggagaggagtaataagagatggaccagaagactgaagcctgcagcagagagacagggacaagcaatcagtacacatgcacacacatgcacatatgtgcacacatgtacacgcacgcacccacacacaagtctgccatttccaggcctaggctctgagcaaagtggaggacctgagggagatcaatcacatcaagtacctattctgtggatgacacagtaggtgcttaatatctgttgaaaggcaatgtatcagagcagaaaggaggctggggaaattaggtacaggttctgttttcttcctcttatctccagacataatctcatcgcttttaaaggccagtttctttttctactcaagtcaatcaaacctttccaatcagccctgctcagcacagcgcctggcctggtctccaagagatgcacaaacgtcaccataggaaccctgccagagaaaacagctgtctttgcagccaaggaggttagttgcctgtagccagggaggacaggtcactggggaccacaggactcagcacttgcagatggtcccaaggggaaacgcattctcctcagggctcaggctgccccagagaaagcagtgcacacaccaaggtggagtgccaagtatgggtgcttgagagtgggtccatgtggttggagaggttggcagcagaggctggagcattccccaccccaggggcgctgccttctcccatgctagggaggagaaagttccgagggcaactgggtgggaaaagacacagtagtcccagatgcgagggcagacataccagtgccaggatgctgtcagcatgcttctccaaggcacggggttgatagtacgtatcctgccaaaacagatggcggagtcaaggaccatgtccactgaccagtccttcgccttcccttttgaaagccctgacgttgtgtcctctggttctagcctctgaagctgtccctcctgcgacattcctggctcccaaagaaatccctcttactaacccctcctccaagcctgatttcctaccccagaccatgaaaacataggaggccggacttgggagcaaaattgaaagcctcaccgaaggatttgtgttcctttttcacaacccagtttcaaatgggccgtgggcaggtgcaaacggggagaggagtgagagaagaaaggaaagacacaatgacaactttaagagggaaataagatcagaaataacagggtgattaaggaagagaatgtggcagagggcgggccgtcccggggcgcaatcaacagcttgagactacccgtgaaaaggcagagcgcctacagggacacagccgcccaccaccccagctttccctaatgtgaccaccctggggtctccaaggctggctgggcggcggggtgggaggccgcgcgtacgtgacttgtcgaagccatctaacttcacggacagtgtggaaggcagataaaacggaactggggaaggcaccgagtcagaagaaatcacccagctctggaattggcgcagggtctcaggcaattgggagtagcacgaaccacgacagacggggtgggggccgcgagagggaaaggcgaggagcgctagtgggaaccggaaagcggtggcgaagagcgacagaggaggccggcgatccgcgggcgtgactttaacccaggaggcgcagggagcgctccgcagacacctggctcgacaagcaggctcccccgatttccaataatgggcgcttccggggagcagaggccgcgaaggggactgggccgtaccatgtttccgacccggggagaactcgactcacccaggagctggaagggggggcagtgactgaagttggagtctcggggacgccggacggggccctttccgagtccctctcccggtagattttgtagagccgggggcctaggacgcagctcagcagcttcgccatggcccccgctcccgccgctgctctcccagcagcaagtcccccttccgaccccgcccttccccggcctcgaaggtattgcgtgcccttgacgtcagcacgtaccggctccgcctcgagccctgtagagacattttccgcgctgcttgagacggatttcgcgcagttggacctacgggtagagccgtggtcagaaattagttggaggcgtttggaacgcgccgaggtaggggattatcaggattaagtcactttttcccatcccttaatattggcaggctcttgaacgacaatgggaacgagggataagatgcaacacaaagaaaaggtgtctaggaacacatctaaccaaagaaatgcacgattttatgaagaaaattacagaagtttttgaaagaggtgaccaaaggcttgaataaatatagagctacatcgcagtcatggataggaggactacgtattatcagggtgtgtaaaataccggttaaaaaaaaagaaaaaaaaaggaggaattcttgctcctaagcgtagacaaatctcaaatgtattgtttagtgggaaaaataaagccacagattgattacacgcaaccatcacgatacatatgcatctgtataacatttgaaaagaaaatttaatgatcaagtgaaagttgaagagcaaatttagaatagtgtaacacagcatagaggatctttgaaatggtaatactttttaaaagattttatttatttattcatgaaagacacagagagagagaggcagagacacaggcagagggagaagcaggctccatgcagggcccgacgtgggactcaatgctgggactccaggatcatgccctgggccaaaggcagatgctcaaccactgagccatcaaggatcccagtaacacatttaatagatattcaggtttggtttattttcctttgtaccttacacctacatgatatataaattctttcgcttcttattgcagtaaacacatatacagaaaagtgcaccttttgaatatatccatgtaatcagcatccagatcaagaatacattataccacatctacaagaccctccccaaatcactacctcccccgccaaggggtaaccactatcttagtttctaacctcatagattagatttgactaattttgtactttatgtaaatggaatcatgcaaatgatgccctttgtttcttgcttcttttactcattatgttacattcgatacagtccttggtatgcatggaatatttcatcaaaaaccatttagagggctgcccaggtggcttggcggtttagcgtcgtgtcagcccagggcctgatcctggagacctgggatggagtcccatgtcgggctccctgcatggagcctgcttctccctcagcctgtgactctgcctctctctctctctgtctgtctctcatgaataaataaataaaatcttttaaaaaaacttttagaatttttaaaaaacacgaattcaaagagatacatgcacccctctaaagcagcattatttacaatagccaagatatggaagtggcccacgtgtccattgattgatgactggagaaagaaaatgatatatggggcacctgggtggctcagtccattaagcatctgcctttggctcatgttatgatcccagggtctgcggattgagtatctcattcggttccctgccccatggggagcctgcttctccctctcccgctgcccgctgctacccctgcttgtgggtaaaatcttaaaaaaaaaaaaaaaaaaaaaagatgtgggggcagcccgggcggctcagcagtttagcacctgccttcagtccagggcgtgatcctggagacccaggatcgagtcccacatcaggctccctgcgtggagcctgcttctccctctgccttgtgtgtgcctctctctctctctctgtgtctctcacgaataaatacataaaatattttttaaaagatgttatatatacgtatatacataatgaaatattatgcagccattaaaaagaatgagatcttgccacttgcaatgacatggatggagctagagagtataatgctaagcaaaataagtcagccagaaaaagacaaataccagatgatctcactcatatatggaatttaagaaacaaatgagcaaagggaaaaagagagagagaaatcaagaaacagactcttaattacagagaacaaactgatggttaccagagtagggggggcatggatgaaaaaggtgatgagaattaaggagggcacttgttatgatgagccctgggtgatgtacagaagtgctgaatcaggacaccttagtggctcagcggttgagcacctgcctttggctcagggcatgatcctggattcccaggtttgagtccctctgcctgtgtctctgcctctctctctctctctctctctcgtgtctctcattgataaataaataaaatctttaaaaaataacctttaaaaataaatagcacattaaaaactatcacagctctataaagatctgctttgagaatcctgcctggagtaaagggatttggtgagttctccaggcctcttttatccttttcctttagtagcaacacactcaccaggggctcagaagaggtttggtgggccaggcagccacagggaaagtcattctaaattatttatggagtattgacaaagcgtgcagtcttgtgctgggttctgtggagaccaacatgaagactcagcttcttcacttgttagcatctcttgtagggtggaggagagagcacagaatatacttccagactgcatataggtggatagctgtgccctcttctgagcaagctttttttttttttttaagattttatttatttattcatgagagacacacacagagagagagagagagagagacagacagacagacagaggcagagacacaggcagagggagaagcaggctccatgcagggagcctgacgtgggactcgatcctgggtctccaggatcaggccctgggctgaaggcggtgctaaaccactgagccacccgggctgcctgagcaggctttttatcatgaagtctttgctctgtgtccttcagctgatatagagtcagaattgtgaagagataatcttcagaacaacctggactgggtcttttctcccgtgggactgcaaggtgctggtcactttttccctagtagacatgaagctgggctttatctctccagcatttccatcccctcagaggcccatgtcactctagaccagggagcatggaactttatctggcttctatttcttccgtggggcaccaggctctggggaggagaacttagcaggctctccccatggcagtcttattcttcctccttctgttcccatgtgggcccctctgggctgctgcaggtaagaaacaggaggtgggggagtcttcaatgattttaaaattgtaaggaactactaatgtttctccttaggggcctggggaaggcatctgactcaagaaaatagatttaccccagttgactccccgccctcagactctaattctggggaagacccagagaccatgagggtccaggtcatgtacagtttcttttttgtttgtttgttttatatttaatttgttttgtgttgttttgtagagtctatttttttcctttggttatatagttttctttagaaaataagaatagatgagaaaatgtgtccagaaaaggagaaatgagagagaaggggcctttgccaaccattccaaccttttttgtcctcttgtcttcatattccctcacccactggaggagagagaggaataccctactgtctcctcccctcctcactttttgtagctgtcacttgagaaatgtgctcatagccagacccatgctgggagaccccagaagaggcagaaacggggggggggggggttagaggtcaactgggagctgttgatctgatggaggtttctggcctcatacaactctctccccacagacaacatccaagccatctatgtagccttgggagaggcagtggaggtcccgtgtcccttaccaccccgcctgagtggagatgaactcctgtcctggttccacagccccgcagcaggctcctccaccaccctggtagttcaagtccaagtggccaggccagccccagaccccgggaagcccataagggcatccaggctgaaactgctggggaactattcgctgtggctggaaggatccaaggagggagatgccggtcggtactggtgtgccgtggtgggtcagcactacaactaccagaactggagggtatatgatgtctccatactcagaggtgagcaaaggcgtgcagctcaggggccggggggcggggggcaggaagtccagcaaagaactaaggtccctctctccccacaggatcccagctatccgcaagggctgcagatggatccccctgctctgtcctcttatgctctgtggtccctgccagacgcctagactctgtgacctggctagagggaagtggtcctgtgaggggccatgtacaatcattttggggtgatggggcaaccctgctcttggtgtgtcctggggaggggctctctgagtccagggaacacagaccaagaatcattcgctgtctcatgcctcataacaaaggggtcagctttagcctggcaggtaaactgagggagaataagggagaagatatggcctctggcacattctgggcctgctggctaggggaaaaggatgtgactttgtaatcagtcagatttgggtcagggatgatttctggtggagcagaccgtcacctgtaggaaaagggcttttgtcctcattgactaactcccctaacatagaggggtcgcataagccaattctctggtggaatagaccattggccaagaggaatgggaaggcttctggtggaatataccatagcttagaaatagggcaatctatggcttttgtggaatatctcatagcagagaggaagaaaagaattattgacggtcgaattaactgtcttttgaagaaaagatatatgcggtgttgttataatggcctactgagagtgaaaatagaaggagaaaaaatatataattgttttacaactagaaatctgtcatacacagaaagaatgctattggatgttgaataactcattgataaggcatgagggaggggcaagtggccattattttggtaaccaaaggccaattaatgggcagtgactgggtcttatttccttctatacctacagcacctaagatggtgcttggcctttggcgggcactcagggaatgcttatggagtagatgagtgaaagaatgaatgaatggaagacactttagtttttcctgaaagtttgggtgactgttaaggatatgaggaaagattgcagttatggctgactgtctcctctggagttagctgtccagatgtgggtaggggtagattgctattccctgccaatggtggttgatggggtcagcatgagcggcttaaaaatgagcaacgtgggttggtggaaattggggacaaagaagcttatgaaatcttctggtgggaagagcccacctgactatgtggggaagcctctctttggggaacaggaatagactccttaccacttccctccttatccctattctagcctccacggatgcctctcctgccctctgtgccctttccacgggctgggatgtgtcctggatcctgatgctgttgctcgtggcaggtcagggattcaccatcctggccctcagcatcatgctctgcagacagagggcccagggtgctcagtgcaaaggtaagtccctctctgccagagggaagaagagaacatgtgggtatgaggcagaggtttgggctcacatcttgcctctatgccctatcttctctcggggaggaggttagtgtaaggactatagctctgagttatctggtgatttctctgagttatctggtgatttctctgctgcaccccatatggctccttcttcccagatgcttcgattcctcagttcaaacctgaaatccaggtctatgagaatatccatttggcccaactcaggtgaggaactcaagggggtaaagatttaaatcccagaggaaactggggccagggtgggtatggggtctgggttcctgaggaggtggagaatggaagtacgcttagtctgtcgttgtgcttcacaaaccccacagcccacctgcccccaagatcagatgatctccatgacatctgccggaagtgtgacctgctgtctctcccaccatctggcacctgaaggattcgcctgaaaaccttggcaaaaggggaagggctgagagtgctacttcacagtgcagctcggtctccagcagtcaagcttggggggggggggtgcgagcacacatgtgcgcattgcgggggagggtgcactgaaggaaagtagaagcattattctctgatattacctgcaagaaggtgtggtctcctgttccatagcagcctgagagaggcggctctgagcaaccatgggatttggggggatggagggggtggatggcagggagggaagaggagtaggagtgggcaaagaggagacagaagaacccagagacttgagcaattgtggagactcagtcttggagacaccaaaggacaaaccaatgggaagggacccgaagtagagaaagagatgggcagagctagacaacagaagcactgctggatgctggatggctgagaatggagagaagactcgggtgtctctaaattaagcccaaccccccacccttgcccccccccatccccacatccctccctgcctagtctcattcccacagagaagaaattgagggagaacaagcacctttaatcagacctcagacttcctctcatggacagggagggcactgagtcaggatgggggtggctgtgctcagtcctcacccttgagccagcatccttatcctaacacttcgggtggtatccggagcagcgagaggcttatcaacatcctgacatcctgggagccccaagaatcacatgctatctccctgggtagagggagtgtccacagggtgggtggattcccccctggggtgtgtgctaggctgtcttagaaccatggacaagtctgggctggtcaagcaggggagggcactgatgctcctaactgctccattccctggtctcaggcaggaaggagctggcttccccaccacaccctaacaagcaactccaccagacaccttttgtgtgtctgctcaagcttgggcctcactggagaaaagctttctctgaagtgtcaccaaaagccttcatgctacagtggcttaaactaagctattagcaagaaggaggactcgatgacacagacagaggatgaggtgggccagcagcccaacccaacccaccaaacagctctagtctgcttttagagaacacacacacacatacacacacagtgcagtgtcctggactcctagatatcacctttttactgttcatagtttattgttcacagttcccccaagaacctccttcccaagttcctgatctgccaaatcaatctttcctagtaagactgtcctccataccatatctggtgccccatcaatccccttgcctgaaaccccagctccatcaacacacccgccttgcccaagacctggagctgagatagggcatcagcagtgggcatctagaaaagataaaagacctagaacagctgttctttatgaggcagaactctgggcaggtgcttacaggggcttagagcaatgcccgcaggaaccaggcctccggagggtgtctgggaaggtgttaggccagggatctgtagaggtctctacagaatcagattcttggttctcaaatgcaagtgtctccatgggtggtgatgatggggccagagttctccgttgaaggctgcagttaggcttgaagctagtggaggaggcggcctccccaggtgaagctggtggcgaggaggaggagcagggtagtgaggagggttttggggagccgctgcagcgtggtggctgtgttgcacaggtcctgctcacagcagtggtgtcgcagagtgtaggagcgtgaccagtaggtagcgtggccttgcagagggcactgggcccttgggaggcagcctttccgttcgatgatctcattctgctctgtgggacaaagagaatgctaaggcctgggcaggaaggaggcaagggctgtggggcagcaggaaaaacagaataaatggatggagatgggcctggagaagggccattggaccagagtcctacctgaggtgccaatactgatgccacaagcttcatcttcctgacactcggtgggaacagggaagcagggtttggcaaagctgcaggtgtaacagcggagcccaccccgggtagggggcgggggtgtggtgagacctgtggggtcagcagagatcaggtgaggcaaatgggctgctgcgctgagaggctccagccctgatccaggatggggagtcatgcagagaagtgacacacaaagtggggagaaggaagtggaaagaaaggaagggaaaggggcaaacagaagtagaaaaagagacgcagggaacggaggggaaacaatgcaggaaaagaaaaagacccagaggcaaagggatccagaggttgtgagaaatgcacagatgggacagaagccataagagtcagagtgacacagaaagtcagacaggggaaggcagggtggcagtgaggaaattaagcagatggtgccacagacagaagagcaaataagaattgacactgaccacggggaccccggagaagcaagatgtgagacaggggcaatagaggacagaggcctgtcatgatgctaccaagaagagagagagttattctcaaatgcctttgaaaagaaacttctgggggtgcccaggtggctcagtccttgaagcgtccaccttcagctcaggtcacgatctctgggtgcagccccagtccctgctcagtggggagcctgctgctcctgctcctccccactcgtgctctctgttgctatctctggctctctctctctctctctctcagataaataaataaataaaatttaaaaagaaaagaaaaaaaggaaaagaaaaagaaaagaaaaagaaaaagaaaagtaacttctgattccactttctcctggcctgaggccattcccaggagctctcttctcaaaagcccaactctcctctctgcatcttccccacctctgcacaccggcccacccttacccagcgccccacagaggaagaggaggcccaggaagatgctggcggtgcccatggctggccccaggactcaggcgtctggaagaatgggatctgcacccgagatcgagagctggagcatctgagcgaggcagggagggacgagtaaacaaacacacctagggagttaatctggggggtggaaccgggaccagatccaccagcctgacgcagcaggggcccagggccaccgctcctgcgccccacatctctcacaccctcccgccccctgcttgagtcgacttgagcctcgggtcttctctgttctgtgcttgtcacttgcagctgtgtctgccgctctgggttctgtctgtcaccttcccccgcactcctctgcacctccccttgtctcaagctgttctctgctctggcagctcagcatcctgtctttgtttgctccatctttctcctctctgtgctttggagtctctcaaggtcaccctcctagaactggtccagcgcagcatttgaacatggaatcaacaatcccctctcccacccgcccctccacccaaagctcagctgcgtgagcgggaccccacccagcttcacatccctttgatccctccaagcctcaacttttgtaccccataattatctctcccagatttactattgtggaggaaggaattaaccacgggtggggccagagggacagatgcgtttccacttgggtgggtgggggcggtcagaaagactaggaaggaatgcagggaaaagatttaggaagtgatagagattctggaaaattggggtttaagacattgaggaggagagcctgatctggggaatcagagcaggggtgtaccaggggttaaatagaagagagaggagacagatatcctttttttttttttttttttaaatctcaggacctctttacactcatagaagaccgggatccctgggtggcgcagcggtttggcgcctgcctttggcccagggcgcgatcctggagacccgggaccggtgcatggagcctgcttctccctctgcctatgtctctgcctctctctctcactgtgtgcctatcataaataaaaaaagaaaaagaaaaaatcattgaagacccagaagagtttttctttgtgtgagttaatataggcatttactatagtatttactagatttgaaatccaaagaggattttaaattggtttatttaaaaataaaaataataaacctattacgtgttaacaaaatatggtttgcgaagtcatttctctccccacaacacagaaaaggagtatcgctctacactttggggaattacataaaagtcaggcttaatagaagatgactggactttcacatctgcttctcggctcagtctcttgggatatgttgttttggttgaagtacacggagaaaatcaaccacgtatagatatgtagttggaaaaggaagaccagggaggaccctctgaaagggtctagggccaggaattctggggcgacagctctatagctgctgctggctgctgcggacttcagaggacactgaaggctcttaatctcacaggcccctccctgtccccactggggcccaagtgcctgctggaggagattctttcctccctttttattgccctataaagcccaaggcaaggggatataaagctggcagtcagggccaggggaggggggcaggagagagagatgatactaaagcaggcagacacaatgaactccctactcatgggggtcctgctcagcactctgttggggtctaccctgggtaaggaggcagccaaggcctgttgccctctgccaactggctccctatcagtccaggtcaagcacctcttctctcctgccaggaaaacacatgcggtgctatgaatgcagaggagaccccagcagctcctgcaaagagacagtggccacctgcggggaggggaaacgctgtggcttcctggagcgcaaaccccaaccaggcctgggacagagcaagctgtctagaaaccgtgagtcctcagtttctctgtcttctcttagccctttcctgcctccagcttctacttccatctttctggtgtccagaaccttccagtcccagtctggctctggacagatggtcccacagcagagtaaagaattctgaggcctcttctggctctggcactcttagcagcccatggtccttatactcccacctcctctgcttcactttccagggtctcatagggccattcactcataaggggttgaaaaagttctgtcccttgaaggcagagaccaaaatatatttttaaaaagattttatttatttatttatgaaagacacagaaagagagaggcagagacacaggcagagggagaagcaggctccatgcagggagcccaatgtaggactcaatcctggatctccgggatcacgccctgagcccaaggcagaggctcaactgctgagccacccaggggacctgggaccaaaatattaaaccaaacttgcagacattagctaagaaccagtgtgttgtgtgtgtgtgtatgtgtgtgtatgcatgtgtgattctgaaataatttctgactgacagaaaagttgcaaaaatattagaattcctgtatatctttcacctcccttcctctagcattaacatgtaatataaccatagtatgatcagcagaatcagaaaataacactggtacaatactactaacaaggggtgcctgggtggctcagtcggttaagcatccaactcttgatttcggctcaggtcatgatctcagggttgtgagagcaaactctaaatggagttccgtgctcagcagggagactgcttgaggattctctccctctccttctgcccctcctcctgctctctctttctttctttctctctctctcaaatatataaataaatattttaaaaaatactactaactaatctacagaccttattcagtttagctagctgttctaattatgtctttttgtctagtcctgtatccaaaccaaatgagagttcatccacccaatgtgcataagccaataaaaaccaacatcgggctttttttttttttaagattttatttatttattcatgacagatagagagagaggcagagacacaggcagaggaagaagcaggctccatgcagggagcccgatgtgggactcgatcccgggtctccaggatcatgtcctgggccgaaggcggtgctaaaccactgagccacctgggctgcccaacatcaggcttttgcagtaaagaaaagctatttcttggtgtggtaccaaccaaggaaatagggagctagtgctcaaaagtcccacccccaccacctgacagcttgcaagagagagtttttgagggcaaaattggggatagtggtcttctgagcaggtggacactatcgattggaggcccatgaggtcatgctagcaggtgttctggtgccactgcgtctggtcccccagaggtcttttccatctccagagacttggaatctaaagaaatgtcttcattcttcatgttagagatctcattaggtacatcttttttttttttttttttttttttttttttatgatagtcacacacacagaaagagagacacagagagaggcagagacacaggcagagggagaagcaggctccatgcaccgggagcccgacatgggattcgatcccgggtctccaggatcgtgccctgggccaaaggcaggcgccaaaccgctgcgccacccagggatccctcattgggtacatcttatgattatctctttaggatagtgctgattaattacgtgtcctacaggttcctttgagtgataagcaagcatccctatccgttgagcctaggcctatgtgtcctttggcccacccggctgcacctgtgcctgcaggtgatgggacctgtagtgttcctttttccacctgaactgacaagagggacatcggcttcggtccaggacctaaaccaggatcccacaattgcgtttattttgttttattttttattttttattttttttaatttttatttatttatgatagtcacagagagagagaggcagagacacaggcagagggagaagcaggctccatgcaccgggagcctgatgtgggattcgaccccgggtctccaggatcgcgccctgggccaaaggcaggcgccaaaccgctgcaccacccagggatccctattttgttttatttttaaaagattttatttatttattcatgagagacacagagagaaggcagagacataggcagagggagaaccagtctccctgtgaggaacccgatacaggactcgatcccaggaccccggccgggatcatgacctgagccaaaggcagatgctcaaccactgaaccacccaggtgtcccctgcaattgcatttaggtctcatgtcttcttagtctcctccaatctgggacagtcctgcatctttgtcttccatgaccttgacatttttcaagagtccccttaagttattttagagaccatccctcaatttaggtttatctaatattttctcataattatactacagtcatggaattttttttttaaccagaacaccacaaaaggagaggttggttcttttcagtgcattgaatcagagggctcactttttttaaaaattttttttaatttttttttattggtgttcaatttaccaacatacagaataacccccagtgcccgtcacccaatcactcccaccccccctcctccccttctaccacccctagttcgtttcccagagttagcagtctttacgttctgtctccctttctgatatttcccacacatttcttctcccttctcttatattccctttcactattatttatattccccacatgaatgagaacatataatgtttgtccttctccgactgacttacttcactcagtggctcacattttttaagttaatcttggtcacttggtttcatggaggtggttttctggggggtgcagagaatccatgtgggctccttgaagtacatctgctctgtcctagaaggcaagtcctccagccaagaatccaacaccccagtcttgttttctctcttagcctcgataaccttgattcatcactatccagcctgcatggcagcccatcattgcaatcaagtggaaaccgagttggtgggagacgtgacttacacaacccacagggaccgctgcgtcggagatctgtgcaacaatgccatggcaagaatggtggccccaccacgatttgtggctgcagcagccactgccctggcctggctcctgccagcactgtggagaggctagtaggctgtggggagggcgggcgggaggagtaagggaacaaaggagatctgaggtgagaagacaaacacccctctgtgagccattaaaatctgtctgccactttagcactgactggaaagtgccatctctctttcgttgatgggagaattgcaggagaattatggggacacccatgctctacttaccaagtatccatggactttgttccaatagtgttctccttgaccaatgaaaccccaaagaacaatggagaatctgccccaagtgactcctggatcctactgctagggagaatcttccttagcagtgaagactactgaggggagtaggctctgggcttagtgagggtcaccaggaatcaaagaaccttgttggatctgttcctcctactcccatttgcaattcggttcctgaagtgaccctataggattgggaaaggaaaggaaagcactgagataggcgggttgcttggtgccctgtttaccaacctggccaagagaggcccttgtctcaaacatgaaggactgggactcagcccaagcatatcctttttggggggcaccctcaagccaggctgcacctccttcttggcagtacatcagaggtgtggcctaaatttgggataaggattgttgctccaaacactgggacctgtgtgccatccccagactccccagacttcaggaaggaaggatggaggcctgaaaaacccgtttctccatttgccccaacccagcctcccagggaaactccctggaggattcttgggggtgggcaggaaccgagagtattatttcctgagagggagcttctgacaacaggtcttttgacaataaacacacaattaatcagacacagacatttattactcaaaatggaaagaggtgagcatgaggatgaggtatgtacagggaccagggtttagggaatcaaccccatacagtgaggtcatcgggtccttcctgggagcctttgtgggggacaggacagaagccccatttcaggcccagatccccatccctcccctagtcggcatggtggagtgtaggaggcaaagcaaggagctcttctggcgacgagtgggagatttggaatggtctggagggatatgggaagggattcaggaaaaggtgagtggagtatggaaggtggaaggatgggtgaggagcccactgcttaattaaagaaatgtgaagagcctggagaaatgcttttctgagcaaagggagttaaggagagacgagtatggggaacccggggacagggagactcggctaagctcaaggtagccaaggaggggcagccagggagtgagtcttagtgaagcagccagaggccaaggccagccaaagaggtgaggaggacaagggtcagggccggggtgggccgaggggctgggctattgcagttgtccttgctgcaacaggtggtattatagatcagacccagcttgtggttggtttggttgaaggtctcccgacaaggctcttctggtgtgccacatcgaaggttggagaaaacccacatcttacctgagggcaggagggggccgtggggtcagctgggacgggtgcccggtgtgcctgtgtccacctcccctcctcaggcacccatccaggcttcctttccgactttgccagggccctcccctctttatctcttctcagtaagtctgactgtctgcctgcacttccttccccacccgctcgccccagtcttggtcctaggactcgctggctgtgaggccttggacttgttactgtctctttctgaggctgtatcctcagtataataaaagcacgcacattcacagggttctcgtgagcatgaagtgaagcaatccacataaagtcatagaaaggtgcctgatacgtaagaatccttggccaaatgtcatcattgctgtgactgtcatcattgcagtgaccatctcagtctgagccacagttgggccccagccctcgccatagtctcccaccagccccctctccccactacagaggaagatgttaccgaggtacacatttgttgtcaggcactgttgtcccggttccaggcgacaggactgccggtccacgcagcccagcacagggactttgtagcaggagtgacagcgaatgtcagctgggaagacacaagtcaggctgaggtgatggggaatctgactcacctggagaccagccaagctggggggtaggtggacaagagccaatcaagtaggtgttctgacctggttgctttgctggtgacagagcaggtgagtgcagcagaaaaagtggaagtaggtgagggtggagtcattactctgtgaatacctacaccctaaatatcatcttttaccccaccccatttggggatgagtcaagaggggcagagataccaacaaaaacatggggctagggatagatggaatgtggggatactgtgggcaaggaaggaggtgtgggaaaagataaagaattcagaaaatgtcacagatggaaacttcaaattagaagaaatactacaaatagaaatcatggttgttggggttcctgggtggctcagtctgataagcgtctgcctttggctcaggtcatgaccgcagggtcctcaggtcccattgagccctatgtcgagccccacatcaaggaatggatgtgctcacttgtgttctctcagataaataaaatataaaaatatttaatttatttattcatgagagacacacagagagaggcagagacacaggcagagggagaagcaggctccatgcagggagcctgatgtgggggacttgatcccaggaccccgggatgacgccctgagctgaaggtagatgttcaaccgctgagccacccaggagtccctaagtaaataaaatcttttttttttttttatagaactgccatatatatttttattttatttatttatttttttaatttttatttatttatgatagtcacacacagagagaaagagaggcagagacacaggcagagggagaagcaggctccatgcaccgggagcccaatgtgggattcaatcccgggtctccaggattgcgccctgggccaaaggcaggcgccaaaccgttgtgccacccagggatccctaaataaataaaatctttaaaaaataataaataaaataaaaatcattgttgcaacattgcatgaatggcttggaacttgaggctggcaagaaagccacctgtagcaggctttagcaatttactctcatcacctggaaccaccatggtgtgggaagaggaaccagacctgagtgagtgggatcctctcactctggcagctctcagacagaaaggaataacatcggggaagcagatcatcagatgctgtgtgagcacctcaccagaatggagacagtggatgcagaaagtgttaccctccaagttcccacctcagcttattccaggtttgagtgagcaaagtttgttgaaggaggggttcagtccaagggtagagcaacctggtgactgcacctctgtgaaacaaatccacttcatcctgggggcgggcagccctggcattccctccctagaaggctgggatatctccctagttccccaggaggttctaggagatcactgggaacctctagaaagcttgtgtccctgcagatacctggggaagagcaggggtgagctagtaaaggccactgcttgaagggctgagaatagaatacggaagagtagatggggagggtggggcgcacaagaagctccaggctggatgcctaggtttctgagagagctctgctgagcgcaggtggtgagaggagaaagcagtaagctgggccccaaagagtttggtagtggagtgggggacaggggatctggagccctggcaggttagaagagtggatcttggaggtgggcagaagtgtgagatatgagtcctcgagaaatggagccaggaccctgtcacaaggaggtctggttctggaggcacaggagagctgccgcatttggggttaggggtgcttgggatcctgagcagtaggcaatggagggcagtggagggggcaaggtgcagcagtccctggggccccccagtgctcacctgagacccggcagagcagagcagacagggtgagcagcagaagacctttcatgatgagggtcccgagaatggtagtgagggcagcagcggacagaggttttcgggcacccagctcccgctcccaggcaggagttgtgaggcctttttagaatttataatcccaacggtccctcccttccctgcccctggtggcccctccttcccgatttacacacagatgaccagggatggggagggactaaactgaactgggtgagggagtagggataggagataggagagagagagagtggagggtaggtacactcgcggccaactccatcttggttcttggtttcaggccaagacacccctcccagttcccagctgacatccctgctggcccagtcctctgaaaaggcatcaccaaggcccctgtgatgttacactggctgtgggcacaaggcctgctggaccctgggaaatggacaatggggtgaagcccacactaactgctaagtttgggtttcctggggggcattggtaggggcccctgagcagaaacttaggatagaagaggccaacttaatctgtattcagccctgacatggtcttcccaactactgctcagccacaggatgaaggacgaagggtttgtgatatcaccaagggctcctgtgatatcacaacagcagaggcataggctggagctgcccactgaggtgctgtctcaggcccttagaaggttcttagaacttgtcctggctaaactaaggcctggcctggcctgctttagttcagtgagggccaatgaagtccagggtggggcatatgcacctgctccagggcgcttcccaaatcaaaccctgccagtctgggtggggacaccattggccaggagggacaggatgggcatagagagatgaagtagaagctaaaataagaatagaaattgtaatgatcataatagtgatgagcactgagtgagtgctcctgtgtgtcagccattgttctaggcattttaggtgtattccttttttaaaaaaatttctcaatactctgtgacataggtgcttttatccctgttttatagatgaaccaacaggcccagagaagttaagcaacttgtcaacatcactggctagtagatggtgaaggcaggtcttttttttttttttttttttaagatattatctatttaatcacgagagagagagagagagagagagagagagagaggcagagacacaggcagagggagaagcaggctccacggagggagctcaacatgggattccatcccgggaccccaggatcacaccctcggccaaaggcaggcagtaaaccgctgagtcaccaagggatcccttgaagacaggttttgaactcagacctccaggatgttctaggccactgctactctgcctgcggggggaggggggcaggagtgggggtgtaaagtattcgaaagtgcttctgtaaccagtctgagcaccactttcaactgagtatggtttgagggctgtgagcgatcctgcaaggactcccagaaggatcctggcagctgggagccccgccctgttgttatcagagcccccagacccgcaggcctccccacaactccccctagtttccctccggtctcctcctccactgatccactcaccttctctcaccaccacacccaggccatggccttggttctgcagctgctgctgttgctcctgttgagggtccagggggaccccgggggtaagccatcctgccccaggaaagttgggatgggctcgagggaagactggggggggggcggtgatgagtgtggttagatcccggctggcagaagtggaagtgcagagaggagatgagagagagagagaggacgtgggagtgggctttgtccgccctgcagactcgccctaactcctgccccctccaactccagcctcactggacggccgccctggagaccgagtgaatttctcctgcgtaggcgtctcgcatcccatccgctgggtctgggcgcccagcttccctgcctgcaagggcctgtccaagggacgccgcccaatcctgtgggcctcatcgagcgggatccccactgtgtctcccgtccagccatttgctggtcgcctacgtgccctggaccctggtatccggtggctagagctgctcctgagcgcgggggactcaggcacctttttctgcaggggccgccacgaggaagagagccgcacggtgcttcacgtgctaggggaccgggcagattgcaaggctccagaccacggtaggtccagggctccgcgctccgaacttaactcggacacacaccctcggggcagnnnnnnnnnnnnnnnnnnnnnnnnnnnnnnnnnnnnnnnnnnnnnnnnnnnnnnnnnnnnnnnnnnnnnnnnnnnnnnnnnnnnnnnnnnnnnnnnnnnnnnnnnnnnnnnnnnnnnnnnnnnnnnnnnnnnnnnnnnnnnnnnnnnnnnnnnnnnnnnnnnnnnnnnnnnnnnnnnnnnnnnnnnnnnnnnnnnnnnnnnnnnnnnnnnnnnnnnnnnnnnnnnnnnnnnnnnnnnnnntccgcgggaggggcaggaccagggcctccgtgggccgctgctggaccgagagccctgccgtgcggcctagaggggaatgggcgaggtccgcgcttgggcggaggcccggggcgggtaggtggagccgcggctagggaggcgcagctggagccggagccggagccccagccgggtcagagcgtgggcggaactgtctgtgggggtggagcctaaactgtgcggatcggagccttggagttgctgggttgctgctggaggacgagacaaaactggtggccctcagagacttgtacatccgttacagacgatcacctccgcatccgcctcgaccactccccagatttggtgagactaactccaccccattttccttcttccacacctcccacctcccaattcatggagtctgagcccttgctgggagcagtgttggtcactttctctcaattcttcagctctgtctcccccatatagagccactagtgaaagtcgactcccagaggccagtaaaggaggaggagcctaagatggcaggggacctggaccaggagccggtaagggcctggggattggaagggggccggccagaatccccaagagcagtggaccaagaaggacagagtcctgtatctcccagcaagtcggacttctgagaccccctgcctccctctccacctttcagagcctgctctacgcagacctggaccattcggccctcagaaggccactacggttgtcgccagtggttcctgctgatgcctccaccatctatgcagttgtagtttgaagggaagcccttattgtaaacctcacaagctggaggttctccacaactcccggccccttcctggtccctcacctggaaaaggaatgcaccgcgagatagaactgagcactagcttgagtcaggaaccctgagttccaggctatctctctgccactgatcttgctccttcagttacctcatctctcctataaccttcacgtccccttcaccaccagtgccctctctaaacctgatcaaaccctgtctccccataagatatcaatcaacaagttctagatgtcctgtttcttcccttccctccagtccagctctttgagccaggagcctacaccttttcttccccgtcactccactccccctgaggttgccagtcaggtcctaatggtcacacccagtagatttatgggcttggtcttcgattattttcttctttaagctgtttttctttaaggctggtgtcttccttttggaaaaactcttcttcctcgctccctactgccttgctattctccaccattctaggattgtcctttcctttatctgacttcctctctcctggaaacctgtcatccacagccagtcctcagcccttacctctgcaaacaaccctctgaattctctccagctcagatctcgagtaatgggatttcctatctatccctgggacatccctgcctagtcagcagtaggcattttgcacacagcattgtcactcacttaatcttcctctgcattctcccttaatcaaccagttgcctaagccagaagctgggagtcatgtagacctccttctgctcactcccacacaatgaaccaagtcctgaaatccatacccttcttcacaccaattcagctggctgccacttgaatatactctcctcatttcttccctgggttactcattgcctcacctcatcttcttgtccgtgccctcctccctgaagccagagagatcctccccaaatgttaaccttctcacagcctgtattccagagctgtggtatttcttcagttcgggacccatgggccttggctttgggtacaaggtgctggcagcactctccctactctccaggcttgctttgtcactccacattcacacaacatgccaaccttggagtgattctccccagcctccaaatatgcctttgacacagtgcaagtccttcttcctggatcaccctttttcctcctccccactaccgtcctggccaattctttatccccaggactcagttgaaatatagccgtttctgggaaggcattcctgatcctctttgcctacccctgcatatattttgatgctgtaggaagtctccttattcatctcatagcaacaccctgtgaattgttctatcacaacctgtatttcaatttcaatgtactgttgagttccctgatatcaagagactgactctttttttatattactgctaagcctcagtaaacgagtgaatgaaaattcacgagccctggaagcaacacttcttcctctgtatccactaggggtgggtcggtaatctcgcagcctctgaaacatctgacatttagataaattgagtgatctgcccataatctctttaccttgtatatgctccccacaatagaaattctatcctgcccatcttgtgcccaaacacctgatagggctggccaatgagtcaggaagtacttaataagggtttgatgaatgaaagagacctctttcccaaacactaacctcaacctccgatttcagccttgcccctatccctctgctccaataagacaccagccacatcccagtctaaaaggtcagttgttttattagttctgaggaagaggactcacccagtggactctattcctttttcccacactaagccctccctcccccaatcctggggccctctccccactactacctagtccctgtcctctatctaagcttccttccccttctactccctctgctgccctacccatggccagccaggaccctgaggccaggccctcagctgtgggggcgtgtgctgagcaccaggcaaagggagctaagaccggcgcctgccttctccagttctgagcaggacacaggtaccagggtgacgtcagagagcttctgcagtgcctgcagggaggacacgaagtgagaagaggggagtaaggacctgaggccacagccaggccctttttctagccagctgggagtggcaccacccaagcttctagagaaggtaccccttcttcctcccactaggaaggcctaagacttctttctctgattgttgttgttggtggagctcctgccttccctcacctcttggctattgggcaggtccccacctccacggtgcagcaggaaagggggcacaccgggcagtcctggacgtagaaagagacagtcagcagccgcgtcatctgggagggtcagggacgcataggggtggtctgtcaacactgccatcgcctgagggagaggaaggaggaagcagtcaagtctaacagcctttccacaaccaagtctggtggccctaccaccattaagggctggggacacatttacatttgttgtataataatgagctcaagcacttgccctcagtttgtgtcaggcactgctcttagtgacaaaggtcttagtaacctttgttaagttccgacctggactcacatgcagttctttctaccctcttgtccccttctccagcccacatgggtcaatctcatctatcctttgtcatagcttagacgccccctttgggaagtttcttgaaacttgggaagatgatggtaatcgactgtactccctgtctctgtccttagtagcgtcttgctttctgatgcgttttcacactagatggacggctccgtgagggcaagggttgaagttaattccccaaacctcccagctctccgcatcccccaacccccagaagccaagcctacttgttggccgcgcgcacccagccccgcccctcctcaccctgacagccttttgggctgcgtcgctgctaccggccaccacagtgcggggcccccccatgccgcagaggctgcggaggtggcaggggctcgagaccggcacagtggagacagcgaagtcctaggggcaacaaaagaaagtattcggggacgcgggagaggtgaggggattcccgcgtttgctcggggcttctccctcttcggcgctgccccccctccccacccccccagaatccccaccgccgcttccccagcgcgaagcctgtcccgttcctctcccggaacagtgtctgccacgatctcagctcctcggagattgggccacttggagagatctacgaagaactccaggcctgagcccntctgccacgatctcagctgctcggtggttggtcacttgggagaggcctacgaagaactcccggcctgagcccagggaggccgtggaggtttgagaaccacagtgagttgaacaaggccccacctggctcagactccccaactctgcttcccagcgccaagcccagggatgcaggcacctaagcctcaccggtaaagagaacatcagtgccatccagagtcgcgttctcatcccccatctccgcaatccggagcccaaggtcctgaagggctttgcggactccatcgaccttagggcaggaaagagggcgcggggcacagacattcccacccacaattcgtaaagccccgcaagtccagctcctcctttccctttatcccgccccccctcacctccggcctgcgggcggggctccagggccgcgtgattagggccgtgtccccttggatcacggcggtgtcaccaagcagcggtcccagcggcagcgactcttcaggaggcagttctagcagctgcagccccaatcgctgcctcagtttaccccccagcaccccgtgctccctctgagctttagccaggtccagagccgggaggccagcccccgcaccttcccccgaagccaggctctccgggaccccccggatcagggcatgggagcagcggcccagcccctcccctggcgtccccatcccatccacaccgtctccccctccggccacgctgatttctttagttttctcttttacttcacctgtctgggagaaaagacagaaaggggaggaggcagagaaagagacatgcacagaagggcatcgggggatggttaagagcgcctgggtcttcttctgccacctccgggcgcccctcccactttaccccaccccctccagaccttcctttcctgccgaccccattccaccccgcacccttctgggtcggcttctttggatgtagtctgaggaacaagatcgggacccctaatcttcaaaacacctgttgccccctgttcgggggcttcgcgaagtccctgctaggcgcccctcttggcagccgctaggatgcgctcactccccaaaaatgcaacggccccgcccccttaacccttagctgctcgctgctgtagggacctgaagtgtggcgagggacccgaaggggttatgggccaggaggagacagctgcggagagggtcggggtctggaagatggaagtcctgaacgcccgaaccggagaggcagagaggggcaacgaggaattagaatctaaggagttaaatatcctctctccaccccggccggccgtgctgcctctagcgcgacccagtataaaccagacccagtcccggaggaccgggagaggtctaaaacgaaatccaaggggcggggaaaccgggggcgtggtcccagggagcgggcgccactcccggctccgggacccggtctcctggttcatcttccccaaagtctaccccgctcagctccgcatccaaattttggcctcctgcactcttgtccactgcgggcacgggctcggcaccctcaaactccagccctccacacggtccaggggacatctccaatccctagacttacctcccgcggctaccgggactcctgcgctctgtgatctcggctgggccccacccccctgaggacagagttggttggagaagggagtcctagtcttcaagcctcggggactggacctctcggcttttgaggggtctccggctaggcgagctcaagagctgcggtggggcgggggcgcgacggtctggcggctcccgggcattgtctaagcgggacggggcggggcccccgagaccacgcccactccgccccgctaggcctcgccggctccgcccggactgcgctccccgcctccgaactcggccccgcccccagtgctgtccaggcccatccagatctggctggctctgagggctgagctgcaaatgcgacacggaccacgagacggccttacggtggaccggcgcgaaaaatggaagtcggaccaccaatactccgcttcgaaattcctggcttctgccctgagctcaaggtcaccgacccacttctcattccgtgttacccactactcaagccccctttgtctaaaacgacactgtatttccaatctgtattttattactgaaatacactgccctacccgcaccaccccacaataaaaatcttacctagattccccatcatcccctccagccccccagccagccctgtagaagcgcttcaggattctctgcccactggccattttgaagtgtgtcctttgggtagccacgtgaaaaccagctggtgtctttgtggagaaaatggagaggagagacggagcctcaggagggacttatttgagggccttggccacttgctcataagccagctcgatctcctcatcatctggacaggtggaggcaaactcttcccgagcataggcattacgcaagtaccgatgcactccgcggaacacctctgggatggagaatcccctgtatttcttacacaccacctgggtgtggggagagaagaaggaccaacatgttatgttagcctcgaggaagccacactagctgctaggctcttggtctttcccttctcccaagacttatgggataaaatctagccttcctgtccaggcattcaagaacctccactatctaacttcttttcctgtgattcttatctcccatatgaatcatcttctccaaagggatttcttttttttaaagatttatttatttatttatttatttatttatttatttatttatttatgatagacatagagagggagagagagaggcagagacacaggaggagggagaagcaggctccatgccgggagcccgacgtgggactcgatcccgggactccaggattgcaccctgggccaaaggcaggcgccaaaccgctaagccacccaaggatcccctccaaagggctttcttaactcctcactatcttctccggtgtttgcccttcctttccacttacttaaatcctggccatttataaccagctccttttcagaccacctgttccatggtgccatttctctcttcttgattttattgaaatataattcataaatcataaaattctccacttgaatttccagtgacttttgtccctatttttcatttggcttttagtcatgcattattacttaacttttgtgtgactgttttatcttcccagctagatttcaaatcctttgaggacaagggccaatcgtgatacatctctgtatctttcagtgcctagtacacagatgttcagtacagaggtctgtggccaactgacattaggccaaggttttataaagtaaaccatagttttgaggctaagacaaaaacatgggaaccagtagttttcatttttcatcacgagacaaagtaaagatggatgctcgaaaaagagttaaggctctgattttaggaaaaggctgctttgtctgatctggggatttggcagtgatagagacaggaagcacactcttgacagcaatgcaggggtatgttactcctggccagtctgtttgcacccacagcctatatatcacagaatgtaattctctcaaacactggtctggttcaattctctcaagcaatgactggtgagaaggaatgggatgtctgctattggtagcaatccctagaaaccatcctaagaaagaaaccacctttggagtggttgtcatgggaaaccagtgtgggagcttctgaaggagccattccagtggccactctctgctcctacaatgaccacccacctgtactatgtggagttttggcaagaggttgcagtcagccagagtgagctcattgccatccagaaacttcctctgtgagatgccctcatcctcagcactggtctcatccacttcttctgggaggggggatgtcaagtaattgtctaaaactttcagggctttcaggagccccttctccagatctgtgcaagaaaggggaatttgtaagaacattaggggagtgacatagtccaggagggcctggggagtgtgtgtgtgtgggggggtggtggtgaatgaataccaatggtgagccaaatgaatactaatgaatactaataccaaactaataacatctgacaaaaacacagttagttttccatgagttattctaagcacttcccatacagaaactcactgaatcaacccatgaaataaacaggcattgttatcctcattttatagatctagaaatggatttatagagagattaaatgaactgcccaaagttacatagcttgtagtgtttgtactcaggtcgtctggatcaagagttactattcttaagcatgaaaacaggccatcaaccaacctaactaatgtcctagtgggggaggagaggctaggtgacaaacgagagaagcttaagtcacagccaatgaaaatgcaaggaaatatggggttaaagcaaaaataagggggctggggtgggaggcagggagagtgtgccaatagctgctccatctccctgatattgggatttccagatccaatccttggatcttctccattcctcctaggaccctggcctccaacccttaagactcactatcattgagtgccgggtttgaattcttgatgtaagcagaaaatttggcaaatatgtccagcccagccgtgttggattcagggttcagagctgccagcttggggtacctgaaagccagtgggagaaacaggataagatatcttttgctgagaacctcagctcccctgctccaccccaccaccatttctgttttccagttctacaacctctctctttcctacagtctcccagctacccaccacttcctttcaagtgcccttgtacctgggagggcacagcactgcctccagaaactcctcaatcttgttggtgtctgtgtgtacttcagtgccatacagaaggaatgggagctgccctcctgggcacagcttctgtactgtctcggtccgcctggagaagaggtcaggcatcaggacaggaaaagggggtcagggagaagcagagaggggaaatggagggatgtggaaagaaaaaggagctctggatggagggagggcaaaacagtgcaggatgaaaggacgaggaggatgggtgagcgtgtgtgtgcatatgtgtgtacatgaggggtgttcagaggaacagaaattggcccacctcttggtgtcaacagtggttacgttgaaggttactcctttgagccagagtaccatgaacagtctctgggagaaggggcagttcccaatcttggccccatcactgccggcctgaaaagcaacccccatcccaaggttaggcctggtacacccaacctaccccaggccattctctacaccgcctactcccagatctagcgttctctgcctagtcaggacaagcagctcactactaaaagctccccaccccccagacatgggctctccactctggaggtggagcaaacctagggcagaggtcagcttctggctccccagagagttcaggacaggtgggaagtaggcagagggactgggttggggagaacttgggaggatctggaccctagagagagcagacaaatagtaatgtagttttacatgctattctaagcactttacccacaaaaatttaatcctaaagtctgtagagagactttggtgaggccagggttgtaggctagagagaggcctggattcctgaatcgaatagagcctgtgaatgggcaaggtatgaccgctttggaagccagagttctggttctctacacctccactcaagctgtttttggcagctgggtggggagtcaaggggcccagagcctcaccctaaagatgtagtgggctttgcagaggggggctgccttctaattggcaggtggtgacctcatcccccaagggacctccccctaggctgagggtgattcatctcaggctgtctcgcagtctctggcctcagcagcttccttcctggcaaggagtgggggcagggaccagggaggctgagaggcctgggcaacggagggccaccttcctcttccccacgcactacttgtggggtctcccagcacacagcccccagctccagataactctcctcacactggacccaaggccagaatctgtagcgcagccccacccaggaataaaaacagcccttgaggctgagtgtgagtgaggtggggaccacacctaagggggggcgggtggacccaggcgccaggcaaggctgggcccgggaaaggcttccctagaagccccaagcagaaaggagggagaaagtggcaggaccgcacaaaggaggacaaacaaaggggggtaagtggaaagaaaggcggcaggaaagtaaagggtggggagaatgtgcaaaccaggaggcctacacagagagggaggtacagagatgagatccaggcttggggaagaacgcccctgcagcagggaggggagcggagcagaaagagtgaagtccgctgtctgcgctttcatctccaagggccaaaggaccactgttcctcatccacacccagagagagaggacagagttggggtggctctctttttcctgtttctaaaaccccaagccctcaacaacctagcccagatctcctcctgatccctcccccacctaccctcatggtagccccagctaaactcccagcttgccacctcccagtctctcgcttcccagtcccggggacccttccccacccaccccctctccagccccgctgctagaactccactctcattctcccatctccttccacctcaccagtccacccccgaggatttcctctcggcctctctcaccacaccctcttccttgaaaccagccctgccaaacacacgcgcgtgcacacacacactcacatttctccaagtctcccccaagacacacaatctggtcttctcccaggaccacctgtcccaatgtttccttccctctgaccctcccaaatcctgttgggtttcagtgcccccttctctccgtcttcccatcagctggttcccacccacctcctccacaatattctcaactgttgggaaccctcccttctccctaccttccggccctttaggctgctggaaacttgcactcgtacaaacttttcagggttgtgcacagaattctcatcacccgctggcacaatcgccttcccggcccgaccacccccgcgatacaggcacacccaagattgcacctgaggctgggcagggggtctaggtgggaagggactggggagttaaagctggaactggggagaggtgagaggtgccttccagggatcgggacactggcctaggagggagacagtgttcctaccttcacgaacagttcaacctgaggttgttcttcagccatggttgcgacggggaccaggaagcggcggcgctgggggaactgggaggggcccgggccaaggaaggcgggtctcacaagcagggagtctgtcccccagacctagggcagtcccttcagcgccacacgagcccgatgagacccgctcacacacccacggcctccccaacggcccagcgcaccccacatccagcccctccggctctatcccctcccagggtagatcagggagccgctgactcaccgaccggctccgccctgaacctggggaggggacaggaggggggcgggactcaacgatctagggagtgggtcgagagggagagcctctgggtctcctagagagtaagagatgggggtgctaaggagagggaatcctggaacctccgtgtttctccaccagtctccttgaacacaggactttttttttactgcctcagtttccctgctgcgttaatcaggagacactcccactccaccctcacccaagaaaccacaccaacagcttggtcaagcccgtgagggcccagggagggaattttagaatatgaagatgattgtttattcctttttccatggtccttccagactccagcaggacagggacttggaagtggagactgagattgggagaagagagtattgaaaggttagggcaggggatgggaagagagaccaccaggccttctgctagggaaacaagccaaagggcctcatcgctgggggaggtctgctcctcctcactggcctccttagcttgaacacttccacgcttgcccccattccaggccccttcctgtgacccttgcccttttctcactgataggttgaagatagaatggggggggcggggggaaacagggatattgtagccctagaataggagctgcactgatcctggatgggaatggtagctagtcctttcatgaaagaaaaaaagcaaagatcaaacggaataatgtaagtggagtccccggaggcacagacacagaagtagggaggtagaggaagagtagcttgattttggaggttctggcaactcctgatgatctgctgaaaatggcttaatgatatgtcctccaaactggacatattccagcctccatatcttgaatctctcttctaccctaccataccttctcttccttcctcaccactgctgtctaacaagagatctacagctccagaaaaaacatggtggagtgcaaggacggagaggagcaaaacaggctttgacacgtaaaggaagggagacctggggcaggacttgggtggagtgagagacgtgctgctggaagccagcagttagtggtttcctttcctacttcctcttctgtgggttttcttctccctgggagaaggcctatctctctcctccccagagaagagatatattgtatttgttcccttgaatagtaaagtcctataaggttgtagaatgattccttgagtgtgtgtatgcatggcgggggggggttctcctccatgggtgaccctcattttctgcacacaggaccccttgtctgaggaaaggaggccaaagcagccctattcttagggtcctcttctgctctagttgatcgatgtccatcagagaatctgccccacatagatctcccttctgggagatgcctcagacaaatggggccagccctgagctcaaacaggttttggcagctttttctctgccgcttttcctctcctacagctttatggctagagctggcttgatcatcaatattgactttggctggctggcatggctacccacaaggtattttgccttaatttcccagatgacagataatgctgccctctcttggtactatccagcagtgcctcctgggctgcacccccaaatcctgcctcagagaattttctctctggtctcatctccttatccctgcttttctcctatctcagtatctaccctttccttcgaaggatggcttcttttttcactctctccccttccttgtcttggtaaaccagtccctaatctcttttcaccccagattggaaggtgtgtccctccctgacacgccttagagttgtgatggtctcttccaggtttccatagcttcattgctcaacagtttgccaggggtaaccattaacctagcccttaactccctcccctacttttcttgctagaggggattttccaatcattgtttagaagagccaggttaccccaccatcttctctaacctcttggatgggatctacccatttcagggtacctaaggcaaagctagagaggaagatgcattttaagggattttttttttttttttagtatatattgatttctgtccccctgacaatctccttgcttctccgctccttacacacactaaaaaataagcttcacactgggagcctttcccctaagatcaggaacaagacagggatgtccactctcaccactgctgttcaacatagtactggaagtcctagcctcagcaatcagacaacaaaaagacattaaaggcattcaaattggcaaagaagaagtcaaactctccctcttcgccgatgacatgatactctacatagaaaacccaaaagtctccaccccaagattgctagaactcatacagcaattcggtagcgtggcaggatacaaaatcaatgcccagaagtcagtggcatttctatacactaacaatgagactgaagaaagagaaattaaggagtcaatcccatttacaattgcacccaaaagcataagatacctaggaataaacctaaccaaagatgtaaaggatctataccctcaaaactatagaacacttctgaaagaaatggaggaagacacaaagagatggaaaaatattccatgctcatggattggcagaattaatattgtgaaaatgtcaatgttacccagggcaatatacacgtttaatgcaatccctatcaaaataccatggactttcttcagagagttagaacaaattattttaagatttgtgtggaatcagaaaagaccccgaatagccaggggaattttaaaaaagaaaaccatatctgggggcatcacaatgccagatttcaggttgtactacaaagctgtggtcatcaagacagtgtggtactggcacaaaaacagacacatagatcagtggaacagaatagagaatccagaattggaccctgaactttatgggcaactaatattcgataaaggaggaaagactatccattggaagaaagacagtctcttcaataaatggtgctgggaaaattggacatccacatgcagaagaatgaaactagaccactctctttcaccatacacaaagataaactcaaaatggatgaaagatctaaatgtgagacaagattccatcaaaatcctagagaagaacacaggcaacaccctttttgaactcggccatagtaacttcttgcaagatacatccacaaaggcaaaagaaacaaaagcaaaaatgaactattgggacttcatcaagataagaagcttttgcacagcaaaggatacagtcaacaaaactcaaagacaacctacagaatgggagaagatatttgcaaatgacatatcagataaagggctagtttccaagatctataaagaacttattaaactcaacaccaaagaaacaaacaatccaatcatgaaatgggcaaaagacatgaacagaaatctcacagaggaagacatagacatggccaacatgcatatgagaaaatgctctgcatcacttgccatcagggaaatacaaatcaaaactacaatgagataccacctcacaccagtgagaatggggaaaattaacaaggcaggaaacaacaaatgttggagaggatgcggagaaaagggaaccctcttacactgttggtgggaatgtgaactggtgcagccactctggaaaactgtgtggaggttcctcaaacagttaaaaatagacctgccctacgacccagcaattgcactgttggggatttaccgcaaagatacaaatgcaatgaaatgccgggacacctgcaccccgatgtttctagcagcaatggccacgatagccaaactgtggaaggagcctcggtgtccaacgaaagatgaatggataaagaagatgtggtttatgtatacaatggaatattactcagctattagaaatgacaaatacccaccatttgcttcaacgtggatggaactggagggtattatgctgagtgaagtaagtcagtcggagaaggacaaacattatatgttctcattcatttggggaatataaataatagtgaaagggaaaataagggaagggagaagaaatgtgtgggaaatatcagaaagggagacagaacgtaaagactgctaactctgggaaacgaactaggggtggtagaaggggaggagggcggggggtgggagtgaatgggtgacgggcaatgggtgttattctgtatgttagtaaattgaacaccaataaaaaaaaattaaaaaaaaaaaaataaaaaataaaaaataaaaaataagcttcatgaagtccataattaaatgttcagtacttagattctgccacctggcccagagtaggcactaaatagttgctgggtgaatgaatgacacccctgtctttaggggtgtgtgtgtgtatgtgtgcaccagtggagaagaggtatagacatgtctcagtgggggtgtaggtgttcttatcaggtctacttttctccattgaatgcttctacctcctcttgggagaccaaatcaaaattaggcccagttgggatgcctgggtggctcagcaattgagtgcctgccttcaacccaggnnnnnnnnnnnnnnnnnnnnnnnnnnnnnnnnnnnnnnnnnnnnnnnnnnnnnnnnnnnnnnnnnnnnnnnnnnnnnnnnnnnnnnnnnnnnnnnnnnnnnnnnnnnnnnnnnnnnnnnnnnnnnnnnnnnnnnnnnnnnnnnnnnnnnnnnnnnnnnnnnnnnnnnnnnnnnnnnnnnnnnnnnnntctgcttatttatttgaacacgtagtagctcttaccagtttaccaggtactgtcctaagctgttcaacaaatattaacttagtgggtgcaaatattaatttagagctgttggcacaggtttaattgatgtaacttatctccactctccagaaaaaaacgcaactcccctctgccgctttggcccgccccacacaacacccctacaccagttccctgtgctcaagctccgcttcggactttctagcgggctctacgtcgtgtcaatcaaaggccagaggggattaaccccaaagattcagatgcaatgaaacgccaggacacctgcaccccgatgtctatagcagcaatgtccacaatagccaaactgtggaaggagccccggtgtccattgaaagatgaatggagggatccctgagtggcgcatcggtttggcgcctgcctttggcccagggcgcgatcctggagacccgggatggaatcccacgtcgggctcccggtgcatggagcctgcttctccctctacctgtgtctctgcctctctctctctctctctctgtgactatcataaaataaaaataaaaattaaaaaaaattgaaaaaaagaaagaagaatggataaagaagatgtggtttatgtatacaatggaatattactcaaccattagaaactacaaatacccaccatttgcttcgacgtggatggaactggagggtatgatgctgagtgaagtaagtcagtcggagaaggagaaacatatgttctcattcatttggggaatataaataatagtgaaaggaatagaagggaagggagaagaaatgggtaggaaatatcagggagggagacagaacatgagagactcctaactctgggaaatgaactaggggtggtggaagggaggagggcgggggtggggggaagtgggtgacgggcactggggggggcactggacgggatgagcactgggtgttatgctatatgttggcaaattgaacaccaataaaaaataaatttatttaaaaaaaaatctggtaaaatgctcaacctacagcctggtaaactatatgtactaaataaatgtcagtcactgagaaagaaagaaaaaaaaaaatcaaaggccagaaccggggaaggccagcggcaccggcggcgggaagtttgaacgttctggcaccgccccatatgcgaacgggccaatcagcgtcccgccaccccagcaaccgccgctctgccccggttccatctccaggcagaatccggatccctcgggccaatagcggcttagaggggcggggcgtgtgcgtgcgcacgcgcaccccgcccccacgcggagacgcccctctaggccgcgtaaggctgtggtgacgaactctcgctcccgtagcgacccaggtgactgaaaacgcgggaaaacgccgctagtcggccacggccggggtgggaacgccacttggtgagggctgcgatcgtgggtgtgtgtggttggcaatggcggagagaggagccgtgcaggccccgccccgtcctccagccagaagcaaccacccccacgtggcggacgggaggcggggcgagtggattcagtgatgtagctcggaagtcccgggtcaaaaccacccggcgtgttaaaaacaagccggcccggccctcgcagccgtgcgcctcagcccagaagttctgggctctgcccgcgcccagaagtcctgagtggatttgcgtccctgcgcaccccgacctcggcctccccgcccctgaactgacttcgtcttctgcacccacagagcctccgaggccatggcctccgtccgagcgaccccaggcaggacgccgcagggcccgcggccccaggcagccttggccacctgttccagcccagcccccgtgcagggccacggggaggccgaggaggaggaggaggaggaggagcaggagccagcggaggtctcagggcggccatgcgggagcttggatcccaagagcggggcgccggtttgaccgtcgggatgctggaataaatgggctggaaagggctagctagtcgctgcctctgctcagttacacactgactgaatggggggtgagaatnnnnnnnnnnnnnnnnnnnnnnnnnnnnnnnnnnnnnnnnnnnnnnnnnnnnnnnnnnnnnnnnnnnnnnnnnnnnnnnnnnnnnnnnnnnnnnnnnnnnnnnnnnnnnnnnnnnnnnnnnnnnnnnnnnnnnnnnnnnnnnnnnnnnnnnnnnnnnnnnnnnnnnnnnnnnnnnnnnnnnnnnnnnnnnnnnnnnnnnnnnnnnnnnnnnnnnnnnnnnnnnnnnnnnnnnnnnnnnnnnnnnnnnnnnnnnnnnnnnnnnnnnnnnnnnnnnnnnnnnnnnnnnnnnnnnnnnnnnnnnnnnnnnnnnnnnnnnnnnnnnnnnnnnnnnnnnnnnnnnnnnnnnnnnnnnncctagaggctctctgtgtcatttatagaaatgcatttcattattcaacgaacgtttattacatgtttacagtgtatcaggtgctggagatacagtcccaggcaaaccagtcatgtctgtccttcagaggtttatagtttagtgacatctccaggccacttctcttccctcctgccaccctgcccatcttactactcttttccaaaacttcatgcctgctcctacctatgctgccaatgtgcagagcactccttacttttagagagaagaagtgagggtgttttgtttgtttgtttgttttgaggaggagcttggaagagagagataataaggggagggctatgggctcccctcttagaggataaggatcctttaactcatttggtctcctttctcctcctaagtattggatgaaatcaatccccggtctattgttacgactgccaaacaagatgagaatatgactcggtttctagggaagcttggtaaggactgggtgagggggaaaaatgaaaatggggaaagactaatctgtggaatattccaggaggctaaagggtcttggagggagctacagccaggaggctagaattgggtgagcgcagagtgggacagaagcaggggactgagatgtccagactgatggccctttctttgcttcccctacagcatcccaggagcacagcaagcctaagagacctgaaatcatatttctgccaagtgtggattttggtacttctttgctttgcccagctccccatcccagcttccctaccctttctccttactccagccccatcatcagaagtctcccccagccttatctcatcccaaccctttgtgttctccaagccccataaccagtgtctttaagatctctcctgctctctaccctttaataacctgaatcctattgaaatttccacatagacacgtctagggatgagggccttccatgataaagagtggtgacattttgtggatagcttggattgttggaattttcacttttaagacaaagccccttgtcccttaaaaaaagaaagaaaagagggatccctgggtggcgcagcggtttggcgcttgcctttggctcagggcgcgatcctggagacctgggatcgaatcccacgtcgggctcccggtgcatggagcctgcttctctctctgcctgtgtctctgcctctctctctctctctctgtgtgactatcataaataaataaaaaaaaaaactttaaaaaaaaaaaaagaaagaaaaatgaaaaaaaaaaaagaaagaagaaagaaaggaaggaaggaaggaaagaaggaaggaagaaaaaggctgactctgatgatccctaaggcactaacataagcttcccaggcttgcagaaagaatagggaatgttctttcctaattagatgttaagacaatagttaatatctttttgactccaaatctcaaattccaaatagatatcctaccttcctgagtcacttatttttctcaggttgtgctctgagccaaagatctttatattaaatgtaaaaataaagagatttagatggagtctgaagatttggttcttgtttcagctttccattagctgcctgtggcagcttggtcacatcatctctcttgcttctattgtcttgttcttaaaatggggtggaaaattggggctacatgacctttccctcctatgcctccccccaaataggcctggagataagcaaacagcgcctcctttcaggaaactacaccttcattccctactccatgactaccactgagaaaatcctcttcctttcctccattattccctttgactgcctcctcacggtgagaaaggtcctgggagatgagggttgggatgcagcaggatggagaaatccattcctagggttgagtcctgggagatactcgtccagtcctggaaaataatagcttcccctggcattatccaccctcgaggacattggaattgacctcaactccattcccgatcccctcccaggttcgggcacttggagggctgctcaagttcctgggtcgaagaagaattggggttgaactggaagactataacatcagcgtccccatcctgggctttaagaaatttgtattgtaggtgatttactctaacctcaagcaaagttaggtgggattgggaggcctgaatagtaagacagggttaggggtgggggagtgggtagtgacccatcaggtaaagtgctctaggacacacaagagcacctgaagggggtggagctctggggagaatactgagaggagtggaatctagcagtgaattcacactgcccctacgccatccaccttcccttctgcttgttttctgtcctcaggacccatctggtgagcatagatcaagacacatacaggtaaggggaagcaggctgttgtctcgtgggagggagaaggattaagtttaatgctctaataatcctaatgaggctccagtttctttaatcctggggttattaaagtctgtctccttgaagtaaaggaagagagagtgaggataaaggaagaaaatcacaaaggtgccaaataggtatcctaccttcccgagtcatttatcctgaagagaaaaatggaagcagagaggagtgtgggacagaccttacaacaacccttgatctcggagtgcgttccccacctccattccattttctcaattccctttaaaaacccaaggtaccaggacacctgggtggctcagtggctgagcatctgcctttggctcagggcatgatccaggcgtcctaggatcaagtcccacatagggctcccttcagggagcctgcttctccctctgcctatgtctctgcctctctgtgtctctcatgaataaataaataaaatcttaaaaaaaaaaaaaaaaaaaaaaaaaaaaaaaacaaggtaccccatttctccctgacagtgttctgcagatatttaagagtgagccccatccctcggtgtacaaagtggccagcgggctgaaggaggggctcagcctctttggtaggtatgtcccttccttcatcccacactacaaagcctgccagaaaagcggctgcctccaaatatgtgtcccagcccctctctttccacttcactcccactgccagatgtctcttccattccagtccagctgtcttatcatctttgtaccctccctgagcttgggcatctcccctcacccaccattgtccagtgtcatttgcatatcatcactgactttgccaattctatgtttgttccttgggcttgtatggatgtttctgccagtcgtgcacctgtccaagccctgtgtatagaggagagttacataactgcataactgcatgttttattggcactgagtctttatcaattgtctctggctttagggtatagtagggacatcgtcccaagtttccacatggttttactgtgcatatctcagtggattgtgtctaatgtttacatatatgtgttgagctctttgttgaatccaactacaaccactctgtgtatttttttggctgactgctcctgtgagtacccattcctcccctaagcccatgtaaggtaatcctggctcagacttgtggccaggcgctggctttagctgcctttgtgtcctgtatctggggaacgcccccaggtcagcctgcccaacacctgaaacctctggcccagatgccttggtttatacacatccacacattcctttccctgcccctgccttgtaacaaacttgctccctgcccttgcttttccccacaggaatcctcaacagatgccgctgtaagtggggagagaagctgctcaggtgagtctcacctgccataggctcatgcatgcagtctacgagctcaccacacaccactccatctagtagtaataaaaacaactgctatttctcaaatgctagctaaatgcatttaatccttacaacaaccccatgtggtagctagtattatcctcatttgatgttgtcagcacagatacacatatgcccattggtcatacagacttgcatacacaggcaacagaaacagccacagaatactaatgcatacgtggtggtatcttttttttattgaagtgtagttgataaacactagtttcaggtatacaacatagtgattcaacatttatacacattatgaagtgatcacaataaatctagctgccatctgtcacatgcaaagttgctacaatattgttaactatttcttaggctgtatattgtcttttttttttaataactagaagtttctacctcatatggtagggctgtatatttttaaagatttaaaaattttaagtacagtatacccctcattgtggggcttgaactcacaaccccaagatcaagtcacctgttataccaactgagccagccaggcaccccatatggtactatctttattttttatttttttaaaagattttatttatttattcatgagagagagacacacacacacagaggcagagacacaggcagagggagaagcaggctccatgcagggagctcgatgtgggactcgatcccgggactccaggattgcaccctgggctgaaggcaggcgctaaaccgctgagccacccggggatcccttatggtactatctttaattataaaaaccatacttcaaatttgagctattcttaaaaaaattttttttgagctattctctaatgactttcaaaattgtgtctctagctctgacctccatatgtggaatgctcactgcatatcatcaccacttgtaatttccataggcagttcaaactcaaagcatctaaactgatgcccactgggcctgttccccttcctgcatcctttttgtctggctaatggcattgcttgcagtactgtttctcaagcactgaatcttggattgatgcttctccatcatccttcatattcaattattcactaaggcctattgattccaccctgaaatgtctttcagccatctctctccactgctaattctggctctaatcatttccaatctggagcattgcagtcacctttgaattggtctctctgcctctaatctcttctttttctaatctgcccttcattccaaaatacttgtcattctaaaatggatctctattttggagatgcactccacttttttcttaaaccttaagtagaaacaaaataacaaacctcaggaggcttccccattccctgtcagatgagcatcagcatctttagccatatgatgttcagggcccctcccattcacctcaacttaaatttccaggattatcttcccagccctgcctaaatccctcctcactggacccaccttatattctggtcgtttgggccattttctaccatggaaatacaccatgcctgtgtttatgcagttccttctatgaaagatttttcccttgttcttcacttgtcagaatctgtcctcctcttcaaggtggcaagccctctgtcacctgttcggggaaactttcacaggcacctggaagcagactgacctgcaccttcctgcgtgcttagtgcctgtttatgtttcctggctgcactgttccattaggttggagtcagcggtcagtgaacctgctcactcatagctgtgagctccatacagtggtcatgtctgttaatgtcggtgtctagcacatggccttggatgtagtagcacccagcgagtgagcacggtacacagatgcaagcacattggtcccattgtctctacaagctcagagctgaaggctttgctagcccacagatgcacaattctttcttcacctcatgtgccctgcactttgtgtcttttggcagttaatttaggataatgtctgaggttgtctccaggtaattgggatgagttaattaccctcgcattctacaggtgcagatctctcatctcagccagtgatgagagcaaaagaattcttagagaagaacagagttaaatgcagaaaggaatgccaatcccccaggtaggatccagtagggcatggactcataacctgaattatgaactaggggtccaattggcctacagcaggacggggcaccaggaaggtgactggatgtcacagtgtgctctgaaaagcactgccctagtagtctggagacctgagttggagacccagctatacttcttactagcacaataactttggacaagctgcttattctctaagggcttcattttctcggctgtaaaattaggagatttagcttgattacgatatctggcactagcagtacatgagtcagaaatatctcaggattttacaagatagatggcttggtgaaggttgtgctttccagaatggggacaggtattcacagtctggcctacattgctgcaggtggagctgtctgtggctgaggagcagaggtgcctaaaacccacccttgaatcccacccagccctccgcttcactccctgcggtgttctaacccagggtaactggccttaggctatagtgtgagatacatatcctcaggccccagtgtctcctcaggttgcttcttatataaaatagcatggctaaatgtcctgctctaatgcagaaaagaattcactgtctcacaggtccttgcagagtcacactcttcatagccatagagagacaaggacactcagacaaacccagatgagagatttattaccgtatactaatttaatttagtagaaaatacctcagacacacaatagtagaagtaatgatgatgatgatgatgatataaacctctatgtttgcacctgcatatttaagaatataacaatgttactaaaggggtgccctgctgctggctcagttgatagagcacgtgactcttgatcttggggttgtgagttcaagccccacgatgggcatagagcttacttaaaaaggttggggagggggtcgctgggtggctcaattggttgtctgactttgactcaggtcatgatctcaggtcctgggatggagccctgcatcaggctcttcactttgcaggaaggctgtttttccccctaccactccccttgttcatgtgcgcactctctcagataaatcaataaataaaagttttaaagagtcttaaaaaaaaaagacaatgttattgacacctcttaagtgtcccttcccaaccctttcttctctgcagaagtgaccattatcatgaattgaggacttatcattccccatggaatggttatatacttttacagaacaggaaaagatgtctgtactgtcacacccagagacacttacagccaaatgcagataaactcatgctgactcaccctcttcttactcagccgcagagagagctagaatgttggcacacaaatacctcaatatgctgctctccgtctaaatattgacaagctctgtcgcatatccacatggagtgacacatggtcacatccatcaaaaccacgataaacagagtcatgctcacatgcagagatttttagtgaatatgtgtaaacatacccatgtggataggacactgtacttgccagtacagatacatttcaccccaatccccagggacttccaaacacacatttttcacaaattgaaatcaagacaatgatgagaacagatgtaacttctggtccctccctacttcatccctcacttccaggctgtggttcacacgtccaactcaggatctggaagagctaaattctcggctggatgtcattcagtttttcctcctacctcagaatctggacatggctcaaatgctgcatcggcttctgggtcatatcaagaatgtgcctgtgagcccaggccagggcagggaggtagggaaggagcactgggattcttgggggcattagaatggaggagagaagacagcggccatccccttgtctgactgtagctgattctgaaacgcatgaagctgtcccacaccaagaccagtgattggcaggttctgtacaaggtaaggctccccttcaaaacccagagttccaagttaagcccctcagcaggcgatccaggccctttgcactttactcaccaggtccgattttatctcaacacttgaacaacaacaactttgtatcatagaaattataaaaaatatttagaataatataacaaacccctacatgcccaccatgcagcctgaacactttgactcataccaatcttgtttcatgtacatcttctccctctttcccctctctggattattttgaagcaattccagccatcatatcatttcacccataactatttcagtataatttctaaaagaaaattacttttttcttttaaagattttatttattaattcatgagagacagacacacacacagaggcagagacacaggcgatggaagaagcaggctccatgcaaggagcctgatgcgagatgtgatcccggtaatccgggatcaggccctgagctgaaggcaggtgctcaactgctgagccacccaggtgtcccaagaaaattacttttgggggcagcccggtggcgcagtgttttagcgccaccttcggcccagggcctgatcctggggccagggatccggtcccatgttgggctccctgcatggagcctgcttctccctctgcctgtctctgcctatctgtgtgtgtgtgtgtctcgtgaataaataaatgaaatctttaaaaaaaaaaaaaaaagaaaattacttttttttttgaaaattacttttaaaaaagaacaataccatgatcttactaacagcacagctcttgaatatcatcaattatctgatgttcacatttctaatcctcttaaatgtcatcattttttaaaaattactttttgtttaattagagtgcaaatgtgttcaacatatggtgatgggatgatgtctcttgaagcctcctctgtgggttccttttcatttcactgttctctctccatctctacctgcatctttagctctctttcttcccttgcaagttatgtggtgaagaagctggattgtttctccagtagagttttccttaacctggattttgaagattacatttctataaattaacagttgaatctagaagattgagcaaatccaagtttgattttttcaatactgttttataagtggaagaatataatgccttatatgtctgtctctccttttgcgatgttagcagcttttgatatttgatactgaagttccttagggattgcaaggtcatgttattccatcattctttccccatgtattttattcagaatgttttctgtaaagagaagcttcctctcaactgccttttggttacccagtggtacatttcatattaaagaaattgcttgatttcccccccaccttcacttaccagctctctgcatgtaggaaattattagttctctaacatcctccaaggtagccagtgtgttttttgttgctgtttttatatcatcacaaactcagatttacacatgtgtttcaatccacggcatttttaatctttatacgtgttcagattatttcctctgtggccgatgggagcctcttcatgttggtttctgagtccttttaaacatgaccccagtaggtgtccccacttgatagtttctctcctgctctctggtttgacgctatgtaccagatatatcatttatatctactgcttctttttttaaattttatttatttaagtaatctctacacccaatatggggttcaaactcacaaccctgagatcaagagttgcatgctctactgactgagccagccaggcgcccctacatctggttctgaaccagaaccagacatttctccaaagatccccgactccttttagtaaaaaatagtatttctctattacagtttgaataccagagggtgcacagcatgttttttttattgctttaaaggcttttctgcaaacagatttaggatttttatttattttttttaattttatttatttatgatagtcacacagagagagagagaggcagagacataggcagagggagaagcaggctccatgcactgggagcccgacgtgggattcgatcccgggtctccaggatcacgccctgggccaaaggcaggcgccaaaccgctgcgccacccagggatccctaggatttttaaaaagtaaaatatgggaacgcctgggtggttcactcagcggttgagcatctgcctttggctcagggcctgatcccaggatccaggattgggtcccacattgagctccttgcgtggatcctgcttctccctctgcctgggtctgtctgtctctctcatgaataaataaataaaatctttttaaaaaagtaaaatacataataaattggtactgatatcaacaatttaaattcagaagcacagggatccctgggtggtgcagtggtttagcgcctgcctttggcccagggcgcgatcctggagacccgggatcaaatcccatgtcgggctcccggtgcatgtagcctgcttctccctctgcctgtgtctctgcctctctgtgtgtgtgtgactatcataaataaataaaaattaaaaaaataaattcagaagcacagggttcttaccttgtatattcctttactatcctcttcaacatcccttcttccatagtggaattctggttctcaataacactaggaatggtaagattagaatatcactcatttgccttttcttatattacttccacaacaatcttagtaggagtaccagcactactaccgatgatattgttattgaaagtaatttaagatttttggggatgaagagggaagttctttttgtcctcactaaggatagagtcaaattactgtgttttagtcacttggaatagctcctctctgtgtggttgtgtcactatctgaatatacatttacattcatttgtttcattctgtttttgattcttagagactgggttttacaatttaatttacttttgtactcgcttcagcagcacatatacattttaatttacttgtataattatgtaaaatatttacacaattccaaatgtaatctcccaaacaaggaataggcaactaattctagtttctatcttttgcccctttctacctataggtaacattttctttaaaaaaatgttttgaggttgggatgcctgggtgcctcagctgttgagtgcctgcctttggctcagggtgtgatcccggggtccgggatcaagtcccacatcaggcttcttgtggggagcctgcttctccctctgcctgtgtctctgcctgcctctttctctctttctctcataaataaaatctttaaaaagtttttttgagctttatcattctgttttgttttaatttcttatttatttttttaaagattctattcataaaaaaaaaagattctattcatttattcatgagagacacatgaattctttttttttaatttttaaagatttttaaatttttttttaagttttaaagactttatttatttatccatgagagacacagagagagagagagaagcagagacacaggcagagggagaagcaggctccatgcagggagcctgatgtgggacttgatctcaggactccaggatcataccctgggccaaaggcaggtggccaaaccgctgagccacacagggatcccgaattcttttttaaaaaacaatataaggggcagcctgggtggctcagtggtttagtgccaccttcagtccagggtgtggtcctggggacctgggatcaagtcccacgtcaggctccctgcatggaatggagtctgcttttccctctgcctgtgtttctgcctctctctctctctctttctctgtgtgtgtctctcatgaataaataaataaaatctttaaaaaaaaaaaaaaacaagaagtgaagaaaagctgcaaaaattgtacagggtgttctaatataccttttcaaccagcttctctctgtctcctctctctttttaagattttatttatttattcatgagagacacagagaggcagagacacaggcagagggagaagcaggctccatgcagggagcccgatgtgggacttaatcctgggactccaggatctgagggcagatgctcaactgctgagccacccaggcgcccctcaaccagattctcttaatgttaacatctaattaaaaaaatgttaacatcttatataatcatagtacaattaccttataactacttaatttcatgagttataatgcaatgcttatttttgctcggatttctctagtttagatccttgagagttcttctgagattgacttttaatatgcccagattggcttttcagattcagataggcttcccccccaccattttatttatttatttgacacagagagagagaaagagagcacaagcagggggaggggcagagggagacggagaagcaggctccccactgtgcagggtgcctgatgtggggctgtatcccaggatcccaggatcatgacctgagctgaaggcagacacttaaccaactgagccacctaggggcgcccctcagattggcttttgaaatgcccttctgacatggcccccagttcatttttgagcatcttctaactttccagcactacaagatgctgctccaggctcatcttgtagtttccttgccccagccctggaatcaaccatttctccaagaagtcctggttactctatttgaagaatagtattagaaaccaagatctggacactagatgtggttattgctactggggtatctgtcagttcttctcaccacagacagagctaagaaataaatgtatatagggaaccctgggtggcgcagcggtttagcgcctgcctttggcccggggcgcgatcctggagacctgggatcgaatcccacgtcgggctcccggtgcatggagcctgcttctccctctgcctgtgtctctgcctctctctctctctctgtgactatcataaataaataaaaatttaaaaaaaaataaaaaaaagaaataaatgtatgtaatgtcttaaatgcatgctaacccatgcattcatatccatgttcctgaatccatctatctatatattaaacaacccgtaagttcatactcatacctctgatcccaggtcaatgccaagtgtcttcctcttttcctcatttgtaacttccttctccaacagtgagaaacttgcttctccttatctatagcaggtttatttgaacatgaacaggtatatgtaactatttgtatattccattgccactacttaacattgatcctctgtttcagccagggtgggctatgcatttgggcactctgctgaggaaactcactgtgttctgctcagtatagtgtggtgcttaaaagccagatacctgggttcaaatcccagctcttttatttactctctgtgagacctggagcaaattgtgttatttctttgtgcttcaggttgcttgtctgtaaaatggagataatgctagtccctatctcctaagattattttaagaagctaatgaaattaacatatgtgaagagtttagaacattgcctgtcccttagtgagcattcagaaagtgttagctcttcttattcctactgctatttatccgtgctcttgctctcaaccagaataccctccttcctttgaatagccttaatcatttcatgacccaattcatttccctttcttttcttttttcttttattttatttttcctttcttttctttttctttctttctctctctttctctttctttattttcttttcttctttctttctttctttctttctttctttctttctttctttctttctttctttctttcgagagagcgggtgcggagggccatccatgcacatgtgcccctgtgaaggtgggaggggaaggcagagggagaaagagaatctcaagtaggctccacacccagtgtggaacctgacttgggtttcaatcccaggaccccgagatcatgacctgagctgaactcaagagtcaaacacccaattgactgagccacccggggcgcctcatttccttttctctgtaaagatctccccaacgatgttagcctttattagtcttattctctgaacttccttactaatttttaaaaagatgttatttatttattcatgaaagacatggagagagagaggcagagacacaggcagagggagaagcaggctccatgcagggagccccatgtgggacttgatcccaggactccaggatcatgccctgagccgaaggcagacgctcaacccctgagccacccaggcatcccttccttactaattttagtcagttccataacttgatcagtctgttttgtgggtaggcattgtttatgttgctcgtttgttatcatcagggctggattataagcccttttatttatatgctttgtatgtgctctgcttctgagtaaagctcagtaggtgtctgtcttaacttgggcttcaccctggggacttagctgtcagtggctctcgctccttctttcctcctgctccctcaccccagtgctgtattgcctcttctgctcaagtactttcctgcctatctcttgccccgtttttttctccttcctcaacatgaaattctctcctttattaaggcacctatcactttattttgaaatcctgtgggtttgtttcttctccctcaacagactatgagctcatgtgggatggggccacattctagttctttgtggcctcactactgtgtggagtgcctgacacagagttttacagatgccatttccttgcttactatttcttctttgcccttgagaccttgtgtctttcttattgttctcccctgatgctgtctgttctcctcagtccgtccctgtcccctcgcctcagcccaccttctgtccacttctgctgtagactgtgtatagtgccctgggcctgagggatgcctgccgctccctgccccagtctatccagctctttcaggacatcgcccaagagttctctgatgacttgcaccatattgccagcctcattgggaaggtggtgagtggaagaaagaggcagagcccctggggacccaggggagggaggtgggattggcagatggaggaagcctgggctctggggaacatggcgagagccatatctgggagacgttaagggtcacctggatgaccaaagaatgggatggtgagaggaggtggcaggatatcagagatgcatttggagagttagagttaaagcaggagatgcagggagaacaggggtgcaaggagaggtgagggactggacttcagatgattctgggcaatgagcaactggattttttatctcctcaggtggactttgagggcagtcttgctgaaaatcacttcacagtcctccccaacatagatcctgacattgatgagagtgagtgttgggtgtgcagctgggcctgtgagcccagtgattggggaccatcatcagtaggtggccactacaactggggataaccatggccaacagggcaggaaccttgcttttgatacccacatgtcttttaccctcctagaaaaacgaaggctaatgggacttcccagtttcctcactgaggtggcccggaaggagctagagaatctggactcccgtattccttcatgcagtgtcatctacatccctctggtgagggcagaaatgtgggcataacccccatggatcttttatgggagatattaagcttatgaaggacacactgctagataagaaaaactcctagagaagtctgaagaatatgaacaccctatgatagctttaggcccctgagggaagccctggagaatacagggatctctggcatcttccaaagagatagggtgcccagtactttactccctgtcttatctcctcttcactttcctcagattggcttccttctctctattccccgcctgccttccatggcagaggccagtgactttgagattgaaggactggacttcatggtaagacccttgacctctgtagtggagtgctaatagaaataagtccgcagctgagagagggctgtattctatcagcactgcccaatgagggatgtctctgctatagttttactttgatctttaccagctctaagataaatgggaaaaaaagtcagggtgggaaagaaatgaaagacctgttctctgaaaactataaaaccttgatgaaagaaattgaagatgacacaaagaaatggaaagacattgcatactctggagttagaaaaacaaatattgttaaaatgcctatactacccaaagcaatctacagatttaatgcaatcccccaccaaaataccaacagtatttttcacggaactagcagaaaccattctaaaatgtatatggaacataaaagacccaaaatagccaaagcagtcttgaaaaaaaaaaaaaaacaactggaggtatcacaattccagagttcaaattatattacaaagttgtagtaatcaaaacagtatgatgctagcacaaaaatagacacatagatcaatggacagaacagagagcccagaaataatcccactaatatatggtcaatcttttttttaaaggattttatttattggggtgtgtgggtggctaagttggttaagtatttgcctttgactcaggtcatgatctcaggatctcaggatccttggattgaaccccatgtcagactccttgctcagtgaagagtgctactcctttctgtctgcccttcctgccccacttctgtgcgtgcatgtgcacactctgtctccctctctctctctttctcaaataataattaaaataaggctgccctgcccaattaatctttgacaaagcaggaaagaatacgctgtagggaaaagcctgtctcttcaacaatggtgttgagaaaataggacagttacatacaaaagaatgtgtgttgaacctacttaagattctctctccctctgtgctccttctcccctgccctattctctctctctccctctctctctctctctcaaaaaaaaaaaaaaaagaatgaatatttaagagagaaacttataaagaaaataaggaattgattcccagaaaagtcagaagagaggttaattttgaggagtcggagaggggtgtgattaggatggttctctggagtagccaccaaaattttagttttttaaccaactttatgacctacgtggttgattacaagggtatttgcctcattgtaattccttaaggtatacatttgttttatgtaatttcctatgtctatttttattattttttaaaagattttattattttatttattcatgagagacacagagagagagaggcagggacatgggcagagggagaagcaggatccctgcaggaagcctgatgtggaactcgatcccgggaccccaggatcatgccctgggccaaaggcagatgctcaacctctgagccacccaggcgtccctgtctgctgtttttaaataaaaaggtttcttttttctttttttttttttttacaagaaaaaaagaagtcaggctggggctgaagggggtgttagaggagatggagatgaaggatgcaaagcccacttgagctcttgtttccagtttctgtcagaggggaagctgcactatcgtagtgctcgaaccaaggagctggacgcactgctgggggacctgcactgtgacatccggggtgaggagaagcaaagtcttgaggggagtgaccagctcagaggctcatttcttcctgctctttcacttgggctctgcaccttttcctctgaatgtctcggggtgactcagtatctgcaagcctctttccagggctctctgctggcttctctgcctcttcttcattttcccctggagctgatgcctggctccctccccgcccccaccacccctagaccaggagaccctgctgatgcaccagctgcagtgtcaggtgctggcacgggctgctgtcttcacccgggtgttggacctggcctcccgcctggacgtcctgctggctcttgccagtgctgcccgcgactatggctactcaagacctcgttactcaccccaactcctcggggtccggatccagaatggcaggtaaaagcagcagggggtggaagcaggggcacatggagcccaaaggccctatcttccggtggcttggttcatctagatccacaggccatgtgtgagggaactttctacccactgcagacatcctctgatggaactctgtgcccgaaccttcgtgcccaactctgcagaatgtggtggggacagagggagagtcaaagtcatcactggacccaactcctcagggaagagcatatacctcaaacaggtgaggagaatcccggcacactaggcctctggcatcttctgcattgtctccatctcccactggcctgcagacacaggttcctgcaactcctccctggtgttccaacccgacccgtcatggaaagacgatggtgcacaccccctgctcctcacatgtcctcatcctttacctgagggagagtcgtgctctaacgggtctctctgtggcctgaaagcctctcctcacctctcgataagtccatgctgtccccaagtgtgcctctgcccacgcccccaccctctcgcctgattctaaagagagctgagggggccatcctcttctgttaagtggtgtccatccctccttgatctgtaattcacccctcagcctcgcctcaccttcaccatggcccataccaccaggtgccagaccctgtctcctccatatttaggtaggcttgatcacattcatggccctggtgggcagctttgtgccagcagaggaagccgaaattggagctgtagatgccatcttcacgcgaatccatagctgtgaatccatctcactgggcctctccaccttcatgatcgacctcaaccaggtcaaagggagcaaaggggggtgggactgggggagggtgttaacgaggaaggaactctatccttgaaaaacgatcagaaccaaaaaacattccctctgctgcatgcttctccattaggggcagggagcaccgagttcagagactgggagaatcaataccagaaaactttactgaacctttgctctgcatgaggcattgttggcaaagaagggatgcacaaaacgagtctcgccagtccagacgggtggacacacatacagcggcttccctcacaggcagactgtggtcagcgggttccttacaggccttgagtactactgaaactctccctttccacccgctgcccagcaggtagcgaaggcagtaaacaatgccaccaagcagtccctggtcctcattgatgaatttggaaagggaactaacacggtgaggagacaaactgaggagaagccaaggagaggaggacaaaggggcgtgagggtgacgctgggccacaggagaggagtgggcgtgtgtgggcagaaaagaaacagagaagtgcaagatggggtcggctagggcaggtggacaggtgaacacgggggtgcctgtgcttcagtaccctgatgcctgccctgtgcgcaggtggacgggttggcactcctagctgccgtgcttcgacactggctggcacttggacccacgtgcccccacatctttgtggccaccaactttctgagccttgttcagctccagctgctgccacagggaccccttgtgcaatatttggtaaggatacctatccagctctctagggatccctcagaggagcagttgccagaatccaaaacagactcctccattagaacgggggtgcccggagcacaatactgcatccttcctctctcgctctccacagggattggccaagggtttcagggccagatgcagagtgattgatgatactctgtccccttctgtctcttttaagaccatggagacctgtgaggatggggacgacctcgttttcttctatcaggtgtgtgacggtttggccaaggccagccatgcctcccacacagctgcccaggctggacttcctgaccaactccttactcgtggcaaggaggtgagatccagaggtcaaaccctccatcagggctccctactattgtccctgctcctctcaggggcctgggtttctgggtccatgggacttctgatccttatttctggttctcttacccaccttccccacccccacccccttcttatcactaggtctcagatttgatccgcagtgggaaacccatcaagcctgtcaaggagttgctaaaggagaagcaaatggaaaagtgagtgtgtggcccagtgtcttggttctttccagaatgttctgcagctcttctcccctttcaggaccccagacagcctctttgcccttcaaacacccatgatttgttcccaaaatccctaaattgtcctggggccctgggccgcagcctctctcctactgcctggggactcagttttctattctgccataaataaatcccactgtcctctttcccatcagttgccagatgttagtggataaatttctgaagctggatttggaagatcccaacttggacctggaccttttcatgagtcaggaagtgctgcctgctggtactgccatcctctgagaccccttccttggccctgctgcatacactctagctgtttcctcatctccctcggacccacagttctgttttcctggaaattttgttccatgttgggaataaagttgacttcagagaatgttattgtttctttaacccagctaatacaaaacaaaagaagagaaatgagatgaaacatcaagcagcagtctgcatccagagggtcctgccctgcctcattaaaaatacagggacatgggtagcccgggtggctcagcggtttagcactgtcttctgcccaggttgtgatcctggagtcccaggattgagtcccacgtcaggctccctccatggagcctacttctccctctgcctgtgtctctgcctttttctctctctctctctcttttttttttttttttttttaatttatgatagtcacacacagagagagagagaggcagagacataggcagagggagaagcagactccatgcaccaggagcctgatgtgggattcgatcccgggtctccaggatcacaccctgagccaaaggcgggcgccaaaccgctgtgccacccagggatccctcacttgctctctcttgctctgtgtctctcatgaataaataaaatctttaaaaaataataaaaataaaaacacagggacatggaccactaagccacacctcatgtgtgactcttgatcttgcggccatgggttcaagcctcatgttaggtttagagattactaaaaacaaatcaacttcaacacatacacatacacacacaataactatgctgtagggagacccttgggttccacccagggggacttcatgagaaccagccacagctgttttaacagaccctacaaaagcagatgagaaggaagagattacgccccaacagagatgatctttccccttaagtaggaacaccccagcctcagacatggcaggaaaggctctgagaggctgaaaaacaaggtaggatgggcacaggagggaaggggagggcccagccctgcatgccactgggcgtggctccactcttcccactccagagccatggggagccagggtcccaatgggctgcccctcgtctgtgctccctacacagttatgctgctaccactcaggacaagccgccaggacccaggggcccggagcttcttcctctgggtgagtattagtccagcaagaggccccagagaaacccactgcctagatctgtccatttccagccaattttgagggcccctgtcttcccccctgcttccccttgccttccaggtgctcagtggttagtctgggctcacactcagtgaccagtgaacccaaccaagagttgagaggaagtgccacggcccagagccctgctgtggagcaagtcagcctctgcttcttgccttcccagctgcagaggatgcaggctctggagagggagcaggatgccctgtggcaggggctggagctgctggagcatggccaggcctggtttgagggccgtttgagggaggcacagcaacagcagctgcatctaggggctcttggtgaggtacggggctgatgtgcggtgtgggggagcagggagatgcagacacggcagacaccaccatgggaaggcaagagttaatgggcagggatcatgaattggaagcactgtaatgactggatgccaccaagtattaggttggtgttcattgtcgggattggaggaggctggtctgcattccattcagagggacatggttaggatcactccattgagatgggggagtggcctggatcattccaatggatcaggactagacagggaggatccataaaaaataaggaaaagggtactgtgctgtttgagggggatggaggaactggattgttaagagatgggagtggagagtgggggatttttcccacctgccttgagggctactgagataagggaatcccgatggagaagaaatatgacctgtggtgtcagaagagtagcagatggacctcaagttttcaccatgttgtcagcctccaactcctcctttagaatttcctagcagatttacattcagagcctcatggcccccagttagcccagattcaaaagatgaccatgtgtttgcggagtctggttcaggagaaggtgagtttattgtttttgcttagatttttgggaagtgggggtagagaggggacctaggatcaacactggtttaagaggaaaaagtaaatcccacccacccctccctcccagttctcctcacatcccttaaataaggctgatttccatgctgcccagggctggaagggaaggccaaggaagcagaacctctggcagcaacaggtaggctgtagggggtggcaggagggcggagcctggccccctagtggagcggggagcacagatgcccacggtttctctcctcttctccaggagctgtccaggcagaaggcaggcattcagccaaaaggggagaccgtccagcttggctgccccaagatgcgggggggcccaacccgtgtctaaaggttcctctgggtttcctcatttggtgaggtggtggtggtggtgggaggcctgggcccgagcccccagtctccttattctgcctcttgacctaacagataaatggctccaggtgatgggccaactgaagtccaaacatcttggtataaaatttcttctcagcaactgaaaacttccatttcatctttcctctccctgataggttgatctccctgatatgtccccatatccataaatgatctctctttggaatctctctctagggcagatatgtttactgaaactgtccttcaaatttaaatacaaaaataaaataggagcttcttcagaatttcaaataagaacaattctatacataaaccccactcccaactttagtttcctccccatacatctttccttttcctgagcttgggaaagcatgaataaataatggagtaaagagatgcgggatccctgggtggcacagcggtttagcgcctgcctttggcccagggcgcgatcctggagacccgggatcgaatcccacgtcgggctcccggtgcatggagcctgcttctccctctgcctgtgtctctgcctctctctctctctgtgtgtgactatcataaataaattaaaaaaaaaaaattaaaaaaaaaaaaaaagagatgctacggagaaataggaaccaactttctccaaaaaggagtgtttgctttggttcccaccagagttagagaaagtgtactatgggagaatccatggctctctatctcaatctcactaaggaagagagggacaagtgcatgagaaggaaaaccttcatcccatctgggagaggtgggggccagaggcccatgtcaccttctcagcaatgggataagattgaaaatagcactggagacccgttcctctaggggttgtagtgttaccaggaggccaagcctagcaggagcagtactcctccaactgtgccccaccagcagttgcctatccgccctcctgcagcccttccccgagtcaccaaagtggacacagagctggtcgagtggaggatggggccagatgagtgggcagtggcagccagtgggtcctggggagaaggggagagaggttgtcaggctgtctctacccaaattaagcccacaacaccctccccttaccctgcctggcctgcaatgggaagtgggggtacctcacctgcggggccggagccagcaccagaagccagaggaaggcatgggtcgggggcactaggctgccttctcgacctgtcgcagtcacagtcaccattaccacggagtctggggcggctgagtccgggacctccaaccacaggtggccccacacagactcattcggttccaggcgaaccctgttgagtggacacacagtgggctgaaggcccaggctctgaagagctgagagcccagggtctcaggccaggtgagaatctgaatgcccctgggaggaggccgtgtaggtggggcttaaagcaccaggccaccatgtgagggggagcgggagggaccaaaaggtgggccagaactgagcaggagggttcgggggttgtacctggagaggttgaaggtgagagggaacctggggttgacagatgtcctaaggtccagatcctgagggcctgagaagctggcaatatggaggctaagtggggccttgctgccgggggccagggaccctggggagctgctgagctgcagaggagggcgggttaggggagagctgctgcagctccctctggccccacccgcaccttcctctggcatctcacctccagaaggactgggaccacggtgcagggctggggggccactcggtgcaggccatgcccctctccatcctggccgatcaactccagagagaaggggcccgtggtggacagaagtgcgggtggcagtgaggcggccaggagacctcgctcccgtggtcccatgggttccaggggcacccggccccgctcagccccttctggaatccctcgaaggacgacatgggagaaatgcgaccgaagatctctggggtcacctctgaaacccagccctgtcacctctaccagcagctgggtctggaggcctgggacagggggtgggaggggaggatgatggtccacaggagattcagacatggggagaaaaggatgaatggttttggaaacaggggttacccctgggagtatggatggagaaagggtgctacctctgagtgacattgttgggcagggtgaagacagattctgggatgcctgaaatgttctaaatcttgaactgagagaggaatggttacatgggtgcattatgaaatccagctgtttacttcagttagttacttctgtatatgtaagccgtaactcaataaaaagttaaatacagaatttcatagctaaatagatgggataatgggaaagtaggggtggggggacagatgtacctgctactggctgagccagggggtagaggccagggtgggggccttcatccatgggaattccaaagtagaagaggaagtccagggctgtctgggctgaggagggccaaggcaatcagagaccttgccaaaacaaatgtcactgacagtgctctctgagctctgcagccttgtcctcccttcccaggaatatctccctccttaccttgcaccctaacccggggcatgccctccgctatgacctggatctcccaggtccctggctgtggggggtcattcatggtaactatccagaactgcccaaagcggcgcgtgtgacctagaggcccttcgccttcctcctggccctgggagactcctgatggcagtgggagagcaagattggcacatgagatgattcctgtcccttagtagttcacccttcactctccatccttcccactgcctcaagtcacactcgtgggtgtacctgctgggctcctgatccagaagctgctgacctccccatggatccgaactgtgaccctctggagcagcgcatccacactgaagccaaatggcctcccagacaccacaacaggaggttccaggggaagggtaaccttgagggatgtgcagaaccaaagaatgaaggagaagataaggcagtgaacacagataaggcaaaaaacaaagacaggagaaaggtggagacagaaagaaacgaagtcacacgtgaagggctacggtgaaagagaggggcacaggaccagggatgaagttacagtaaatgacaaagtggaggcaagggattaagggtgaggcaatcgcttcttgtccctccttacaagatggcaggacttcctgtggtagccccgaggacagattcctggaggccaaggttgggggacggggcagtactactaccgaaggagcaatgtggaaggtggggggccatggatctcagagggagagaaacttcctttcccacccttctaactgctgaggcaacacagctgtgttaaaccactaacctaggagaaagagaaaggccatgtcgcccatgcccttagttctcagctggaagcactagtccctctggccaccatactcaccaggtctgccatgctgtccccaacaatggccgccacatcctgaatgtgctggtctttggtgaagatgacctctcctcctgaggccagggccacggcttcatatggctcaaaacgcagaggggacaagacctcacgccgagctcggccctgaaccctcagtgggtcttcagtcacgaagaatgtcacctgtgcccaaaagagaggccagtacttgagtactcccagtgccgtctactatcagaattgggggtctcctgtgcaagtgcactatggagctgatgactaatggtaaggtctctgtcagcctctgactctacggcagggtctcccagtgacacagcccctaggccttcacttagtagttgcttttcccttgtaactgtcaccctatgtcacccacatagtggattattagcaactagatctccagttctttgaatggtttgttggagacagattcaaatatgaattcagatcagacaagggatctgcaaacgttatactcattgtcttcttgtcccaccccttgccaaagttggttcagccaccagagcgtggcgtgatcctcattatgaggtggttgtcatgggcttccccgtatccctgggcaggtgatgctgcgtctcccatcagtgtgctcactctgcagcgccgttcctgagtcagggattccacccggttggtgaggatggcatccttgggggaggcatcagtgaagacaaagatgtctgagaggggaggtgtgtgcagcagagccagctggcagaaagggaaagcactggtattaaaaatggcagcagcggcagggggacaggtagaaccaggggggacagaattgaaggaaatatgaccctggaaccctggagggaagctaggggcactaggctctgaaggtggggagggaggtgcaggtcccaggaaggctccagttccccttggtggcgggatctggaaaggaaggaagaaggggaggggcggagggtgggggaggcagacctctagggctgacaggcacatctcaggctcatctccaccccccaaggcatggagctcattgagttgttgccagaagctgtcagggtcactggttgtaaagacagggccaaatcctggggagggagaaaggaagcaagtgaggagagggatcccctcatccccgcctaggcctacctccccagtcaagaggcctgctacgctccaggggtgaatgactattgaaacaacagtattcccttatacttatatgcacagggcagggcagaggctagtgacctttggggggaaagtggacctcatttccagagcaaaatggcagcatctcctgtggtcctgagtggacctttacagggtaggtgtgtaggtataaaaagtacctggggcctcagttcctcaccagaaaagccagaaaaataatagtacttacctcagggtgtcattagaactaaatgagttgattttgtgaatcttagaatgtgcattgatccataagacgtactaaatttttaattattcaaagcttcatcaaatatgtgttaagctcctcttaaatgccagctattagatttatacaggtaaataggatgcaacaccaacccttagggaattctgagttttttttttaagatttttacttatttattcatgagagacagagagagagagaggcagagacacaggcagagggagaagcaggctccacgtagggagccctttgtgggactcgatcctgggactccaggctcatgccctgggccaaaggcaggcgccaaaccggggatccctaattctcagtcctaaaggtattttatttgatggtcatttcaaccataggagataggcaggataagacaagtactgacccattctatggataatgaaattgaggcaaaaaaaggtgaaatgatcagcctaaggatgcacagtgactggtcgacccaggtcagggcgtctgacttccagcccaacagggaagggaataaattataactagcttcacaggagcctgcacccacgaaccccccatcttcatcccaatctcggtctacaggaagcggcgagaattgagaatggctgattagcatggaggcagaggaccctgcctaagcacaaatcatgattaacctcataagaaaagtgctaccactttggaaacaccagaagtgccgattgtttccgatatgcacacaggtgccagtgaagactcaaccacaggaagtgtcaccattttgttaaagaagtggaaccatgaggcccatttttccaccagtggcattcacccctcactctggacttccttccttctactctgctcaccagaccagttacctgggtcatggaaaggtaccaggatgtagtgggcaggctccatggggctgccccttctttgttccacaatgtggcgagcctggattttggcagcactgatctcctcacccatactgcccgtggtgtccaggacaaagctcaggctggaggctgggctgatatccagcagcctggggagcaagctggagatatggtgaagggtctgtccatttgcccccaaaccctgtcttctcagctcccccaagagcgcctacccattggggagcacatctcacagaggccactcacctagagaaacccctgtctcccaggcggcttctcaggaggctgaaggcttggatggaggccagaagggccagttttgcagcctggaggtgaagcatgtggtggggagagaagcccggggatgtgctgtccttgttgatgcccccccgtggtggctgggagctgctccggtcaaaacggcccccatggctacatttccctgggttgaggaaagacagttggagggaggatgtaaaaaaaacactgcctcctaagaaaacgaggcccttttttgagctggcctgacctttcactcttcagcaaaggatcagcaagaaagatgacattttgtggaggccaaatctggaggaaatctggaggggtccatcatcatggtgtacaatggatcccctcatctctctggtcagtccgcaaaagctgccgtgggataatggggaagtcctcccagctgagtgagcagctcttccccacctgaccttcacggccacctcagcaggcctccatccacccaccccattcctgacatcctccttcttccaggagctgatgccacaggaagtgggacaagggcctgcagttctgagatccctatggaaatccctcaggggaaaggctgtgactttctccccttacttccacctggtacctggcggtttggagggatgagatccaaagtagccggacgtgaggagcgtcaagtccagtaaattcccggggcagctcaactcctcacaatcagagcaggtaggatcgcccactggaagggaggacaggaacctagagtccacggttctgccaccactggtctttagccccgtccacccgaacttgggcttaccccccagctgcccaaagcatatgggcacgcttctaggctttctgagcaaacacctggaggtggtctggtgatgagaccaagtatttgggacggggactgtgctaggaaaccaagaagcatgcggaccagtactgcggggactgagccctctgtgagccgaggacaggaggcgaacttgtaacggacaggaggcagcttccggtcatagttcaggtggaaagaagagacgactatgacggatagtcctggttgctccatcccatgttgggggaaggaagccacatgaaagagaacttgaggtctgttgaccttggtcctggctctgtctccccgggtgaccttggggaggctatccagctgacctggcctttggctgagctgggtgacctcacaggtcattccagagaagaagcaatggcacatcctatgtgacctgaggatgtgacacagtggctgggtgggctgccaggacgtggctctatgggttccccccaagccccgggtcacggccataccttgtgccaggctctggagctcctgcctcggccagaggaggtgaggatgcggctcctgccgccccagttccacccagttgctgtgactgtagaaatcctgtggggaggaagggagatgaagcactgtcgtcatgatctccagcctttactcccactcctttgagtccctcatctgcaaagcctcctcttaccaccccttccccctccctgctgctgtcagataacccaagtgccctccacaccctctgcccgttgcccagaacggagctttccccatgtgggagactcctagtgtttcctctcttcgcactcagagcccacccaaaggccctccagtggcctacagggcccaccactgacaccacgtctccctctcacctcctctggcttctccgcagccacaggaagtgctgccaacttggaggtggggagctggggaccagcctcagggcattggcaagcagcacccccatcctttcttaagcagggaggtctctacccgggggatgggaagacccagagtggagacacccacctgcccccacccccttgcccccgaccgtttcatgctgttctcacctgcaaagcatgaagtgcagccccaagacgccggcgggccagggtgtggtccagggccctggctgccaccagggcctcccatagagccccggccaggcgtgtgcgcccctggcccagccgttcagcatcaaagtgcaggtcagggtcgttcttggatgttggcaggaagtcctgggctgcgttggcacgagacacctcacctaaggctgctcggaaccgccgggaaggaaacccaggcccaaagtaggcagcaaagaggtcatcagcaaggagggtgcggccctggtgagagcaggttagggggcaggggcccctggattaggccactgcccatgtttcctcagccaccatcactcggggtaagcgtgcaaggaattgaaggtgttggtccctatatgagagaggcagttctggatcaggactcttgggtattgttgcagggggtagaggtggggaggcatggaagagaggatggccctcaggaggagaagtcccagggagttggggaatcccgctgggatgggaggacccagggatgctcaccaggaagtcctcaagatgcagcgggggccggcctgggggcggctgctccaggaatagctgcagggtgacattgagtgccgcctcctcagtcaggtcctggtgggtgacggagccaggggcagccaggaggctccagacgttggggaagaaggaagatgcggggtgcagcagttgcagcagcagcagcagcagcagggaggtgctcaaatgggagaggggcacgtctgtaggaagcatggctgccacgtgcacctgccggacagaaggctctcgggaggaggaagcagctgcgagtccagggcaggcccagctgtgtctccaggggcacctgctctgcctcaggccccagatgggtcccagcctgccttccctgccctctcccctcgggtgtcaaccggaggccatagaggtacagacacctgcaggagagggactgaggctcctcccctaggacacccccccacacacacccaagggaaggctgaaacccctctctaggcctctcccctacctggtggctgggtctccggcagggccactggggcgcggtgtcacagggcacttaggtcagagttataattaacctaaggaggattcagtggaggggggtggggcaggcccaggcaggggcacggtggtgcaggacgggcagcccctggcccctctactcatgtccacccaaggttgcgagcggcagctggcaccagggcgggcctccctcagcagcagcacaaaggtgaatggagaagagctgggaggaggaagggcgtgagcaacatgactcagacctggcccagtgccagaggcagatccagacagaagcacctctctgcccaccccgtgcctctagcctagcctgcggcccttggaggtgcaggcacccagccccaatcacacaagacaagacatgggttttgcggcaaaatattttattgctgccaccccatggtggacactgggggtcatgaggagtcgggtgtatcacagcatcttctggaatagcgcaatggcctcatccaccttcttgagctctgcttctatctgttggagctgccggttggacaaggagaaggggtggtgggtgatgaggacccaggcccaagagaggagacaaatgtcaggaatgggggcacacaaaaagaaaaaaaaaaaaaggaatgggggcacagcccagagtcacacaagtgacccacaatgcccacgatggcaggggggtccaggttggaaagatgggtgagggccatatacagtgagtattctggggactgagagagcatggccagcccatcccccactcattctcatcagcctcccccatcagcacctgccctccctcccagcatcattggcctctcaggtctggccttctgccagtgttcagtccccaaacacaaaggggcctcagaggccttgtgccccagccagtagcccccacccccaggtggacagtaggacacaggagttagggacgcaggctcctacgcaggcactgggttttcgtctgtaaaatggcaatggccatacccactgccctgagcgggcttccaggcgaatggatagacagagctctgctcagccactacggcttcaccactcagcctccattcgtttctctctgtgtccatgtggttcaccccactgctcctccctggagatcccaggtgagcccgctgggctttctatgtgtctgggccccagaccagcccctggcatgtgggatggggagcaagggctctggcggggaggcaggatacctattctaggtctgcctccgtcctcacgttgcgggtgtgaccctgggctgtgccctggctcctagctgttccttgtgtaagaggagggattacacggaccccaccggttcaggaggtccgggctatctgctccctggtcactgcccagggctgggtggagtgcagccacgggacggggtctgacgatggagggagcacatggtgtgggaaatggagaaggggtgcccgcccacaccacataccttggctctgtcggcctcctggacttcaaggggcaccttgacagggtagcctgaggcagcgcggcgctcccgcagacgctgtgcctgccgctgtgcctcgctgcgcttggcctgcagcttgcccagttcccgggccgggtccaccaggccctgcagctgcaggtggacggagcaacggtcagatgccagggccacagcacagccctgtggtgcaggagcccccagggccaggacagccaccacacccgcgctggccagcgcctgcacgtaggccgacactgccgatgccagaatgcctgtggcttcatcagccacttccaggaaacctgtggggaagggaggaaggtgagagatctggccccaaggagacaggacatgaggcaaccgcacaggaccatggtcccagagtgggctgaggagacaggggcaaaaggcaggcggaggatacgaggctcacacacgggcctgatccgggtcaggttgtagaaagcacgcagggagcgcacggntagcacaaaatacgataaaaaattataaactggactgtttcaaaatctaaaacttaggttctgtgaaagacaatgtcgagacaataaaatgcaaactacagacttggaagaaatactctgaaaaggcctatatgttaaaggactggtttatacaagagagacataaccagagggcgcctcccagccataccccttacctctgagggctccggatagggggtaacacagagactagggggtgcttgtagtgtccgccggggcagcctctggaacagctcctctgtcacaaagggcatgaagggtgacagcagccgcaggccaacatccaggcaggtgtagagggtctggcgagcacactcggctaccacgtggtccatcccattcagcacgggcttcaggcactcctaggggaccgggaaacataggcctcagggacgtctacctccagcccccactgtgcctgtgaggctggctctggtctcagtgccaaccactggcaaagtgaggctcagggctgtgccgccccacacccaccctgcttctcaccaggtagacatcacagagctcatagagccagaagctgtactgagcagtggtgacagctgggaaatcgtaggcctggaagccttggttgctaagcctcaccgcctcagtcagccggctgcggatccagcggtccaccaggctctcgtggcctccaggcttgggaagaaagagcctatcagctgggaggtaccatacgcctggggcagggaggcaaaagcccatggcgggggtgggcaggaaccatgggcagctctacatcccaggaacctgccaggtctgaagccaccatgtgccaagtacatgaaaaagaaaggacagcacccccccatctccttgagggaggaccccaatgccccaggcttacactgtaactgtctgtacctgtgtccatctgtcccttcagttacatgaaggatcctccaaagcagggcctgggccacctgactcagtggtcaggatcctgacacagcactggccatgcttgtggctgcctgggcgggtgctgcccacctcgccgcctaccaggccctcacctcagaggtggctgagggcacaaaacccttccccaggccccggagggcaaacttggtggcgttccagagcttgttgcagaagtggcggtaccccaatatccggttcacatccaggttaatgtcacgacctgggtgggagtgaagggtgagtcctccccatctccctcctggcacgtgcccagggtgtagaaggacaagggtgggcctcagggaaggaggaaggacttggatgagaggttttggaggccataccctgggacgtgtaggcacagagtccaaaccggagggcgtcggtgccacactcgggaatgcctgccggaaagtctgccttctgtaggaagcagtcaacgggggggcgtcgtgaggtggccgcaccctcctcggcccaccctctagtcccagagcccagcctcagtacctggccatctttagccttctccacctcactggggtccaggttgctgttcagtaactggtcatggaggccctgaggaggaggtgggagtggtcaggagtcgtggccacagccccatagccctgccaggcctggcccagagcgcggccccacctgcagggagactccatggatgacgtccagggggtcgataacattgcctaaagacttgctcatctttcggccgtgggcatctcgcacgatggcatgaaggtagacctggcgaggaagagcagggagggcccgtgacaatgtatgccctcacccagacccagtgcctgcccagggcctgcatctagtcggccccattctgaacctcggggcttcggggtccctaccagcgcactcagcacctttgtgggcatcagaggcactccctcctctgcaaagccagtgcacagaatcactgtgaggaggccctggctgaggcccacccacggctgcagctgtggcacgggatgggagggactgtggggcgggttcggcagtcttcacacctctctgaagggcagcttgccggtgagcttcaggccaagcatgaccatcctggccacccagaagaaaaggatgtcatggcccgtctccagcagcgtccccgggtagaacacactcagatcttctgactgggggcagagcagggcgtgacagggggccaagcccccccccccccgacccccaccccatcccaggctgggccttcaggaacatacttggttgggccagccaaagatggagaaggggaagaggccagaggagaaccaggtgtccagtacgtcctcatctgagggaggccaggggtcagaggtcagagcgggtagggacgcctcagcgctgccctccaccccgagcccgcccttgccttgctggagactgatcttgtcagacgacactccaaactccttggctgccttctcccgggcctcagccttgctgcgcccgctcacccagtaccgctcgtcggggtcctgccacaggtggagtgagtgccaaggggggccctctgcctcggccctgacccctcccactggcgagggtctagctctggcctggttctcacctcccccgggggcacagccgggtcgctgactgtgacaaagtaggctgggatgcggtgaccccaccacagctgccgggagatgcaccagtccctacaagtggtgggggagggggccgtgagtcaaggggtgtggggggtggggggtgaggaggtgtgccccggacagcctttcggccaacacccaccccacgtggaagggcctgacgcaccggatgttgtccatccaggtgtgccaagtccgctgatgggcctcgggcaggatgcggaggtctccccgcgtcacagcggcactggcggcctgggccatctccccacagcgcacgtaccactgcggccgcagcagaggctctaccacatccttggaccggctgcaggacacgtgggtggggacatcaggtggcgagcccccaaggagctgttccatccaccccaccccacccccgccacccacccaggcctccagcctcacttgcaaagcggcactaccatggggttgtcctcaacaccccggaacagcccctgctccttcagcgctgccagcaccgccttcctggcctcaaacctgggtaggccctgggtgggagacaggctccatcacggcgaggcccagacaccccaaggtctctcagccaccaccccagccccggcagtcttaccaggaaaggcgggggcacattgatgagggccccttgggagtccatgatggtgatggcctccagcctgtgccgccgtccgacctcgtagtcgttctggtcatgggcaggggtgatcttcaccgcacctggggtgttcgcaggggtgcctgaggcacgagggactcagtggagcgcctctctctacacacaccccgttttggtgaaagatgtggctccctgaccagccttatctcccacctctttggtaccgtcccctgagacctagaccaagtcctgctggtccaggaaaggcttgttttctttttctttgggaaggaagatgaatgactggagtgcaccttgtggcctccctctctctcccaggacagccccttgctcacctgtgccaaactccatgtccacaaaatcgtcaaagatgatcggcaagctccgagacaagaatgggtggatcacactcctccccttcaggtgctggggacagagggagacatcaaacactccagaaggcctgggcccagctctctcctacctgggaccctactgtccctaacacaaaaaccatcttctgggccagaaggcagttgcagaggagttcctaatccagttttctctcctcagccacagggctcagtgtccgtcccaccctcatgcacagtgtgggagcaccctgcaaccagcacccctccccagctgtggggagcactctgccgcacctggtatctaggatctttggggtgcacagctacggccacgtctcccagcattgtttcaatccgagttgttgccaccaccacctcctcgtcaccgtctggagtgacacgcagccttgtggtctcagctccggccccttctcaccccctaccccgccccacccaggacccctggcacccctagcctcctacctgagccttggatcttataggcaaaggagacaaggaccccaaactccaccttctccttatagccaggcacggagagcagagtgcgaccggtcagctccttcttatccacctgtgaggtgtggattaaaagaggtggcctaggggctggggctggggctggcgacggagagggcctggggtgggggtgggggtgggggtgggggcacacctcgatgtcggagatggcagaattgagggtgcaggaccaattgacaaggcgggtactgcggtagatgactccctcctcatggagccggacaaaggcctctgtcacagctgctgagagtttctggggagcagggagagtcagagggaggcctagatgtccagggatccaggcagacttgccaaggcagcaggatctggtgagacctgggctgcctggagtcccaccacccatcacacagacccctctgagggccggagggagtaagtacttttcctgaagaggagagagagctgtgagagtgcaaaggtgcccaacaaagcctaaggcctctggggatggcagggaagccacctggccaggacaggggctgatgaggagaatcttgggagtttgggctccacaggagagtaaggcccatcatgggccaccaggaagagtctgagctccaggtaggtaacaaagggccgcgacaaagggcgagaagtgctatttgcagctgagccctccatggttccccacgggtgctgagctcccctcctaggggagggccacagcacaggtactctcatccgtgggtcagtggctctggggagcttgccccaggcccgagacccctcctactcacagggtccatggtgaaacaggctcgattccagtccaaggagctcccaagcttcttcagctggtgataaatccggtcccctttcctggaagtggacagacaagcccagatcagcactcaggcttgggctggagggagacatgagggctgacggggcagtatgggggtcactcatccctctgaccctctctctgtgaggatctggccctgcagcccaggccagaagccacagagggtcccctctgggcaggggaccgggcgctgcacactcactcctctttccatttccagacctcccggaggaaggcctctcggcccagctggtgccggctcaggccctgctcacgccacagtttcttctccaccaccacctgggtggcaatgcctgcgtggtcacagccagggttccacagggtggtctccccgcgcatgcgatgcctgttggaagagccaagaggattggaggtgactgggccattggccctgacaacaaaggaagaaggggctcctgtgcacagagtcaatggactcaggaaataaagaggaggtggggagagatcctcccagctctgaaattatagtcagggagagaagcacaaggacagccaaggaaatttgaccaaagaacagagaagaagctctcatccaaacaataagttacgacataagaacagagttacagattaagaaaacaaaaacagtgtctggaaacatatctgagcaaattcatatttgttgtaagtagcatttcctatcagtagggaaaggacaacctactgaataaatctgtctgggacaattagctaattagttccctactttccaatattcatgaagaaaaattctagtccaatccatgaactcaacactactagaaatacattagaaaaaaaaagtgacatacttttcaaaacttgaaagaaaaaaaaaaagaaggaagaaaaaaaagaccacagatgaaaaggtttgtaactctgaggtagaagaggccttctttaagaagacacagagataaagaacactggcaaaccagagcacctgggaggctcagccgatcaagcagctgactcttgatttcagctcaggtcaggatctcagggttgggagatggagccctgggtcagggagtctgctcgaggattcattctctccctctccccctctgcccctcccccgacccacacacacacttaagctctctctccaaaataaataaaatggatttaaaaaaataatacgggatccctgggtggcgcagcggtttggcgcctgcctttggcccagggcgcgatcctggagacccgggatcgagtcccacgtcgggctcccggtgcatggagcctgcttctccctctgcctgtgtctctgcctctctctctctctctctgtgactatcataaataaaaaaaaattaaaaaaataataataatactggcaaaccagctagatcaaaatataaaacaacaaaacccccaagtaaaaagcaagtgctagaccatctggggagaaatgactggaagctagtaatgttttagggaactaatcagaaaatgaattagagaaatgaagacggtagtattgcaaggcttcgtctgctacacattggttcaagtatgtgcagttgacgcttaagctctttgctgatgaggcacatgaagcattaaatcccaatgacctttactgtgaacttttagaagaactgggcattaaagaagtggagaggaaattatagaaacactgtatccagggatccctgggtggcgcagcggtttggcgcctgcctttggcccagggtgcgatcctggagacccgggatcgaatcccacgtcgggctcccgatgcatggagcctgcttctccctctgcctgtgtctctgcctctctctctctctctctgtgactatcataaataaataaaaattaaaaaaaaaaaactgtatccatacatcactttcaaaaactcatcaaactatatcatattcattactttatgggtctgtttatccttgctacatttaaatctccctggggacagggactagagcgactccattctcctgcagataacagatcctcaggagtgttgcttataagttgtactggacataaacatcttttacgaatcctagtatttgctcggtattattaaagaaataagacacaaggaacgaaagtaaagtttcactaaaagcatttcttaaggtttatataaagttggctacaaaaaaaaaaatcaataaaaggtcataggtgtgcctgggtggctcagtcagttaagtggctgcctttggctcaggtcatgatcccagggtcctagatcgagcctggggctccctgctcagtggggagcctgcttctccctttccctctggccctgcacctgcttgttctccctctctctcaaataaatgtataaatctttaaaaaattactttttttttttttaagatttttatttatttatttctgagaatacacagagaggagagagagaagcagagacacaggcagaggaagaagcaggcaccatgcaaggagcctgacatgggactcgatcctgggtctccaggatcaggccctgggccaaaggcagtgctaaactgcttgagccacctgggctgccctaaaaaattacttttttaaagaaaattgtcatctggaatattagtttatatacttgttaacactgctaacacgtcagggggaggaacaagtgctagaataggaagaaacatttataatatacataacaaaccaaaacatcaatatccagaatattaaaggatcttccacaagccaattaaagaaaaaaaacagaatcaatagaaaaacaaagataggtacagacgattcatacacaaagaaacctgactggccaagaaacatgaaaaggtaatcacaaataacagaggcatcattttttttgcccttcagtttggcaaacaaacactgataatatccagggttggaaaggacatggggaaatgaatatcctcacccgcaattcacggaggtataaattactgaagctatttggagacaacttaatataagcatgcccctccaacctagcagtttcagttcctggtagtacaccagagaaatcttccacttgcacttgagagagcacatacaggaatgtgcattctagccagatcttcaagagaaaacaattaggaatgaccattaataggaaagtgactcctttaaggtatagccacactattgaacgctaaggagcaatgaaacagaatgaaaaaataaataaaaaataaaataagtaaaaaataaataaaaaaaggaagagaatgaagtcagtctatgcataagaacaaggaagcatctccaaaataaactactaagtgcaaaaaaaagtcatggagtaacgtgtttgatgttaagtcgtttatgttaaaggacagaaaaaagaaaagcccatccaaaatgaaaattataaactactgtggatacacaaattttaagtaaacagacaaaaaagacctggaatgacacacataaaagtggtagtaatggctaaattttgcaagggagtaggtctacaggggcatagtcaaagagacctgaagctttgcatttcttacaaaagtatatttacgtttgtttaattcaaaataatgttatttttcataacaagagaaaggagacaagagcgtctactagtgaggggtgctggttgcttgactaggggaggatatggatgatggatctgggaaggacgtgaggagaggaggagcaccaccagggggcagagctgaggtcccataaagaaaaaaagtgccggagggctggtcaggggacagaagggaggagaggagtgaagaggcaaaggagacagagggaatgggtggaagagggcaggagctcaccatcgggtcagggagtcctggatggcattggtgagtgcgtggcccaggtgcagggagcctgtcacattggggggtgggatgcacatcatgaagactccccggggatttgccgctgacacgctggaacgctgatggggtaggatgggcacgtgctaaggcctcacatcacctcctggccccctcccaggcagtgtgtccttcggccctgttgttgtcctcccatatctcccctgggcctgggcagcagagcactcactccatactcgggctggaagaagccctgctgctcccaccatgggtaccaggcagcttccacatactgagggctgtaggagtcgggcatggtgccactgacatctgggggagagacggggagggggcagtgtctgagactgggagcagccggggggctgtgcaaatcctccaaagccaagtggaagcaagggcagtgcaggaagggacaatgccaaagacagcagcagctaaggaggggggtcccttcccgcctctcatacctttcttttccccagctggggttgggaggtcatatgtaatgaccccaggatcccgttttcccctcttctctggttttggtttcttctgcttgggagggaaaagatagaggcagggaggtcatccacccactggggcaccaaccttctagttttccccgtagcttctcacctccgccggcggtggctgctgctgttgtgtcttctgcttctgctggaatttctctagcttctcccgtttctttgcctcctttttgagttgagaggccgtctttgggggtgcagggacctcggggcctggacagaggcacagaaacgccagcttagcccattggggatcctctgtgaaccatactactgtttcattcgggccattccagcggcccaagggctccccatgctggcctcccccccaccccccaccctcagggtccttccctagcgattctgtcaggaacatgagccccacagaaggtccagaggaatgcctccccttctcctccctaaccctcctcacctggctgttgagagaggagtctggcccctgagtacagaaccacctctcccagcactgcccggaattctggctgctggacacatgtggtaaaccagcgagtcacattaccccagatccggcgggcagaagggtccaggacctgcgacggtgaaaagaaataaaatatccttaatcaccttagagtgaggtctgatgggagctgcacgtccccattcttctccaggcccctgtgactcacgtaacggaaaggcaggagcaaggccgtgacagctgccaggtcagccagtgtgggggcctccccagccaggtaggtgtgcagccgaagccactcttccaaggggctcagggccctgcccagggcccccagggcagcctatggggaaagggaaggggtaagggactaggcttggcccacctcatttccccatcccgtaacccactcaatccacgagtccttccgctcccaaaaatcaccacctctgaggccaaatggtcataataaaaatatttccatttgttcaacagattcctgctgcacacttactatgtgtcacatgaatatgttaagcaccagaagttaaagactgcatgaggcaacacagttattgcctccagaggtgtttattaagcacctactacaggccaggcacttctctaaggaatgtggagacaagcagaccctgactcgtgttcacactccagtgtttacacttcagcgggggagacgataaatgcgcaaatatagagtacatcaccctatttttctctgtaagtgctgtgaagaaaaacaaatcaggctgagggagatgaggcattccagagaggggccctctatggtaggcggtgtaagtaggacatgagggagcaagccagggtgtaaaccagggattcattgctttcattcattcattcattcattcattcattcattcattcattcaaagaatactaacgatccaccatgtgctcaaaactgtgcaaggaggtgatggttctggaagtgcctcaacctgcactcaaccgcctcaacctgctagcgcactctctgctctccctgccttctcctccatccccagcaccccgccactcctccctccctcaacccactaggcagtaacctccacctccgctgccttccactcctcgattctcctcccagactctagaaccccgagcaccagtcggcgctccgcacagctcttctcatctcagcgtgttcctcaacaggaaaacttccactttccaagacgaagaccaaggctatttaagagacctgccgaggttatcactgcagatgaccaccggggatttgctcagagtctctccacgcctggcccgcgcccttccggggctccttaccccttctcatcttcttcttctgcatttcccctcctccgtcccgctcacctgggggtcctgggcagcgctccggagtcccaaggcgggcagcgttgctccgcaggcggccggtatcagctccgtgtcggcgtagctgacccactgttggaccagcacggcggcccggctccccccggggccccccaggcccgccggccacagcaactgggccacggcggtggccccccacacccagagcccgccgggcccccgctccagggcgggcagacgcggtggggggcagggggtcctgctggtcgggggcggctggaggcagatgcgcgggtgggctcctccccagcccgggccctccccggcctccccgtagcgcgcggctatgagggcccggaggctggggaaggcgtcgggatgaggggagacgtacaggacggacatgggtacgccggggtccgaacgacgtggagggagacctaggggcagagagacgggggcggctgagcgacccgagcagaggggaccccgcggggtcccccagggccggaggtcccacccggcctcgggagcccagggcctggctccacaacggcgcgcgcccggggctgcccctcgggatccgcgggtacgtactggagaaaggcggtcacgccgagccggacagccacctgcggccggggccgaggtgggcggctctcggggcgcccccggctccctgcgaccgccgccggccgtgcgcgcccacgtgtccccctttgtgacaacgagcgtttccgggcccgcgggtcgtggcgcgggcggccgtgctccgcctgcgcgggggcgatgcccgccgacagccctcgcggccgcgccgcccgccgaatcnnnnnnnnnnnnnnnnnnnnnnnnnnnnnnnnnnnnnnnnnnnnnnnnnnnnnnnnnnnnnnnnnnnnnnnnnnnnnnnnnnnnnnnnnnnnnnnnnnnnnnnnnnnnnnnnnnnnnnnnnnnnnnnnnnnnnnnnnnnnnnnnnnnnnnnnnnnnnnnnnnnnnnnnnnnnnnnnnnnnnnnnnnnnnnnnnnnnnnnnnnnnnnnnnnnnnnnnnnnnnnnnnnnnnnnnnnnnnnnnnnnnnnnnnnnnnnnnnnnnnnnngggagggagcgagggcggcgcccagcgggcagcctgggaagcggcgggcggggccctggggcgcgcagcctcctcccgaggcctctccccccccggaagcaggcgtcccgcctgtcggccgtcagctcctttggtgctgagaactcgtctctagaggagactcctgtttgccaagtgagccggttagttcccagtcctaactccgcaataaaaatataccacttgggtacgcctgggtggctcagcggttgagcagctgcctttggcttgggtcgtgatcctggagtcccgggatcgagtcccacatccggctccctgcatggagcctttctctcgctctctgatgaataaataaatctttaaaaaaatatttaccacttgcattgatctgttatattcaaaaagagtgtagtgatctggctgggttcaggaaccaatccagcagcagcaaatgcactttggtgtctcataagattaactgtcaggtgaacgggacagagatggaaaggcagcaagttctccttgtgggtccagtgcaggaagaccacagtaggcaggccacacgggtgggggaatgttcaagaaacctggtgtagcccaggtgaggtattatgatgtacaccatggagaagaatgacagataatgctgggaagttgggcgggattcttaactgcggtaataaaggagcagagtttagatgaattcaccctccgggccccttcccaaaacacacagaaccagaactcaaatgtgcatcataagtttattcccgatgcgggacagattccttccatcccccaaatgaatcacatgctgccctggagagatctaggagattctcctgccatatccagggaaggagtgagaaaggcaggtgctgaggacaaggcaggctttgcagttccctagcctattatcgtcccctcctcaacagaggagagctactccccactattaatattctcatccactcatcccttaaagaaaaagcctccactctttaaaaacaaacaaaaaaaagaccaaaaaaatccccctcaaatatgggagggaggaatcccaggctgtgacttgaggtgaaaggtcactaacagaagagggaaagggaagggagaaggaaccatcactgtttctgctgcaaggcctccttcctcgctgcatcctgcagcaactgtgtgtccacctcatctgccggcaactgcacgtagcggaccactgagccacggatgaagcagttcttcactgacaactagaacaagagagataaatagaaaacatccttaaggatgtctgctatctggcatctgggcaggtcagtcggttgggcatctgactctagatttctgccaggtcgggatctcagggttgggagagttggatgctgcactctgcagcaccaagtctacctgtctccctccctctgcttctggcccagctcatgagctctctctcaaataaataaaagcaaaatcttaaaaaacaaatagctatccacccaggcatgtccttttgtttcctcttcacttttgccaactcaccatgtgaggatatttctcggggtctgtgacactgatgtcggttagtttgatgttgagatactaagaaaagaacaccatcattagctctaaagactagatgcaggtacccagccctgaaattcccctcttcttccccgagaccccattctgggctcctacgtatctcacctgatccacagaatggagggttccacagatgctgtcgggggagagggaggaaaagaccacatcagtttacaccaaaatcaaatggagagatgacttcagagcatgggtaagaacatagttggggaaagtcaaggacttgaggaagccagaaaaggagaaccaaaagggggcattcctaagcccaggagcaaggaagatgaagtttttattgcagcgtgttattttagacctcacatctcctctcctaaaaccattgcactcttaccagtgagcatgaaacaactgcacagactaggcccgtggtccacctagtgtttgccacctttacagctacttcacaaggcagctattactaacaaggggcgcagagatcacgtaacatgcctgagtttagaggacttgcgtccacatctgtctgatcccctaaaccatcagctattttcaaacatttgttgcttcgggaccccatatgtcaactagacaaagtagctgcacactgttcttgatgcaggcacagggatgtatgtcctcccccttcctccgtcccagggccctctgaactgtgaataagcaatgttctcagaagggctccaagtcatgttacctctctcccagcttctctcatttctgtcaatggcttcaacgctatctcacaacctcaaatcctccatgacccaagtccccatcatttggtgacattttcctaacatctctataattctaattttttttaaagattttatttatttattcatgagagacagagagagagagaggcagagacacaggcagagggagaagcaggctccatgcagggagcccgatgccgggagcatcatgtagaactcaatcccaggaccccaggatcaagccctgagcagaaggcagacactcaactacagagccaaccaggcaccctctagtttgatttctacaagccaagatctaattacacctcaatccaaggcagcctccatcctggctgtcccaccctaaccaccctgcaggtcatcagcagattctacattccttagaatggcaattctcaggcagcagcccaggtggctcagcggtttagcgccaccttgggcccagggcctgaccctggagacacgggatcgggatcgggattgagtctcacgttgggctccctgaatggagcctgcttctccctctgcctgtgtctctgaccctctctctctgtctctcatgaacaaataaataaaatattaaaaaaagaaaaagaatggtggttctcaaacagaggtatgctccaaggttttataagtctatgaccaaaaaaaaagaaccacaggttagtatagtgtgttgagtgcatatatattaagctaaaggttgtccatattttcttccctaagaataactctttaattgcccttgcaattttggggggggtattaattttttttttaatttaaaaaaataaaataaaaataaataaaataaataaataaataaaaatttttaaatgaaatgattgcaatgttctgggctgtgtgggtggcacagttggttaagcgtcagactcttggttttggacactttcaggtcatgatctcagggttgtgagatggagccctgtgtcaggttctgtgctcagcatgaaatctgcttaaggctcactctccctagggtgcctgggtggctcagttggtcaagtgtcctactcttgatttccgctcaggtcatgatctcaaggttgagatcaagttctacatggggattgcacagggtgtggagccttctctccctcctcctcctcctgtcccatttctaaacaaaacctctcctgtgcactctcttgctctctttaaaaaaaaaaaaaaaaaagccaggacacttgggtggctcagcagttgagcgtctgcctttggcccagggcatgatcctggaatactgggatcgagtccttgcatggagcctgcttctcatccctctgcctgtgtctctgcctctctctgcctctcttgtggatgaaaagaaagaaaagaaaagaagaaggaggggaggagaggggaggggagggggaaaagaaaagaagaaaagaaaagaaaagaaaagagtccttgtcttgccaaaaataaaactggcagttctgctggaccccaatttctgttaaattccaagtatttaaagtccactgagagggtacctgggtggctcagtggttgagcatctgcttttggctcaggtcgtgatgctggggtcctgggattgagtcccacatggggctttctggagggagcctgcttctccctctgcctgagtctctgcctcactgtgtctcatgaatgaataaataaaatatttaaaaacaaataaaaataaaatacaatccactgagagacatactgcctcagtgggtggtttccccacatccctagctgttgaaaagactttgacaacaccctgctaccatctgcaggagtgaagttctggaactgcataggtggggtcttttcattcagtcccttaacaagatctgccacaacaatggtctgacaacaagcaagagaaagagctcttctcccatcccaacagactaccttcaaaccttgtaagttcctgttttaggacatgaggctataatataagttattcttgccatgtagaaaacccatgaaggagggatgccagggcggttcagcggttgaacctctgccttcagcttaggacatgatcctggtctggagatcgagtcccgcatcaggctccctgcgaggagcttgcttctccctctgcctctctctgtgtgtctcccatgaacaaataaatacaatatttttttaaaaaaagaaaagaaaacccaggaaaaagaaaagaggaaaaccaaaaaaaattatctcacagaattgcctaggtgattttggcttccatacttgtctctccctatatgaccccaattgatatgccatcaacaccatatcaatgttcccacactaaaaaattaactcacaaagaaatgcggaagacattgttgagaggggaggatacactgattcaaagtttctaaaggagggatgtctggctggctcagtcaggtaaagcatatgactcttgacctcagggtgtgggttcgagccccacactggatgtagagattacttaaaaataaaatcttgggatccctgggtggcgcagcggtttggcgcctgcctttggcccagggcgcgatcctggagacccgggatcaaatcccacgtcgggcctccggtgcatggagcctgcttctccctctgcctgtgtctctgcctctctctctctctctgtgtgactatcataaataaataaaaatgtaaaaaaaataaataaataaaaaataaaaataaataaaaataaaataaaataaaaataaaatcttagggatccctgggtggcgcagcggtttggcacctgcctttggcccagggcgcgatcctggagacccaggattgaatcccacgtcgggcttccggtacatggagcctgcttctccctctgcctgtgtctctgcctctctctctctctctctgtgactatcataaataaaaaaaaataataataaaataaaataaaataaaataaataaaataaaataaaataaaataaaataaaataaaataaaataaaataaaataaaatcttaaaagtgatacctgggtggctcagtggtttagcatctaagccttcggctcagggcatgatcctagggtcctgggatcaagtctcaccatcggctccccacaaggagcctgcttctccctctgcctgtgtctttgcctctttctcaaataaataaataaacaaaatcttaaaaaaagaaaacttaaaaaaaaaagttagatattaaggaagacactatgataagcaccaggagttgtatgaaagtgatgaatcaataaagtctatacctgaaactaatattactctgtatgttaactgcaatttacattaaaaaattgaaaaaaattaaaagttttaaaaggacagtcaaataataactaatactttattttttaattttcttgaagatttatttattcatgagagacagagagagaaagagagagagagagagaagcaggctccacgcagggagcacgacacaggattgggggactccaggaccatgctctgggcctgaaggcaggcgctaaaccgctgagccacccagggatcctctaacaatactttaaatgtatactccatttaaaggatttttttaaggatttttttttctaaagaaagaaatgtgtacaaagatgcatacacaaggatgtccagggcagcatcatttgtaaaaggaactggaaatagcctaaatatccaacagcaaagtcttgattagattagttccagccagctaatagaaatgtcatacagacattaagaatgttaaaggtaaaaaaaaaaaaaaaagaatgttaaaggtcagctttattgacatggaaaatattcaaaacatactgccaaatgaaaagcaagtttcacagttgcataaagaatatgaccctatctttattttttccaagttattaaatttccagttaacatgcagtgtaatgttagtttcaggtgtagaattcggtgattcatcacttacatagagcacccagtgctcatcacagcaagtgccctccttaacacccatcacccatttaattcatgctcctgcccacctccccttaagcaatcccatttgttctctacagttaaagagtctgtcttctggtttgcctctttctctccgccctatgttcatgttttgtttcttaaattcgacatatgaacaaaattagatggtatttgtctctctctaactgaccatttttcatttaaaagagagagagtgtatgaatgtgcgcacaccagacagaactggacttcaattctggccatctcattcactagttgtgtagacttgagctttttttttttttttttttaagattttatttatttattcatgagaatacacagagaagagagaggcagagacacaggcagagggggaagcaggctccatgcagagcctgatgtgggactcaatcccgggtctccaggatcacgccctgggctgtaggcagcgctaaaccgctgagccaccagggctgccctgtagacttgaacttgatcaagtttctttacccatccgtgcttcaggttcctcatatgtaagatagcaacaatcgtatatatcctatgttatgaaaataaaatgagttaataaatgtattcagaatagtgctttgttcaaatgagttaataagtgtaaagtattcagaatattgcttcgttgataggatgttctcaaatgttgccaatgtttctttctttcttttttttagattttatttatttattcatgagacacagagagaggcagagacataggcagagggagaagcaggctccctgtggggagcccgatatggaaatcaatcctgggactccaggagctgaaagcagatgctcaactgctgagccacccaggtgtggctctttttctttctttcagcacacatttattaagcacctactatatgccaggcctatgctagacattaggtacacaaaggtgagcttaaacatgtagggaagccctgtagggaggacaggctgtaagcaataaacataattctatgaaatcacaatttgagggcagcccgggtggctcagcggtttgctgctgcctttggcccaggttgtgatcctggagacccaggattgagtcccacatcggattcactgcatggggcctgcttctccctctgcctgtgtctctgcctctcgctttctcttgcttgatgcctctcatgaataaacaaataaaatcttaaaaaaaaaaaatcacaatttgagaagcactcactaggaagaaaattcatgacagacactacttggctaaatggaccaggaaaaaagtctctccaagaatacagcatttgctccaagtcctagatgataattaggagctaatgatacaagtgggtagaggatgtaaaaacaatagacataagggactgcattggtctttggtttatcctttacattttctttaaaatggagattgtgccacatttactattctggaatagccatgccaatacaccttactcctatgcgacagctgtgtattatggaagtgccacaacttaattaatttcattaacccaattgctatagatggctatttatttccaatttttggatactgcaaataaaactgcaaacacctctgtaatacagctttacttgtggaactgatacatacactttctttctttcttttttcctttttttttttttaaagatttcatttatttattcatgagaacacacagagaggattaagagagagaggcagagacacaggcagagggagaagcaggctccatgcagggagcccgacgtgggactcgatcccaagtctccaggatcacgacctgggctgaaggcggtgctaaaccgctgcgtcacccgggctgccctctttcttttttcctaaaaaggattttacttattcatgagagacagagagaagcacaggcagactgagaagcaagctccctgtggggaacctgatgcgggactcgatcccaggatcctgggatcacgccctgagcggaagacggatgctcaacgactgagccatccagatgccgggttcgtacatttctataagcggggtcaaaggagtaaatagcttaatcagaaaaaacaaaacaggggatccctgggtggcgcagcggtttggcgcctgcctttggcccagggcgcgatcctggagacccgggatcgaatcccacgtcgggctccaggtgcatggagcctgcttctccctctgcctatgtctctgcctctctctctccctctatatgactatcataaataagtttaaaaaatattaaaaaaaaaaactatgttccttttgtaaaaacagaacaaaacaaaacgttattgatgcctctgccctctgacggctctctgctactttaagcttaaggcacaggtcatttatttcttctctatctcttccacttgggccagccctcaaatactactcgtcgaagaggttccagagaccggcatatacccaagtcctaccgacttggtggaaaaggtacctacctcaggtcattcttgagttccacgaccacatccttgcccaccagggacttgaaaaaggaatagaagagctattgggcgagaggggggaaaccatgatacgggcagatacacagcgaggaggaatgtcccaccctctgtgggaacccgccgcctccggcagttctcaaacttcccagtaaagtgcggacagggacgacacttcattgagtccccgacttaaggctcccgagagacgctgtgccctgcagccctgggcgctctgggtgcacctctcaatggccctgcagtcctggggtcctgcccacccgccgcactgggcagagctgttcaaggagcccattcgcaccctcccggagcccggccccgccccgggaacactcccagagctctagctttccctcccctgcggtccctcactctcccgcgcgttcatggtttcgttcccgcttaagaaaagaaaaaatcccacttgctcccacgtgtctccccgcccctccgaatgtgaagcgctggaactaagaagggagggaaagccccggcgcccccggaggattcagcctagctccctcccgcccgcctcccaccggccggccggaccgcgcgcccctgggcgcccccttgtgacgtcacgacacctaccatggcgctccagacgcgggacgccgacgggaccggggaggcgagggccgggacccgcgggcctggggccggcggcaaccaggaggcgacccacgtggggagccggacggggccgcgcaggcgcagcaagaagggccgggagctccgagcagcgacagaagcgcgcggctggctcgcagctccaggagagacggcaggggagagccgggaagggggcgggccttcctgccctcccgcttcctcccgagtggcgggctcccagcgcgcaggcgcgagtccgagcggccgcgggggccgtgagggggcgcgtcggtgctcgggggattctttctgacggggccgtcgagggtgttcaccccctgcggactcgctattgaaaactgtggaggaggggctccctggggggctcagcaggtcggcgcctgcctttggcccagggcgtggtcctggagacccgggatcgagtcccgcgtcgggctcccggcaagaagcctgcttcactccctgcctgtgtctctgcctctctctaggtctatcatgaataaataaataaataaataaatccttaaaaaacaaagaaaactgtcgaggaatttgcgaaaactcctgatttgtacatttttctatatccgttacacttggataaaaagtttaaaaaataaaatgttgcagaaccctgagatcaggagcctgaacactaatcttgattttgtcagaggttcccgataaatctgtttctcccaaggatgcactctcagtccatatttcttacaccctcatacctaggctaccctggaaaggactgaataaaaccaaacagaagcttgcttgggtagaaattcctattctaacatttcacttccaaatatgccccctcaaacacagggacacaagtgcagagttacacaggcttctatattcacacccctaagagttttataaatatgtgatattatgacacaataggtgaaaaagattttttttcaagaatatgactactaaatcctccctttctcatcttgcagaaaagtacccattccttagcagtttgtcgtaaaactgtttttggcacgtcaaggatgtaataacagactctctgagcgcacagatagatgttggatctcctaggccccacctataagtggcataaggacatcaggcagaagtttgttcccccagctgagccctaagcccctaaaccagtctatcaccgagtgtaagcagaaactatagttagcaattgctgtggccagagctaaaggtgcctgatgatcaaaaattactttcctgcttgaaacaattagctcatgaaaatttgaatactttccccttaccagtttaatgaatcatctacaatcatcacaatcagaccacaaacgcactgtctccatgagctagctcttctttgccttacatttcaaggtaaactcagtctaaacatccttacactcaaagtctaaagataccagaagaggggtgcctggatggctcagtcgaaagaacactcaactcttcaactctgagtcacgagttcaagccccacattgggtctagagatgacttctatgaataaacttaaacaaataaaaagagtggctcttggtgggttcagtcaattgggtggctgacccttggtttctgctcaggtcatgatctcagggtggtgggatgaagccctgcctcaggatctgagtctagtgtgctccagctagggtttctctctccctctgcccctcccttcagcgtgctcattcatactagtgcatgtacatatgttctcgtaagtctttaaaaacaaataaataaaaagtctttaaaaacaaataaataaaaaaaaacagaaagaaactttaaaaataataaacctaaataataataataataataataataataaaacctggggcacctgggtggcttagtggttgaacgtctgcctttggctcaagtggtggtgatcccagggtcctaggattgagtcccacatcaggctccctgcagggagcctgcttctttttccctgactatgtctctgcctcactgtctctcatgtataaataaaatctgaataataataattaataaatcaagataccagaagaaatttgttttaggaacaaatttactgagtgacaaataaccatccacataagaagaagaaagatggggaagttggaaataaataacagacattcaaattcatcaaatggttcaaagggcggcctagttttcttaagagtcagaaacagggattgtgaaaagatggtatacaagactcttttgtcagcatccgaaaaggatggttaacttaggttcaaaaccagtcaattcaagaatcataacaatatttgaagatgaggggaacaaaattcaacttagaggcaccctagaaccctccatcttcagataagattaatctacttcttcaatggtggggcctgtggcagcccttccaggagtataccccgtcccgcaggaaggcccagtgcatcctccctggtagagctttgtgatgactgggttacacacctgctccaattcctttctcttatgatcaaactcctctttctcagccagttgattggcctccagccacgagaggacctcattacatttatccagtattttctttttatcagagtcgttaatcttgccctttaagccttcatcactcacagcactcttcatgttaaaagcgtaagattccaaagcattttttgcagagattttctctctctgaacctcatcctcagctttatacttctcagcatccagaaccatgcgctcaatctcctccttgctcaggcggcccttgtcattggtgatggtgatcttgttggccttgcccgtggacttgtccatggctgttacattgagaataccattggcatcaatgtcaaaggtcacctcaatctggggcactcccctgggtgcaggagggattccagtcaggtcgaaacgccccagcaggttgttgtctcgggtcatagccctctcgccctcgtacacctgaatcaataccccaggctggttatctgaataggtggtgaaaatctgtgtctgctttgtggggatggtggagttgcgcttgatcaggacagtcatgacacccccagctgtctctaaccctagggacaagggagccacatccaacaaaagcagatcttgtaccttttcagacttatctcccatcaggatggctgcctgcacagccgccccataggccaccgcctcatcgggattgatgctcttgttgagatcacgaccattaaagtagtcctgcagcagcctctgaaccttagggatacgagtggaaccccctactaacacaatgtcatggatcttaaccttatccatcttggcatcccgaagagccttctccacaggttccagagtgcctctaaacaggtctgcacacaactcttcaaaccgggctctggtaatggacgtgtagaagtcgatgccttcataaagtgaatcaatttccaagttggcctgagtgctggacgacaaggtcctcttggccctctcacaggcggtgcgcagccgcctcaccgctcgcttgttctggctaatgtccttcttgtgtttcctcttgaactcctccacaaagtggctcacaagcctgttgtcaaagtcctcaccacccaggtgtgtatctccggctgtggcctttacttcaaaaattccatcatctatggtcagaatggacacatcaaatgtgcctccacctagatcaaagatcaagacatgtctctctccctgaccagttttatctaagccatatgcaatggcagcagctgtgggttcattgataattcttagcacattgagacctgcaatcacacctgcatccttggtggcctggcgttgagaatcattgaaataagctggtacagtgatcacagcattggtaacggggtggcccaaaaaagcttcagcggtctccttcatctttgtcagtaccatagaagagatttcctcaggatagaaagcttttttctcccctttgtaggataccattaccttgggcttgcctccttcattaattacttgaaaaggccaaagtttcatgtctgattgtactacaggatcattaaacttcctgccaatcagacgtttggcatcaaagacagtgttctggggattcatggctacctggttcttggccgcatccccgatgagccgttcagtgtcagtgaaggccacatagctgggggtggtgcggttgccctggtcattggcaatgatctccaccttgccgtgctggaacacccctacgcaggagtaggtggtgcccaggtcgatgccgattgccattcccttagcaacagccatggtcttccgaggcctgagaaaaaaagtgagatacagttttggcagagtgctttttaaattactttcaattgtggtaaaatacacataatttgaaatttaccatcttaaccattttttaagcacagttttcagcagtaaggtaattcacattgttgaccaacctccagaaatctttctaacttgcaaaaccaaaattcaatactcattaaacaactctccattccccttccccccaatccctggcaaccactattgtacttcctctttatgaatttgactactgtaagtcttcaaattaatagaattatataataaataccttctgtgcctggcttatttcacttagaaagatatcctcaggagcacctgagtggctctgtggttgagtgtctgcctttggctcagcttgtgatcctggggtcctgggatcgagtcccaaatcgggctccctgtgaggagcctccttctccctctgcctatgtctctgcctatctgtgtgtctctcatgaataaagaaataaaaatttcttaaaaataaaaagataccctcaaagttcatctgtgttacagcatgtatcagtgtttatttcttaagaattatatgtatataaaaaaagaattatatgtatattatatgtatataatacatatgccctccttgggaatgaatactactcaggctgcttctaccctatggctactgtgaataatgctgccataaaatcggagtacaggtattttcctggtgtacaagtatctttttccagttccttctttcacacagtgctttttggactaaagtattcctagcaagctggaagtaagtgggaggcaattggcatacattgtgttcaatttccacagcactaattcaagtgtcccatttcttttctgtgacattttattctgagactgtacctgtctcctgcagaactaagattatattatgttctggtctcttcaagagaaactgatctccaccctttggtttcgctgccttccacagctccttcaccctctatttgttgggagtaatattgggccagtctgaaacggctgctaggaacccgatcaaacccttcacaaattttctcaaatgagattgagcacgacaggcaatctctttccccagtctcctctggataaaacgcccatctgaagacacaaacatttcagctcctccacctctttccagcagctctgacaagttccacgcactttggcacttaccaaaggactcccctaccctgattggtcaatatccccgtattagacggaaactacagaaccctccagcactttctcaaatggatctattaatcttgcctattgccattccatttcaaggagagccctccaggctcacctattgtcccgccgccttcgatccagtttgataagatcctgattgcggagcccctctcggtgggggctccgtcaacatccaaactgcgcagccggtgttcccccaccccccacccgccccgccctacaactttgagcggactcggtcctgtcctaccagcctgattcctcgctagcccatgatgtcagaggcagcgccctcattgtaacgcgtctggggtagcggcgtcatcactaccgcccccaccccgcctccagccctgccagcccctccagcccctcccacctccccaagccttgccagctccagcgagccccagaagagtctggagagttctgggagggcggcgtcctggacgcccattggccccagggagcccggaggcgggacgccagccgaaaccgctggaatcttcccgaccggccgccccgcagagccccgtgattggctggggaccgaagaggcggggctgggcagcgctataagcgcggagccgccccgccggggccacacagcgaagctgcgcaggcaccgcggcgtctcggcggcgtccgccccagcacctttcctttcgcagacccgctgcgtccgcagctgccgaagagaagagaccgagctcctcctcgtcgcggagcccgaccgcctttcggaaacctgaacgtgagcctgagcgcgggcagggaagcgggacgccggcatggctaagagcgcggccatcggcatcgacctgggcaccacctactcctgcgtgggggtgttccagcacggcaaggtggagatcattgccaatgaccagggcaaccgcaccacccccagctacgtggccttcaccgacaccgagcggctcatcggggatgcggccaagaaccaggtggcgctgaacccgcagaacaccgtgttcgacgcgaagcggctcatcggccgcaagtttggcgacccggtggtgcagtcggacatgaagcactggcctttccaggtggtcaacgacggggacaagcccaaggtgcaggtgagctacaagggggagaccaaggcgttctaccccgaggagatctcgtccatggtgctgaccaagatgaaggagatcgccgaggcctacctgggctacccggtgaccaacgcggtgatcaccgtgccggcctacttcaacgactcgcagcgccaggccaccaaggacgcgggggtgatcgcggggctcaacgtgctgaggatcatcaacgagcccactgccgccgccatcgcctacggcctggacaggaccggcaagggggagcgcaacgtgctcatctttgacctgggcgggggcaccttcgacgtgtccatcctgacgatcgacgacggcatcttcgaggtgaaggccacggccggggacacgcacctgggcggggaggacttcgacaacaggctggtgaaccacttcgtggaggagttcaagcggaagcacaagaaggacatcagccagaacaagcgagccgtgaggcggctgcgcaccgcctgcgagagagccaagaggaccttgtcgtccagcacccaggccagcctggagatcgactccctgttcgagggcatcgacttctacacgtccatcaccagggcgcggttcgaggagctgtgctccgacctgttccggagcaccctggagcccgtggagaaggccctgcgcgacgccaagctggacaaggcccagatccacgacctggtgctggtggggggctccacccgtatccccaaggtgcagaagctgctgcaggacttctttaacggccgcgatctcaacaagagcatcaatcccgacgaggcggtggcctatggggcggccgtgcaggcagccatcctgatgggagacaagtccgagaacgtgcaggacctgctgctgctggacgtggcgcccctgtcgctggggctggagacggccgggggcgtgatgaccgccctgatcaagcgcaactccaccatccccaccaagcagacgcagatcttcaccacctactcggacaaccagcctggagtgctgatccaggtgtacgagggtgagagggccatgacgcgcgacaacaacctactggggcgcttcgagctaagcggcatccccccggcgccgcggggcgtgccccagatcgaggtgaccttcgacatcgacgccaacggcatcctgaacgtcacggccacggacaagagcacgggcaaggccaacaagatcaccatcaccaacgacaagggccgcctgagcaaggaggagatcgagcgcatggtgcaggaggccgagaagtacaaagccgaggacgaggtgcagcgcgacagggtgtctgccaagaacgccctggagtcctacgccttcaacatgaagagtgcggtggaggacgagggtctcaaggggaagatcagcgaggccgacaagaagaaggtgctggacaagtgccaggaggtgatttcctggctggacgccaacaccttggcggagaaggacgagtttgagcacaagaggaaggagctggagcaggtgtgtaaccccatcatcaccggactgtaccagggagcgggtggtcctggggctggtggctttggggctcaggctcccaaagggggctctgggtctggccccaccatcgaggaggtggattaggacttcttccccagattgttcctgtttgtgtcagaaacggttaggattaaggattctaacattgccttatatgtctgtgtttcatcagtctcaactctgcaagttgtttgcaaagtttcaactgtcttttggtgaagttatgaagttccttttttttttagagtccaaatgtaggaagaatttatactgccattttttttcttttttgtagtattgacgttgaacctgggcctttgttataactgatttttgcagagtaaataaactcaatcatttgtcttgcctgcttctgtgttttattttgagattagaagagtctggataggttctctttggtttaaaattgaatggtgtactttgtatcttagataatggccagggatctggagaagtaaagcccattgtaatccctttcttttagataaatggtattcttgagagatttttaaaaaacagcttattttgagtgggttgggtttgtgggtatagaaaaatttaagggctactgacctagtgttctcaagtttgttggggagggagggtgttgacccttcgtaagggtgtctgggaaagggtgtatgaggaatgttcctggacaagctggcaaaagggagaggcagaggtggaagctcctggctgccctttcctgtaagttcacttgtgtcaaagccataatggtttcagcatgaaagaacaggtgaaggacaggacgcctgagtggctcaactgttgagtgcctgccttctgcccagggtgtgatcctggagtcctggggggtcaagtcctacatccagcttcctgcatggagccgcctcctctcttctgcctgtgtgtctctcattaacaaataaataaaatcttaaaaacaaacaaacaaaaaccaggtgagtcctaaattagtagtgaggaactgtgagcactggcttgcccagttatgtactggccgctctgacctctagttctcatatattaaaatgaaagagtctggcttgatgccgcagtctatagttctcatttctgagaggttactgagaaatgtcacatttctcccaaagttatttatgttttaaatatccagtgagtatctgcaaggaagtgtcatttagtttggtgccccaggacccaatatttcagtgcttttatgtcccaggcgctgttttagggccttttatgtgtttatgaatctttattccaccactcggaggtgaggtagtgtttaacttgtccaggtgaacacaggagacttaaaagtcactggtttacatctgcaagatgtggatggaactagagaatattacactaaacaaaataagtcagagaaaggcagttatgttaactccctcatatgtggaatttaataaaacaggatcatgggatgagagaaaaaaaaacaagacaaaattagagaggaagacaaactataagagactcctttttaaaatatatgtatattttttaaatttatttatttttatgatatatatagagagaggcagagacacaggaggaaggagaagcaagctacatgccgggagcccgacgcaggtctcgatccagggactccaggatcgcgccctgggccacaggcaggcgccaaaccgctgagccacccagggatcccctttaagtatactttttattcttttttttttttaattttttatttatttatgatagtcacagagagagagaggcagagacataggcagagggagaagcaggctccatgcaccgggaggcctgatgtgggattcgatcccgggtctccaggatcgcgctctgggccaaaggcaggtgccaaaccgctgcgccacccagggatccctcctttaagtatacttttaaagattttatttattcactcatcagagagaaagaggcagagggagaagccggctccctgcagggagccagatgtgggactccatcccagaaccctgggatcacgccgggatcatgccgtgagcccaaggtagatgttcaaccgctgagccatccaggcggccctataagagactcttaatcataggaaataaactgagggtcaccggagggcaaggctgggggtggtggtggggggacgggttaactgggtgatggacattaaggaaggtatgtgaagtaatgagcactgggtattatataagactgatgggtcactgacctctacctttgaaacgaaaaatacattagatgttaattgaatttcaatacaattttttaaaatcctaaaaaatataataaatgcatgctcccatttggcctgaaaaaaatgttactggcttaactaaaattacttaagtgggagcacctggttggcttggtggttgagggtctgcctttggctcaggtcatgatcccgggatcctgggatccagtcccacatcaggctccccacagagaacctgcttctccttctgcctatgtttccacctctctctgtctctcatgaataaataaaatatttttttaaataaaattacctaagtagttaaaaaaaaaattccagttcagcaaaggggttaatcctgggttccaactctggttttcagtttctgccagactgtcccaggtaaactaggcttttgctttttaatgtgcctagttctgggttgtttccatcttaggtttcacagtcagtaccccttggtctatataggatcctaaacaattagataaacactaggattgacaacaggggcaacttagaagagagaagacctactacaggcttccttcccatgccgtactttccctttgagatacatcacatcctagctgctagcattctagaaataatccccttcacaacccttgttggaaaaggccctacagtaatcctcaaggcttggggagtgaacccctttaacctttgtaacccctggaggttacaaagttgtttggaacaggatagagatggtgtttgcagatcattgtgaatatactggatagatcattgtgaattctactcaattgtcttaattaaaatttcttaattttttattctttaatctctttttttttaaagattttatttatttattcatgatagtcacacagaaagagaggcagagacataggcagagagagaagcaggctccatgcactgggagcccgatgtgggattcgatcccgggtctccaagatcgcgccctgggccaaaggcaggcgctaaaccgctgcgccacccaaggatcccccccttttttttttaatggtcttacttagagggacctgggtggctcagtgggttaagtgtctgcctacagctctggtcatgatcccagggtgctgggatccagccctgcattgggcttcctgctctgcggggagcctgctgctccctctgcctctccccctgcttgtattctcactctgtcaaataagtaaaatatttaaatagatcaataaaatggcctcagtcaacattccataagagcatttttcggagtttatgtggtggtcttcagagcccactaaatcttttagtaaatagcttctgaagaaaatcagtgttatgggaatggcatatctatatttatatctatatctgtatctctatctatctatctatctatctatctatctatctatctatctatctatcctttgtcccgaagtatggaaatggagattcaagagatgtttatgcttccaggccagcttataaaggcacctttaaccttcaagacagttgaactctaggggtgtggactcctgccatgatgtacatcagtcttcgcgaggatatgcatttgccacaggacctcatttcccttagagcagcaggaacgtttgtcactgtcctttgcggataacagagtgactcttcaagccaacagccactaccaatagtaggtggtagaggacagggagggtggatagaaaacggtggagattgggaaggacctaccaaacacctttgataagagagttgagggaaatctccagaaataagcctggagaaaataagttcctgtggccagattagtcaagttattgaatgggtgttttattaagaaaacaatgtaagaccttatagtccgcatctcctcactccttggactgaaatcactttgtaaggtcaaggaaatcatgcaaatgaaactatatatttaaaaggaatgcagggatccctgggtggcgcagcggtttggcgcctgcctttggcctggggcgtgatcctggagacccgggatcgaatcccacatcgggctcccggtgcatggagcctgcttctccctctgcctgtgtctctgtctctctctgtgtgactatcatgaatgaataaataaaatctttaaaaaataaataaataaaaaaaataaataaaaggaatgcagtgccatcctggagaaagtgctgtctcaagtaagaaaataaactggccataggggaggtacacggagggaaagtaaccgtggggggtaggggaataattttttaaaatagaatactttccctaattcctttacaatcccacttctccctccatggcagctctcggaaggccagcggctaggtcagcgcgactggctttatatgccctttgaacccaagataccgctttactaggaacatttatactgttacttctggcctttaactggattgtcatccaaaatgaaaagataaccaaaacgggcagccccggtggcgcagcggtttagcgccgcctgcagcccggggcgtggtcctggagacccgggatcgagtcccacgtgggctccctgcgtggagcctgctgctccctctgcctctgtctgtcatgaataaataaataaaatctttaaaaagaaagaaagacaaagataaccaaaacaacaagtttatatgagagaagtgggcagggatcacagctttcggttaaaacaggagatagggttattttaggtgaggatgagaaacgaggacgatcctgcacctttaaccgcaaagcctaggtgggcccggggtcacctctagcggcgccgccaaccccgcccctccccggccgcgctcggcctgaggccgccccgcccgccccgccccgccggccgcgtcgagcagggaggatgcggcccgggggcctcagggcggcgggaacacggagtccagaagacgagaagcacctcccacggcctccccacgggaaccgggagccgccggcggcggcgagcagcgaggccggcagggacctcagtgccgcgcggcccctcgggctctggggcctccccttccggcgccggccaccggtgcctcccgctccttgtaggggttgccagacttttcagggctttcgtcgcaccggttagctggtgtgagagtcactgtggccatctcgcctttctcctcttttcaccccgtcttggaaacaatcggaaaacgccgtccaggccaggcagttctgcggccacccgtgaggtcccgcggccgcccgcgcgctccgcccctccccgctcgcctcctgaccggcctcccgcccccgcgccccgcacccccgcagcccccgcgcccccgcgccccccgcaccccccgcgcccccgcagcccccgccgcccccgcccgaagcccgctggctgacgctccggccctttttaactcctgtccggagctttctggagttttccgtttgggggtggggacggactcgtaagaacacgtttcaaccaactatccaacaccccaaccccgccctaggacatcaagcttagtcatggctctatatttactttccagaagattctgtgaactgtttcagcctagcccgagtcacagggctcccctgctcctgaccgaagaggagaggcggggctgggggatctggaaggtgggaaaggtaggagcaaggcgagggcgaggagtcaggagtgcagccaggaggcgagctgcggtgggtcacggagcccacagagccctgacattcacttcactcccttttgtggccatttgtcttccttctcttcagaaaatgaaaggctaggatgcatgtgccagcagtgagaggggtccaaaccagtgaatatggggacatgcaggttcaaccaccggtcctataatgagcagtttgggtggccggactgagccactgaacttctgatcctttgtgttcctctttgaaaacgaaaaggtttggagcagcccaggtggctcagcggggtagcgccgactgcagatcagaggtctgtcgctggatctcgtgagtaaatatataaaatgttatgaacaaattatttcttcatgagagtagcaacaagagaggcagagacacaggcagaggagaagcaggctccaggcggggagcccgacgtgggactcgatcccgagtctccaggatcacgctccgggctgaaggcggcgctaaaccgctgagccacccgggctgtcccaagatggatattgttaattctattttagagatacagagacgtgttggttcacttacaagtactgcactgtgaagaaggacacagaggaaaagaaaaactgtcttaaggaagtagagtcagttccaaacgcatccttccccaggttttcccaagctgctggaaatctgctgtgctccccagccactatgttatttgccactgacttgttagaaaggcctcgctctaggtttcctatgagttctctcctttgcttttttctaaccttagaatgataccatcctgtacaactaaaagaaccaggggcgcctcggtggctcagttaagcggctgccttcgctcaggtcgtgatcccagggtcttgggatggggtctgcctcagctccctgctcagcggggagtctgcttctccctctgcccctcccccctgcatgccctctttctctctcaaataaataatctaaaaacaacaacaacaaagaaaagaactgaggagaaagcagtactgtttgagaaaatgcaggaaaaaggagaaaagaaaaaaaaaaaaaaacaccaaaactccagcagcttcagggtgatgagctcccctcctcctcacttctgcactgccaagttctaggctccgcctcttccattccccacccttaaataagtaccggacaacccctccagcttgggtaacttgagacctgatcctttcaaatgccaaacccaataaaaacttaattacaaaattagtcaagttaaaattctggaaagtttcttggggttcttacagtcaccctagaaaccaattaaacccgtgactgggtttttgctttgggaagcatccagtgtaaaagacaaaattcaggagactctcttcttgtcaggaaatgggtaaggaatatagatgtttgggtttccagaccagtccacagagagattttaactcaaaaggtaagtcaactacagggcgtagctgatgattcatggaaaacagcatttctagtgaatctttttttgctacaccaacagcagcaagatttgaggttctatcaccatgtttacctgccaggcagtgggtacggtgacaccctttgcttccggccaataaaaaagtattttaaatttcagatgtggagagaaaggagtaaatccagaactgcctctagtagcagctaatgacaaggaagcttccaaaaggaggaggtgaggttaagggtccctagaagtgttgatacattggggagtgaagaccgaagcttggggagtttccagagattgcataaagaaatggaaaattccttcagtttgaccagtttgactagattaggagatgactcattagggagctacatctgagggtaaaaaaaaaaaaagtaaaaaaaaaaaaaaaaaaaagagttatcacttgcctgcacaaacacacatgggattgtgaatgcaattccaattgaccaaaatgttcaaaagcaagattatttcccttcatcaaaaattgtcttctcataaaaacaaacacacaaaaactgtcttctccctctgttctctgtgctcaactatttgtgtacagcaatgaagtctattttcggtgggttgtgaaccgggtgctattgctttaatgtcccttatgttttcataatcaagcacccaacacgtggtcttcttccatgccagcaaaggattaaaaaaaaaaaaaaaagggatccctgggtggcgcagcggtttagcgcctgcctttggcccagggtgcgatcctggagacccgggatcgaatcccacgtcgggctcccggtgcatgcagcctgcttctccctctgcctatgtctctgcctctctctctctctgtgactatcataagtaaaaattaaaaaaaaaaaaaaaaaaaaagccaagggatccctgggtcgctcagaggtttagcgccaaccttcagcccagggcgtgaccctagagtcccaggatcgagtcacatcaagctccctgcatggagcctgcttctccctctgcctgtgtctctgcctctctctctctctctctctctctctctctctccctgtgtctatcataaataaataaataaataaataaataaataaataaataaataaataaataaatcttaaaaaaaaaaaaaggcctaaatgaatgatcaaatgtgtttgtattcaaagcaggaagtaggatagcatgcaaggagttggaagccagggtaagaaactaagtgggtgaattaaatgcatgacaaattttaaaagagctgtaagtagaacttgaataggatcaacccctcccaccatccagcatcaggattccccaccactttgttttaaaagggaccacctgggcagctctggtggctcagcggtttagcgccaccttcagcccagcgcctgatcctggagacccaggatcaagtcccacgtcgggcttcctgcaggtggagcctgcttctgtctctgcctctctcgtgtgtctctcatgaataaataaatgaaatatttaaaaataaataaataggggatccctgggtggcgcatcggtttcacgcctgcctttggcccagggcgcgagcctggagtcccgggatcgagtcccgcatctggctccccgcagggagccggcttctccctctgcctatgtctctgcctgtctctgtctttcatgagtagataaaatagtgttttgtttttttatgatagtcacagagagagagagagacagagacagagacataggcagagggagaagtaggctccatgcaccgggagccctacgtgggattcgatcccgggtctccagaatcgcaccctgggccaaaggcaggcgccaaaccgctgcgccacccagggatccctaaaatagtttttaaaataaataaaaggggctacctgcaaccagctgatgaggtttaggaatataggtgaggtttggtgggatgaggtccggagctgacgaccaagaaagaattcttgagatgtcttgggggcaaaataagacgtcttcttaaaggagggggacaagacacgtgggcaggaagagctgctgccccggcccatgaggggtggctgattatatacctgggagttgggaggggtttgaggatagcgtactctctaaggaatttggaagcaaggtttccaggaccttgaggggaccagctattgttgggaaaaggtcacttattaccgcctaataaaacctgagtcatgagacccttcagatgtgtatgggtgggctatgtgcttgggggatgattgccaacatgtatcttggggatttagagataaaggaactttctaaaggaatttttacatgttaaagtagacttacaggatcctgggggtcgggctaagattcccttttctccttagcaaagtatgaatatccaggcagttgagtctgtagaggaaggtccctctgcctgtttcaaggacttgtcaatgtgctgccctgggcttgtgctttgtcctcagccagtcctctgttcccccatcacagctgtggcttctaatgctgttaaggaggactgaatatcctctcctctccctcgctggctccccatcctctacatttcatttaaaaatgctggacagggcagccccagtgtcgcagcggtttagcgccgcctgcagatcctggagatgtgggatcgagtcccatgtcgggctccctgcatggagctcccttttccttctgcctgtgtctctgcctctctatgaatgaatttttaaaaatctttaaaaaaaaaaagaattgctttaaaaaaataaaaatacaaaggctggacggtctactagcaacagggagagtgcagaagaccgaattctgggctctgagtagtaaccaggaattacctggccaaaaagagggcaaggggtggcccagacccacaggctgggaagacaacagggacacgggaaagccccactggccttagaagcagctgaagtcctatggaaacgtttttcttcctccagcctgagtccagccagaggcaaaggggttcagcaggtccagccctgcccttcccccctcccctgcccttgaccctgttcattccttgcggggcgtgggggacgttctccagtttaataaccacctgtttacctgattgtttttcttttaaaagttcaaattccccatccccaaatattccatctgtgtaggttaaagatatcaaaactatactgcgatatatttccatttcttttccgctttaaatcaaaggtagggaaaacgacgctgagaaccaaggcaatcctcaggcagcttacgcctttggaccgctctaccagcgggcccaaacccggcccatcagtgccacagcccaatccgagtgagtctctgtgacccgcagacaccccacccacttggagaaactcggaaactttctgtatgtggagtaccccgcgcacccccgcccaccccggactcgtgtagcccttcaaccctatcttaaatcatcagactcctttgaaccccacgtgccctacaatgacagcccagtgtcagtccctcgggtcagtttcaagctctgcgcactgcagcgccgtcgcccgggagggggagggggcagggggcagaggctggggggcggagtccacaaccacccgtcccaccgctacctccctgccctcaggattcccgtcccttcccgagaaccccagaagagtctggagagttctgggagggcggcgtcctggacgcccattggccccagggagcccggaggcgggacgccagccgaaaccgctggaatcttcccgaccggccgccccgcagagccccgtgattggctggggaccgaagaggcggggctgggcagcgctataagcgcggagccgccccgccggggccacacagcgaagctgcgcaggcaccgcggcgtctcggcggcgtccgccccagcacctttcctttcgcagacccgctgcgtccgcagctgccgaagagaagagaccgagctcctcctcgtcgcggagcccgaccgcctttcggaaacctgaacgtgagcctgagcgcgggcagggaagcgggacgccggcatggctaagagcgcggccatcggcatcgacctgggcaccacctactcctgcgtgggggtgttccagcacggcaaggtggagatcattgccaatgaccagggcaaccgcaccacccccagctacgtggccttcaccgacaccgagcggctcatcggggatgcggccaagaaccaggtggcgctgaacccgcagaacaccgtgttcgacgcgaagcggctcatcggccgcaagtttggcgacccggtggtgcagtcggacatgaagcactggcctttccaggtggtcaacgacggggacaagcccaaggtgcaggtgagctacaagggggagaccaaggcgttctaccccgaggagatctcgtccatggtgctgaccaagatgaaggagatcgccgaggcctacctgggctacccggtgaccaacgcggtgatcaccgtgccggcctacttcaacgactcgcagcgccaggccaccaaggacgcgggggtgatcgcggggctcaacgtgctgaggatcatcaacgagcccactgccgccgccatcgcctacggcctggacaggaccggcaagggggagcgcaacgtgctcatctttgacctgggcgggggcaccttcgacgtgtccatcctgacgatcgacgacggcatcttcgaggtgaaggccacggccggggacacgcacctgggcggggaggacttcgacaacaggctggtgaaccacttcgtggaggagttcaagcggaagcacaagaaggacatcagccagaacaagcgagccgtgaggcggctgcgcaccgcctgcgagagagccaagaggaccttgtcgtccagcacccaggccagcctggagatcgactccctgttcgagggcatcgacttctacacgtccatcaccagggcgcggttcgaggagctgtgctccgacctgttccggagcaccctggagcccgtggagaaggccctgcgcgacgccaagctggacaaggcccagatccacgacctggtgctggtggggggctccacccgtatccccaaggtgcagaagctgctgcaggacttctttaacggccgcgatctcaacaagagcatcaatcccgacgaggcggtggcctatggggcggccgtgcaggcagccatcctgatgggagacaagtccgagaacgtgcaggacctgctgctgctggacgtggcgcccctgtcgctggggctggagacggccgggggcgtgatgaccgccctgatcaagcgcaactccaccatccccaccaagcagacgcagatcttcaccacctactcggacaaccagcctggagtgctgatccaggtgtacgagggtgagagggccatgacgcgcgacaacaacctactggggcgcttcgagctaagcggcatccccccggcgccgcggggcgtgccccagatcgaggtgaccttcgacatcgacgccaacggcatcctgaacgtcacggccacggacaagagcacgggcaaggccaacaagatcaccatcaccaacgacaagggccgcctgagcaaggaggagatcgagcgcatggtgcaggaggccgagaagtacaaagccgaggacgaggtgcagcgcgacagggtgtctgccaagaacgccctggagtcctacgccttcaacatgaagagtgcggtggaggacgagggtctcaaggggaagatcagcgaggccgacaagaagaaggtgctggacaagtgccaggaggtgatttcctggctggacgccaacaccttggcggagaaggacgagtttgagcacaagaggaaggagctggagcaggtgtgtaaccccatcatcaccggactgtaccagggagcgggtggtcctggggctggtggctttggggctcaggctcccaaagggggctctgggtctggccccaccatcgaggaggtggattagagctcttaccttttttgctccagttttctttccaagtcagaggtgatctgaggaccttgctattgcactaggtttctttctgtcttcaattttctactatttcagtttatcctaaagttttattgtaacttggtagtatttgttattttattttttgtgtggtatactagttcagtagagttctttacatttaaattaagttggtactgtaagttctttttttttctctgtgaaatgagtcaacactgccgccctctgtccaattttgctatgtaaacaccagtcgtcctggaatgacctttttggttggttggtggttttttccccccaatttgtatacttgaaaaataaaacattaaaaatatgagtcttattttatctgaggcgggatactggactcttcttggaatgtctgaattctacacactggttagagggagagtacttctgaagagaagtaccctgtgaggtaccattgctttggccatttatttgggacttcattgttggttgtaagtgacatctgtgctagaaaacaaaatttcagctgcccatttttgtgggtgtgctttttttaggggaaaagtagggacaggagctgcaaaaatggttttggggagaagtgtgtttaaaggcagtgctggggcagccccggtggcgcaccggtttagtgccgcctgcggcccagggtgtgatcctggagacccgggatccagtcccgcgtcgggctcctcgtgtggagcctgcttttccctgtgtctctgcctatctctctctctatgtatgtatgaatgaatgaatgaatgaataaataaatcttttaaaaaaatgcagtggtgatgggatgcctgggtggctcagtggttgggtggctgcctttggctcaggtcgtgatcctgggatcccagaatctggtcccctgtcaggttccttgcagagagcctgcttctccctctgcctatgtctgcctctctctgtgtgcctctcatgaatggataaaaaaataaattaaaaaataaaggcagtggtgagagaggttcatcattccttattctcttgctctcaacgtgtgcagagacctgaatttgtcccttctaagctatgagtcttctagtcttttatttaggttaggaatgatattgggggtgtgcaaaacagcgaaaatgagttgcaaatgcacagtgtagctctgtaaatcccagctgggtggccaagtgtaaattagccttagatttggtcgtctcattttaaaataattcgaaaaaaaaaaagtgggacctctaggtggctcagcggttgagcatctgcctttggctcaggtgtgatccttgggccctcctcgggcttcccacagggagcctgtttctccctctacctgtgtctctgcctctccctccatgtctcccatgaataaataataaaataaaataaataaaataaaagcaatttatctgaatgacctcacttttaaagatctagatcattttgagcagaaacatggcataagcaagcaacatgttctgccacggtcaccctagctgctgttatcaaaggaaggacacggaggggagagagtcccagagtttggggatcaaggcaatgaagtgggttctttgcttcgctccagtaaaattcagtaattctcatgtccccaccttctaattcagtaaagtttttcaatgcattagtttatggaagtggtcacttccactatgtccagggtaaaattagcaacaaatactgtgtttttttgttttttcccacactgcctgaacactgttgacattgagttcctaggagtcttgttctaagtgacggtttaaccctatttttaataagatcagtaacctctttttccttttagggacaatctcaaaaccataggaatttgaagtaacatccaatttaattatgaaggagaaggagctgaaagtagagcatagagctgggaagatcaaggaaatgggctttcctcccatacaagtccttccctagggggttcttctgctgtagcagttaaatgtccttaacattttctttagcttgatagaatcctaacctcctgcttcccccaaaactgaggctggaaataactactacaaaataaaaacaaattacagttcaagttctgtttttcaataaatctttatcctctgggaaaataaaacgttttagcaatgatgaagtagcggaagccctccttgaaagcttagaaaaggaatatagtaagctcttctggtttctggaccagttcccaaaggcctgttttggttttaagattttatttttttgactgcacacaagcaaggggagggccaggcagagggagagggagaagcaggctctaaaggcagatgcttaatcgactgagccacacaaagcccactaccaaagcccatccaaaggcctggcaaaattggtgaactacttactcttctcctaccatgggatatagtaaatgtttgctgctgcagcagcaggaattgggggctttcttaccttcccccttactctaacctgccaggtaatagagaaaataaaaagcaagctattgaagatctgtttctataatgtggtggtatattaaaatcactgggggagggacacctgggtggctgcctgagcagttgagcatttgcctttggctcagggtgtgatcccagagtcccaggatggggattgagtgccacattgggctccctgcgtggagcctgcttctccctctacctatgtctctggctctctctctcttgtctttcatgaataagtaaataaaaccttcaaaaaaaaaaaatcattgggggaggctaaaaatatacccacctccaggcctctagcaggagtcagaatctttgggagtgggctaaggtgttgaagagaattcaagctacttaagcatttctttctttaagatattatttattcatgacagacagagtcagagacacaggcagagggagaagcaggctccatgcagggagcctgacgtaggactcgatctggggtctccaggatgaggccctggactgaaggcgtcactaaaccgctgagccaccggggctgccctatgtgtggctatcttacaaaagatgaaaatgccaacatacatcaccaaacattaactacatttataaatgaggtacagaagggtccgggaaggtgggatttgagagattttatgagttgatggattaaggggtcaagagcaaatgaccagatttctgggggagcaaaaattatcaaagggagaactggctgttgctgtaccactctaatttgctttgcttccaacccccctgagacatatggtgctatttagtgtgtgaacacgtgcaccctttctggccaactcacaggccatccactactaatgaagaggacatgaaacaggaaatagggagtagtttaatgggagtagtttagctcattgaagtactttaatggtattgttttagtatttttagaaagttctgcagatcggttgtacatcaacgtgaatacattaacactactaacttaaaagttagaatttttaaagttatcaagtgggtaacttttttcaaatggtatacttttttttttttaagattttatttatttatttgagagacagagacaacaccagcaaggaggggagatggcagtaaggggcggaaggagagggagcagcaggctccccctaagcaggaagcccatgtggggctccatcccaggaccctgggatcataacctgattgaaggtagacggtgaaccaagtgagccacccaggtgcccctcaaatggtatatttaaaaaaaaaactgtttattgtatatcatttatatcttaaactgttaaaaaaggggggggggggtaacgcctgggtggctcagcggtttagcgcctgcctttggtccagggcgtgatcctggaatcctggggtcaagtctcacatcgggctcccagcctggatcctgcttctcccctcgcccgtgtctctgcctctcatgaataaataacgtcttaaaaaaaaaaaaaaaaaaggttaacgtgcctgacagttgtgcaggctggattgggtagcgaattcagattcagctggctagatggagccggtgaccctctctcggaaggaccggaaccccgaggtgcaccggtgaggacaagggagagggccctggggccgactctcaggggacccgcccgcctggggaagcccctgcggaggagcgctcagctgcgcatgcgtctggcagggccagggacgcacctgacaccgccggtcgagagacagtcatctcttttttgtttttcaaaattaacaaaatacgtgcgaatatttgcccggaagagtgtgagacattcacggctggcctctctttcacttggcctgttctctttcggacgaagaggacggtgcggtggtcgagccaggcactgcgaagacagccctacatgtcaggcccccagcacatgccgctataaataggcggggccgcgaaggctcgctccctttgtgcggtggtcggtccggctgctctcgtgccgtggtgctgtggcggctcgatgcggcgcccactctcctacaccggggccctgctggggagggggcggcagcctcgggttgagcaggatgagctgcccttacagactagagtttctgatgtgcccgtgacggcgcttttgggagctgacccatcccagggcggaggggggcgttaggctgccgtcgcccaccccccgctgacctttggtgtcctcccagacccctggtcctcgcaggccgatccgcagcgctaccagggtgagtgggttgtgcgagatggggtggccggccgagtccctgggggaggacgggagtgatgatgaaccccggtgactctgagtgtctcgctgacgccatcaccgcagcgcgctgaccaaccccggccgctgggctggggaaaaagcggacggcccggaaacctttactagtgacgaatccctgtttggttccccattaggtgcttgaagatttccgccgctgttacccttggttcaaggtatgtattagatgtgaggtctttctcagtgctgctcaccatctcgtccccaaagctgtttttttttttttttttttttaagatttatttatttatttatcatagagagagagagagaggcagagacacaggaggagggagaagcaggctccatgctgggagcccgacgtgggactcgatcctgggactccaggatcagccctgggccaaaggcaggcgctaaaccgctgagccacccagggatcccccccaaagctgtttttattcagtcagtatggagtttgctttctcttgagcacgcacagcaatgcaagtattgtaacccgtgatttttttccaaggactatttttggcttacatttcttttgtaattgtttggaaaagacctttttgactttacatgtttttgtctaagcctagttaaacctgctttattttttgtgtacgtatatttttttattggggttcgatttgccaacatattctgtatatttctatatgcttagcttttctggtggaggtattttttgcagttccgaggtccgtgtcgcgaagtccctcctccccccctttaattctccccacttctctcgtccgtgctcttcgtttgctacatccttgctactgatgcaattgtttttagtgcattacaccctttcagaatggcctcccctgatccagccctccttaaaatgggaatgatgatttctcagactagagtctctgacactggtcttgatgtcaaaaattacgttctgactcatttggagaactggatagtgagtctgagaagggcccaacaggggggccttgacattgcttgtacttaccattggctgtctgtcctgttttcatctttctagcttgattattctggaagcctacctggggcggtgccctttcaaaggttaggtactaatcagatactgaagggctgaagtttgtaattcatcctcttggatcagtgctattgaaatgactgtacccttggaatggctcctgccactcgaacctgcagtgcagtctgtgaagagtcacgtcctttttccttggctgctatggtgagtgccagtttttctgccagccccagagtggtaatgataaccatcttggaacatgagtatttctctgaggatctttgaaaccactgattgaggactcccctaactgcccaggttcatgttttaattccagttggctacgtggttctaatacatgttcttttatgaaatttcagggttttgttcatgcagaggatgcctcctatctggttggtgttgggcagatcctaggaacttccatctaatttccctgcattaatctatgcaagcagctgtcaacttactggaggaaagaaactgcccagaaattttgagatgcttaaatacttttagaccaattagatttatttaatatgaatacttgtttttattaaaaggattccaataaaatactttaaaataagcttggtcttcgtaaaaataaggtgggacaaaaagatttgcggaagtaaaagggaacttctttggaatgagcatcacagttgacatctagctatatacctctttgcagctttatagaaaaaactaaaatgaggttgaccctaaaattaagaattttaggtggtgtaccacaggattttaatgaactagatgttaagtaatgaaaatttttaaggtgttgaaatactaacactgggggtggggacacctgggtggctcagtggttgagtgtgtgccttcacctccaggtgtgatcctggagtcccaggatcaagtcctgtattaggctccctgcatggatcctgcttctcctgtattccattttatttttaagattttattaaaaaaaaaaaaagattctattcattagaggcagagacacaagcagagggagaagcaggcttcctgcaaggagctcgatgtgggactccatcccagatcccaggatcatgccctgagccgaaggcagacgctcaaccgctgagccacccaggtgtccccacccccggtgtcccacatactgtattccagaaggttgtgccggtttatgatcagtgttctcatggtatcacatgtttccctgtatctttctgatatccagtggtggtaacaatttggccaccagtttggggctattaactcttatttttgagtcccatactgggctccagttaggaagcctgctcctccctctgcctgcctctgcctctgtttctcattgaataaataaaaacatctttaaaattatatttcttctgtatttgcctactgagcatttccagcttggtcccccaccactttatttttttaaattattttaaactttgaggggcacctgggtggctcagtcggttaagtatctgcctttggctctctccctgtcaaataagtaagtagaatctttttaaaatttgagggcagggaagccccggggggctcagcggtttagcaccaccttcagcccagggtgtgatcctggagacctgggatcgagtcccacgtcggactctgcatggagcctgcttctccctctgcctgtctctctgtttctatgaataaagtctttaaaaaaaatttttgagggcagccctgttgcctcgggtttagcgcccccttcagcccagggtgtgatccgggagacctgggatcaagtcccacatgaggctccccgcatggggcctgctccctccgcctcttgtgtctctcatgaacaaatcaaatcttttaaagggaattttttttaaagattttatttattcatgatagagcggcagagacacaggcagagggagaagcaggctccatgcagggaccccgacgtgggattcgatcatgggtctccaggatcacgccctgggccaaaggcaggccctaaaccgctgtgccacccagggatcccttaaagggaatttgagagagaaaatgggcaggggacagcaggagagggagaaacagggcgcccaaaagcactccatcctgagaccttgagatcatgactgagctgaaggcagacacttttacccactgagcacctccaggtgcccctaggctctgtttctttaggtaagaagcaaactagtctgttaccagttacttctgtggagggattgggatggggtgagggtaggaggagattgtactttttcctccacggatttctgaattaatactagtacatgatacaaggtcccaagcacataattgtgtttggctctcagccattttcctgtttcttcacagcaagtatttagtgcttggatctgtgctaagcttttcgtgtgctccacttcattaaacccttaaagctcaaccttgcaactttgataatatctacccacttcacaggcaaggaaaggaaggctcaggatgttagataattagattaagttcctttctatctgctatactggtcacccagccttagaactttaccaggaactgaagcaaaccagcctttgacttaatttcccttttaaaatccttcccactcgggatccctgggtggcgcagcggtttggcgcctgcttttggcccagggcgcgatcctggagacccgggatcgattcccacgtcgggctcccggtgcatggagcctgcttctccctctgcctgtgtctctgcctctctgtctctctctgtgactatcataaaatcaataaaaattaaaaaaaaataaaaaataaaaaaaaataaaatccttcccactcagaggaaactacccagctcaattgtggctgttaccattcccggactttttcttaacagttttaattctgaatatgttcctgaacagcatatctttgtatcttcttgaacttaacaaatacgcagtaattcctcatgtagttctactgcaacttttttttttttttttgttcatgtgctttcctgtaatttagattccacccttccatacacatttctgtccatttttattttaggggaaaaaaggctttaaaaacttcttttatgttgataggtgtctctgggtactatatatgagtacttctatttatgagtgcattcttcaaggttaccagtatcacataggaagtatcagggactggttaagattcctggagcaagagattcactttgggtaggtaacttatccattctatcacggtttccccatttgtcaatgggtaggagtatctacccttacaaagagttttcattagatttaagtatatgcaaacaaatttaaacagtgcctggcacatattaagccctatttaggtatttgctacaattacatcatttcaaacagctcaatcattaatgtgcaaagcctagtcagtacttaccctcatccttagttcctgatgtcactagtagatggtcaacttcctggtcctgaggctttcctctgcattctcttgctctaatctgtatggtccaagccctcccctaggtgttgggaccctccttcctaagctagcccaggggttggggtataagattagcctacagccatagtgaaagtggtcacatgaacttgcatggaaatcacattccagccttctgcatccttgagccccacagtgtcccctcaggagtaatggtgcttggttaaaacctctattccagggatccctgggtggcgcagcagtttggcgcctgcttttggcccagggcgcgatcctggagacccgggatcaaatcccacgtcgggctcccggtgcatggagcctgcttctccctctgcctgtgtctctgcctctctctctctctctctctctctctctctctctctctctctctgtgtgactatcataaataaaaacaaacaaacaaacaaacaaacaaaaaaacctctattccaaaacatcacttctccatgctctacgagtggagcaacttcaggagtgaacagccctccttcctagcccactggctagatatcacagctttctagcagctctgagcagagactagcctttctgccactgcagatggtgcacctcccagggcctgtcttctgcctgtctctccatgcttttcacccttggaatcctcagccactggccagtctgttagccccttcacaatttattcatttccctgttggagaatatgtgtgttgcttccttttctctccccattacaaacaacaccaccaaagactttataagtaaaaaaattaaaaaaaaaaaaaaaaaaaaaaaagggatccctgggtggcgcagcggtttggcgcctgcctttggcccagggcgcgatcctggagactcgggatcgaatcccacgtcgggctcccggtgcatggagcctgcttctccctctgcctgtgtttctgcctctctctctctctctctctgggactatcataaataaataaaaattaaaaaaaaattaaaaaaaaaaacaaagactttataagtaagctctgggcagccctggtggctcagcggttgagcgtctgccttcggctcagggcatgatcctgggatctgggatggagtcccacattgggctccctgcatggagcctgcttctccctctgcctgtgtttttgcctctctctctctctctctctctctgtgtctctaataaataaataaaatctttaaaaaaaaaaaaaagctctatgcctaaagggggtttttttttttttttttttttttttttttttttagattttgtttattcatgagagacccgcagagagaggcagtctccatgcaggaagcccgatgcaggactccatcctgggactctggagtcacggcctgagccaaaggcagacgctcaactgctgagccaaccaggcgtcccataatgtgggtcttcaacccatgaccctgagatggagtcacatgccttactgagagccagtcgagtggtgacaccactaaggacttttgtgtacataaactcttatacatacatgtgagtttgaatagtctcctttccttacatatccaaatcatgctggtgttaccttaaaaataacaccaaaatctgactcctctcatacctccactaccatcccactctggtaggagctatcaccagctcacctatatgactgcagcaaaacccagctggtctcctggcttccacccttaccccattacaggcatatccacacagcagccagaaatttctctccaaatcatgacttgagacttgtctctcgcttggctcagtatcctgcaagggctcatatttcactgagagggaaacccagagtcttcacagagaccacccaacaaggtcctcccaagtctagctgtgttgtctctgacctcatctactctccactctgcctcagccacagagcatgaagccaggagcttgtggccattctcctgtcaatgttcagggggtaaagattttgcttgatggctggggtcccaaccacatgccttggtctgtagggtagacagaaatttgtgtcaacagagcttgtggatgtaatttggctggtgaggaaatactagagtggagaaataaaaactatcctggacattgtttgtggactgtaactttatgcatttggaaaacaatttggcaatacctctgaagtatgcacattctcttcaacccagtgcttccacttctggaatacaccctaaatacaccctgaccaaacttgcatgcgttatgtaatgtatgttgtagattatgtagacaaaagtccttcgtaatgagttttcggtaatgggtaatctcaaggggggagggagaggaaacaaatgttgtccaacaattaaatggacaaattgtggtatattcataaaatctaagactgtagagcagtgatgtgttacatgcagtggtggtatgactaatgtgccagcatgtattaatctcacaaacgtgaagggaaaaaaaggcaaattacaaaagaatacatatgtggtgtgtactgtttaaaaacatttacagcttaactattgtttagagttaagtataatatattaaaagaagggatccctgggtggtgcagcagtttagcgcctgcctttggcccagggcgcgatcctggagatccgggatcgaatcccacgtcgggctcccggtgcatggagcctgcttctccctctgcctgtgtctctgcctctctctctctctctctgtgtgactatcataaataaataaaaattaaaaaaatatatatattaaaagaaatgtgtgggattgctaaatgctaaattcaagcaagtagttacccgggctgtgacccgggggtgcgtagaaagagtaatgcagtcaaggaggtatacatgggggctccatgggagctcacggtataattttccatgtttttgtatatctggactgttccttaataacttaaaagcatggtttgggacctgcaaatcctgcaggactgagcaaaggcaaaagccaagtcgtttccacaggaacacctgcaggctctgaaggttggtcacacatggagctcccttggaagacatccagagggcagcctgggtggctcagagttttagcactgctttcagtccagagcgtgatcctggagtcccaggatcaagtcccacaataagaaactctgataacagcatgtatgaaggccgaagatgttcaaagagattgaatttagtctattgtgcacagacagggcattacaaggaaagagtaggtggctgttaaaaggaaacaaatgaggggtgcctggcagttggtagagcatgtgatcttagggttgtaaattcaagccccacactgagtgtggagattacttaaaaataaaatctttaatttggcttgggtcatgatcccatgatcccagggtcatgagattgagccctgcctcaggctcctgtggagcctgcttgagattctatcttcctttcctatctcttcccccagcctgcttgcacactctttttctctcaaaaaaattttaagtacattttttaaagattattttaaataaaagagagaaagagcacaatttgggcgaggggcagagggaaagaatcttcaagcagactcctgctgagcacagagccccacacaagtcttgatccccccaatccatgagatcattacctgagcagaaaccaagagccagacacttaaccagctaagccactcattgtgcccccctgcaaaaatgaatctctaaattaaaaaaaaaaaaaaaaccaaatggggatccctgggtggctcagcggtttggcgcctgcctttggcccagggcgcggtcctggagtctgggatcgagtcccacatcaggctcctggcatggagcctgctccctcctcctgtgtctctgcctctctctctatgtctatcataaataaataaataaatctttaaaaaagtaaaataaaataaaccaaatgaaacaagtagaaatactcaaattgaaataagcaagtatgtaaacacggtaagttaaataacagaaaaaccgaatagaaaattgtgagtggaagaagaaatccataatgtggagcagagaaaacaagcgaataactttctttttaacaagtgaataattttgggactcatggctgactcactggttgagtgtctgcctttagctcagggcatcatcccggagtcctgggatcgagtcctacactgggctccttgtgtggagcctgtttctctttcttcctgtgcctctacctctctctctctctctctctctctctcatgaataaatacaatctttttaaaaaccacaagtgaataatttgaaaaggaaggatggtatgaaatgctccaacctctggcattgtgtgtgtagagctgccctcgccttgttggtttgttacaatgctgcagtcagaacagctctgcccagggacacatgggcgcatctggcttggagcagttcagggccatctgttagtttgcttatacagtactttcccatctattaacatcttactttcccatgattctctctctcttttttttttaagattttatgtatttattcatagagacacagagagagaggcagagacacaggcagagggagaagcaggctccatgcagggagcccgacgtgggactcgatcccgggtccccaggatcatgccccgggctgcaggtggtgctaaaccgctgcgccactggggctgccccatgattatcttttgattgttgtattatttcccaaagaataaggaaacagattatccctaagggttaaagtatctgctgacttttaaaatgttaaatattattgctggcagtcaggtgaacctcaggtggtggtgggtcacagtctagattgactactgcctgtcattaaaccctgaaatctaaagaatgtagcaaagatagagatgtcaccaataatccccagttatctgctgataccagataataaactagggcgtgggtggggtggggtgggagctgtctctaaagagccttgcaacagctctctctggatcagggagctttccatttcctagtggtctacagagattggctgtactccaccctaggttattttcttataaaggagggcaagcaactattctaaaaaactagtttttaaactttttattatgaagcttttttttttttttaagtcaaatctacacccaatgtgggcctcaaattcatgacctcaagatcaagagttgtgtgctctaagaactagccaggtgcccctgaagcttttgcaacggcaggaaggggcacctgggtggttcagtcagttaaacgtccaactcttaaaaaaaaaaaaacaaaacgtccaactcttggttttggctcaggtcatgatctcagagactcgagatggatcctggagctgagctctgcactgggtgtggagcctgcttgtgattctccctctcctgcactccccctctaaaaaaaaaaaacaaaaaacaaacaaacaaacaaacaaaaaaacagtagaaacactagtacaaagaacacccatatacctacacctaaatccaacagttgtcaacatttttctgtatttaaaaaatgtcatatgtacataatttaaagattttatttattaattcatgagagacacagagagagagaggcagacataggcagagggagaagcagtctccatgcagggagcccgatgtgggactggatcctgggactctaggatcacgccctggggcaaaggcggcgctaaactgctgagccacccgggctgccctgtcatatatgtattaaattaagggctcctgcctggctttgtcagtagagcatgtgactcttgatctcaggatcactgagttcaaatcccacgttggtcctaaagcttgcttcaaaaagaaaaataataataataaaagaaaaacttaaaaaatatattaaattatatatgtgtatgtgtttgcatatacatgtatttggcagactcatttcaaagtgaatcatcatgggatccctgggtggcgcagcggtttggcgcctgcctttggcccagggcacgatcctggagacccgggatcgagtcccacgtcgggctcccggtgcatggagcctgcttctccctctgcctgtgtctctgcctctctctctctctctctctgtgactatcataaataaataaaaattaaaaaaaaaacaaagtgaatcatcatgacattttatctctaaatacttcagcattcatgtccagtgtaaggacatttaccactatactattgtcatatctaagaaaattgaccatgattcctaattttactcatacttaattgatattcagatttttccagctgttctcaaaatgtcttttatggcaagttttggggttttaagcttttttttcttaaagatcttatttatttattcatgagagacacacagagagagaggcagagacaggagaaacaggttccatgcaaggagcctgatatgggacttgatcccgggtctccaggatcatgccctgggctgaagacaggcactaaaccgctgagccacccagggatcccccaacattgatcttttgaagagactaggccagtcatcttacagaatgtcctacatattggctttgtctagttgtgcccttctgttttgaacttgttcctcaatcttctctgcattttttttaaactggaagttgcccttaaaggcctacttagattctggttatatagtttgggcaagaatatttcaagtctgacactatgtattagtttctgtggctactgtaacaaagtactacatacttggaggtttacagcaacaggtatttattctcacagtcctggaggccagaagtctaagacagtttgcgtgggtcaaaatcaaggtgtcttacagggccttgtcccctgcagaggccctaggggagaatccactccctgtctcttccagcttctgataactgttggcattccttgtgacttgaagtcacatccctccaataggcctccttggcacactgccttcttctcttcattctttgtgttgaatcttcctcttcttcccgatacaaccacataaatgattgcatttagggtccacccaataagccaggataatctcccatctcaaaatcctcgactgaattacatctgcaaggcagcattcacaggttccagggattaggatgtggatatcttttaggagatcattttcagtttaccatgcgctatgtgcttcacagggccttgtatcagggagatccttcatatctacctgtcccattctttttattaaagtaggctccatgcccagtgtggagattgaactcacaaccctgagatcaagagtcatgtgctccactgactgagccacccaggtgcccctattactactttttttttttctattactactttttaaaagtaaattctaggcccaacatgggacttgaactcctgatcaaaaagatcaggtgtcacatgctctaccactgagctagccaggtgcccctaattatgtataatttaaagaagactaataggggtgcctgggtgcctcagtcagttgggcagctacctttggcccgggtcatggtcctggggtcctgggattgagccctgcatcaggcttcctgctaaatgtcagcctgcttctccctctccaccacttgtactctctcgtgtgctctcgctctctctctctctctcaaataaataaattaaaaaaaaaaaataaagaagactaataacatgtacttactgctgagcttaagatcttgatatcactaaacttgtggcgggcagatttgacagccgcaaaggatatgatttctggtcccaatctcacaggagtgtcaacttctgttaggacttttccagatgggatgcctgggtggctcagtgggtttagcacctgccttcagcccagagcgtgatcctagggtcccaggaccaagttccacatcgggcttcctgcagggagtctgcttctccctctgcctgtgtctctgcctctctctctctctctgtgtgactatcataaagaaataaaaaatttaaaaaaattatataaaaaaaagacttttccagagacacttccctttaccttgatccagaacaaagtcggaggccagttgaagacatggccttttgtttacaaaaggaggtagccagcttgtgagctgcagcttgccaatttgatttttagaaatattacattcaaacattatttgattcctgagttttttagtggtaaattatgcacccaaagtgcagtcttgcattgtgagggtaaggaaaggggacaggaagaactttcttgtttaatcttcagcccttttcaggcctctggctttatatcctgatgacagatctgagatgcactgaaaccctgatttcagcactaagcatgggctgatatccccagggcaagcagggcctccaacccacttgattttctggattcttgctttctgttattcatggtttttgaagatttctcctgcttttctgccagctaagccttacactgaaaatgtgttcttaagaatattctacccagagtattaggaaaggggccacctgggttgctcaggggttgagcgtctgcctttggctcaggtcatgatcccagggtgctgggatcgagtcccaacaccggggaacctgcttctccctctgcctatgtttctgcctctgtctgtgtgtctctcatgaataaatgaataaaatatttttttaaaaagaatattataaaagggaaatgtactctttcattgtaatttgggtcaggtttgtttgctcaaaaagaagcgcaagcttttgtcttagatcttctctcctaaactttctttgggcagaattgattgacctcctcctgctccttcttggtagcaacttctggttgtgaggactgactagtgaaaaagggtacctggtggctgatatttgcttctcaatttctatgatcttttcctttttttttttttttaagattttatttatttattcatgagagagagagagggagagagagagaggcagacacacaggcagagggagaagcaggccccatgcagggagccaaacatgggacttgatcccgggtctccaagatcacgttctgggctgcaggtggcgccaaaccgctgagtcacccaggctgccccttacgatcttttcccaccctttaaggtggacagggagagctgagtcggttcaattcagaaccaagggactggggagggactgggtggatgaaggggaggggcctgtgctaggggccccggctgcgtgctagaatgtggctgcttgccctggaggctctcaatgggctgccggctctgtgccatttgtacaggaaaacattataccttcttctcacagcttccagacaaacttccaactcctcctttatattaaaagggaccccctgtatccatctaggtcctcaccttgagagccgctggcctagcttcttacccatcctggatttgtcttgcctcctggatgaggcacccactatgtgccagctgttgtggtgggcattcagggtgctggggtaaatgggaggcactggtttctttaaacatgaattctttctactgaaagtttctcttttgagatcttttctacactgttgcgaagtcaattcttcctaagtctaggctaaatgtctaagacagtttcccaaagtgcagtccaaagaccccagcatcattcagcctctccagcagttcccattaaagtgtaaagtcccttggggcacctgcgtggctccattggttggatggttcagcagccaactcttggtttcctctcaagtcatgatctagggttgtgagactaagcagccatcaggctcctcacccagaggagagtctgctggaggttctctctccctccctccccctctcaccccactagggtttatctttttctctctcccaaatcagtcaatctgtaaaatacaaagtctcagactgaatctgcaggtctgggatggggtccagggctctgccccacgccctcctggggaggatcctctcagctgagggtttgtggctaagaagaaacaagatcagggatccctggatattagatgataccaggcagcggtttggcgcctgcctttggcccagggcacgatcctggagacccgggatcgaatcccacattgggcttccagtgcatggagcctgcttctccctctgcctgtgtctctgcctctctctctctctctgtgactatcataaaaaaaaaaaaaaaaaagaaacaagatcactcttcacaagccttctgccacctctgacacagtagctcatgagtcagacattcatggtataatttcctcttttctccagtattgcattttttaaaagatttatttatttattcatgagagacacacacacagagagaaaaagaggcagagacacaggcagaggtagaagcaggctccatgcaaggagctggatgtgggacttgatcccgggattcctggatcatgccctgagccaaaggcaggcacttaaccgctgagtcatccaggcatccccggtattgtattttcttatgtatgtgtgtgtgtgtgtgtctgtgtgtatgttccacattgggcttgaacccatgaccctgaggtcaagacctgagctaaaatgaagagtcagagtcctatctgactgagcccacccaggcgacccttcctccagtattcctaatgacactgttagcaagatgtgcaatttttagtggtatttgacagatgtcctgggtctgcagacgccacccgctccattcctcctgcctcatacctatttcatgatctccattagaaaatcaggcacacacacccccaaccccactgcctgggtttctttcttttttaaaaatattttatttatttattcatgagagacacacacagagagagagaggcagagacataggcagagggagaagcaggctccatgcaccgggagcccgatgcgggactcgatcccgggaccccaagaccacgcccggggcctaaggcaggtgctaaaccactgagccacccaggaatccccctgggtttctttctttcctcagatgtccccttgcctcctgctggccagattcttcctctgcaagggtcccctgcatcgttgggaacagtgtgctttactggccaaggtagagtagtgcatcaaccagtttagtcttagtacaggtaggtatgaggtggcaaattaagcatttaccctgccttttcctacaaaccacactttggagtaactcaaaagctctgatgagggaaagctctttttttactgaagaattccaggtaacaaatgggatagaaataatagaatttaaaaatcaatattttacaactgcttaaagtaactgattcggacaaaacccatctgtgtgtgggtgaaaccgtcagctggaaggttgatggaggtaccttacaaaggaacggtcaggctatggccacctgaacccactgttcactctcagctttactcagagagggaccagcagacaggaattgccccctgggttgggggagcccacagcagaaagcacatactatctgggaaggaatcttatcctcctgttgcccccccacacacacacactgcctccaaatggaatttcaggtttgataactggaaatgcaaaggatggaggaagaagatgcccctatttctgcatagatggtatcaagaaacagaaagagaggaagtgagactgtggatttacctagacataagaaacatcatcaagggatccctgggtggcgcagcggtttggcgcctgcctttggcccagggcatgatcctggagacccaggatcgaatcccacatcgggctcccggtacacgaagcctgcttctccctctgcctgtgtctctgcctctctctctctctctctctgtgactatcataaaacaaaaaacaaaaaaaaaaaaaaccaaaaaaaaaaaaaacagcatcaaaatgtaatgtaggttttctttggatcctgatttgaacaaaacaactataaggggcagcccaggtggctcagcggtttagtgctgcctttagcccagggtgtgatcttgaagaccctggatcgagtcccacatcgggcttcctgcatggagcctccttctccctctgcctgtgtctgtgctcccccccgccccgtgtctctcatgaataaataaataaaatattaaaaaaaaaaaacaactataagcaagatattgagacatttgatgaaattttcccattgactggatattagatgataccagagttgttaaatatttcgggtgggcaatagcattatggttataaaataaaatgttccattttaaagaacgagatgcatatttaagaatgtaggggtgaggcacgcctgggtggctcagcagttcagcacctgccttcagctcagggtgtgatcctggagtcctgggatcaagtcccacatcgggctccctgcgtggagcctgcttctccctctgcctgtgtctctgcctctctctgtgtctcatgaataaattaaatcttaaaaaaaaaaaaatctgagtatccagacattttaaaaaaaccaaaacaaaatatttcaaccaaggaaaggaaatgaaaaaatgaaaaaagaatcagaagaagcaaatattggacacgtggggtttcattaactattttctctacctttatgctttttaaaatgtctgtaagtgggatccctgggtggcgcagcggtttggcgcctgcctttggcccggggcgcgatcctggagacccgggatcgagtcccacatcgggctcctggcgcatggagcctgcttctccctctgcctgtgtctctgcctctctctctctctctgtaactatcataaataaataaaaattaaaaaaaaaaaaaaaaataaaatgtctgtaagtgaaaaaaattgaagtattacattattgatcacaaattctgaatcaaatataattgcaccatatcctcacatacagtgagattattccattttttctgacagaatgaattatcctaacatttcttagagaagcacgttaaaagtaaaataaacctctaactgtaagtggatatgggccttactcctcaatctttaccactcttaccacctcatctaggccttgtattttctttccaaacaggaaagctacggctttcccactcatctgtaggctgcccatcctcttcatagcatctgccttaggatagtgctatttgctcacatacgcttatttttctgccatgttggcctgggagaggcttcccatgtgcatttcacgcacctgcgccctgcatcacagaggactccatctcagcaatacaaaacagggcagatttttaaatatcccttggggctccccctgccactcattacatctatgaaattgaatctgtttttctgtgataaagaagagggtaaaagggaaaggaggattcaatttgctacatgagcaataaatgcaccagcttcttcctcaaaactcttccctggccacttaaaagtgcacacgcagaacagacacaaagatgcacattaacacaatcacacagactgtacaaatgctcctcctccttcattaaaaatgtttaagttacaaatatttcgatttataaatagtcaaggtgggtggtgcacctagttctttaccctgaatccaaatattgcccttccaggactttcaccaacccgctccatagctagtatcttaccctggagaggaagctcagccttctccaactccctgagttcacatttattcaattctacaggcctgcctagccctgcctaaacaaaggaccaatcatcaccccaggaaggcagaaggggtagggggccagagccagcaatgatgtgcagggaagcactctagagtgagggcaggacttcctgtgtgcaggaagccagagttgcagtcctaacagagtgaaagagaaactggctttgcaagaggctagagtctcaaggaagatggaactgtcttttagggatctctagcagatcctccatgggcccagggtcctgaggacaatgtccaggcctcccactttggtggcaggtgtacagctcagagtgtgccatagacactgactttggccagggaaatgctctctgtgtactggttccggcctttctcatacaggacgtagagctggggggcctggtccttccccccaacactgccctccagggcagccagtgaggagtagccactggggcctggccacagctggactgtctccttccgccacgaggtaccattactgaagctccagcgcagggtcaggttcactcctgcagagggtggagaattggggagggaggggttctggccaggccggctccagaccacagggcctcacgccccacccccaccctccccaccccccgacactcacggaattctgggtgggctggattggagaagaagacaaggccggagccggtggctacagccccagcagccaccacaggatctaccagctcagggtcaaaggtcacgtctcgaggccggatcgtgtcacaggcatcgtagctgcggaggacgattcggcagtggcagtggtagttgttctggttgcgggcgttgatgacgactgagccatctgggagctcatagggctaaggagagagaacaaggctttaggaggtcccagagagaggcagcgccaaggaccccgcccctgaggacgcaggctggacggcacagggtgggcagcccgatcctgggtccaggggtgcgatggcgcctggggggccgggcgcggggactgggttggggcggccctgggctcctgacctggcactcgtcagggttgaaatcgttctcccgcttgggctggccatacgggatgccgctgacgccgctaccataccgccaggaggcgccgtggtcatcactgaggaggcagaagaccccgtcccgctccagcgtcccatggccacacacgatgaggcggcccttccgcggatcgtgccgcttctggggggaaggaagctgggtgtcactgagggagatacagcaggggctcgtgagcagggcaggggagcctgtcacctcctaagtgtgagaacacatctggctcccttcagtcctgtcctggctgaagatcccacaaacccccactgcctaaatgaaggagcttattcatgaaagcgctccctaagcgcagaataagctccttcaggacatgcagggtattcactggataggctgtgcacaagacaaggggtccagccacatgggtgcatgggagcttagccaagctcaccaagctgtgccccttggcacgggcttgtgtctgctcagaggaaggggtgcctttttccagcctgcacgggtgccacaagaaacagcatggccctactgacaaccccccaatgggaaggcaagggcaacattccaccttcccttggcatcctcccaggatgtccctttcttccaagggatcccatctaagcaagaacctgacctcacaagaccttctccctgggaagaagtccaactaggggcatctcccagactctccaaaaggcagcctcctcctcccttcttaggacagagacctagagatccctgggtggtgcagcggtttagcgcctgcctttggcccagggcgcgatcctggagacccgggatcgaatcccatgtcgggctcccggtgcatggagcctgcttctccctctgcctatgtctctgcctctctttctctctctctctctgtgtgtgtgtgactatcataaataaacaaaaattaaaaaaaaaaaaaaaaaaaaaaaaaaaaggatagagacctgaatgccagagcctggtccaggggcaaacatctcagtgccgatatccaaggagagattccgaggtgggctccaggaaacaccatcatctttgctccacaccaacatggtggaggccacctggcagccagccttgtgagcacagagggaatagaaaaggaataccactcccgtctccatatcgctcaccactgccccaaggttcagcccatctggggtctccccatcatttacgatgaaggctgttggagaccacgtgctgcctgaagaaaaaaagagaagaaatccagggtgagtgctccaaaggtgccctgtataaccactctttgttaatttctacctcttgctagggacccaaggccttagagtggcctcaaggccctaccagacctgccccgcctgacctctctgaccttacctatgctgctctttctctctccattgtgtcccccagcctccttcccattcctcaaatacttctctcttggaggacctgcacaggcttgtgacatctgcctgctacattgttcctcagggttattctcacctccttgcctcaaaagtcatctatttaaagttgcagccaatctccagcaccctgttttgtttatctctgttatattgatcactttccaacacaaaaaccaaatttacctattatgtttactatctgtctccccacagacaatataagccccacaagggcagggagtttttggtctgccttattcacaactgtagtcacggaatcttgaactatatcatgttagtatataacaagtgttcaaaaaaaaaaaaagtattcaactcctaggtgatcacaatttctagattactttcctttttttttttttaataaagatttatttatttatttatgatagacatagagagaggcgcagagacacaggaggaaggagaagcaggctccatgccagaagcctgatgtgggactcgatcccgagactccaggatcgggccctaggccaaaggcaggcgctaaaccgctgagccacccagggatcccaattacttgcctccttaagtcccctctgcccctcaaggaccaggcctccagccctcccagtggttctataccatcctcagggcccgcgggcagatcaagctccccactcacacgacctaacaccagccactgccacccagttgtccttataccctcgtcagtggatctccggagagcgatgaacttggccccttcatccgacgtggacattttcctcgcctcggcgaaggcaaggagcgtaccccgaggagtggccgtaatgagcgggattcggaaggtgtgcacattaccgatctgcctgccgctcacccacagcagctgctccatggtgaccagcggctgcacctgccaacggaggaaggaaggagggtcagcggacgaacgaggccggagacttcgggctttaggaaaagtaagggtggttcggagtttccctgggaagggcaagatgcgggggctcagagcgggggtggggggcacccagaataaggaagggcaccggaggagagttggctgccaagctgggggctcggagcggggagagcgacgaggggaggaggcgcctctgggcggcgggggctggcggcccaccgacggggaaggagctccaacggagggggctcggctggcaggggctggcaggggctggcaggggcacgaaggccgggagaaggcggggttggcagtggacggagggcggggcccgggggcgggaggctccctcgggagaggggactcgggggacgctgtcccgggggtcctgcgcctgaacgacccgcgtgggccggggacggggacacatgcggggccactcaccagactgaagtcgttctttatccccgcgcccaacccggccagcggccacagcagcaggaaggtcgcggcgcgtgcccgaacccgccagccgccccagcaccccggcacccgcgggcccccgggtctgcccgggagcgcggcgccgggccgacccgccatcgccccctcctcggccgccgggaccgggcgcccacggcgagactggggctgcggcgcgtcagcggaccaggcccttggctcgcccgccccgccccgccccgctcgccccgccccgaggccgcccgcggccccacttccgcgacccggatgggccccgcacgctcagaccccgcacgtgatccttccgccctggagcggggccttccagttggttcctttcgaagccccgagcccaggccccagactggaagctgactgggtgggaccgagggccggcgccctgggatgttgtatggggcggggcctctcttaaagagccaggccgcggaaaagagctgcaagtcgtcgtggagaaaatcaaaggtctcggacttttgagaaaacaaaatatccacctttaataattttcttaaaactacgaaatcgaaatctagagggcggggtgcggctcggaggcggtgcaggaggggtgctgccctgggtcgggcgcgtctctcacttcttcctcttcttgtgccccgggagggcctcgttcttcttgcttaggatcttgagaagggttttggacatgtagtagggccggtccgccgagccgtcgttcctctccaggtcttccactgagccgcaacaggaccgttagagcggaccccggggagggggggagtcccgggagagtcggggaggccgggcaggccgcctggcacccactgggcgggctgcgcaacctcagtgtctcctcggtaaactgaggccagcatttcatagcgtgatagggcttaatggaaactgcatgccgaccgcctactgccgactgcggtgcatactaaaccctgcatgcgtgtagaactgacccttgagggacacagcgactaggggagctgacccccagcattcaacagtccgcctgttgcttttgatccctcccaaattaacacatattttgtgttattgtattcttacaataaaatgagctaaggaaaataaaatgttaagaaaatcctatggaaaagaaaatacgtgtgcaacattgtactatatttatcaaaaaaaaaaaaaaaaacccacataaattgaagtgtggggattaacccgggattgtccgaggtcatatgagggtgagacaatccccactcactacagccacctgctgggaaggctcttgtggctaacttgtaccttctattttctagggaaaggtcccagagggctttgcgctgaaatgctctttcttgggagatcctgccagtctggcacctcatttcctcctttcttctgtaaatccctggtttgaggatggcagaggaggcttcctctgactttggctcctttaactcccaaaaacccctaaacaatctggtaccttgaaatgtgggggaagtggtagggagttcactcacagaaacagaggaagagtgtgtccacacacatgccaaaaacactgaagaagccgctggcgatgacataggcccccaggatggagacctggaagacacagggcgccttagagttcctttctggggttggcttgtgaggcagagccggggagtcactcaccatgatgggcagccagtagtagttgagggcggggttttcaaagtgtctacccagcccctggatgcgaccggtgaaaaaaaaaaaggacaggacccctgtgggagaggcgtcaaggtcagtgtcaccactactctgtggtcacctcttccaatgccttgtgcctctgccctctgtccccgtaactcccagccctggcccttaccaacacctccaaccaccagcagcttcccgaagagcagcaacaagtctgtaactttatccagcacaaccaccctgtatgggaagtagaggtgggtcaggcatgaggggcctggcagggccaggaactggattggcgatatcagctgctgtgacagatgcaaaatgaaaatggttcacacttcaagatggaggcagcagagcaacaagccatgcttgaggcccttcagagcacagcatgcccatgaagctggccttgggggggcgatcaggggggtggaggatagcccaacctgacaatgttccgcatgagcagcatgaaggcatttttggcggagacacagaaattcttcccgtagacggcgatctgagtgaggttgaaaagtcagaattacctgtgtggagcttgccagggcaggggcctgggccagggaaccccagaacaaggggctgcttgtgcagtggggctcaccatgatgtaggcattgcggtttaggaacttgataaacttctccagacaccagaggcagcacttaaagcagcacatgatgcagcgggccatagggttctgggatcctgggagtaaagggggagcttatgtttggtcactggcccctgacagcccctccctgaggggccagctgctcacctctcagtttgttgtcaatgtactccagaatgactcgggccatctgcacgagggtcaggatgagagctccaaaggccagcgacccagtgtggtagctgcaggagggttggggggcggggggcgtgggcagagatggctccaggacccctgaggctcccaggctccccattcccagcccccttgccctgaccttaccggagtgtacggatgaaggcagagctcagggggaaggtggggatgtcctggggcttctggaaagcccagtagaaggaggcaaaggccccagccaggacacactggcccagggccagtacccagttgacagtccagaatagtgccaggaccacatagatttgcaagttgaagagagaacgctgaaccaggcccgtggatgagtagctctggaagatacacctcagccctgggcacgaggagttcactggctgggcctgggggtgacagagtaggctcactcccagccaactcctgccactcccggagtagagagagaatagcagccgcccccagctgaggaagccacttccttccaggagatccttctccgggttcgtgttgggttcatactgcctactgtgtgacagtgattagttttcctccaggctccaagtgggtacaagagctcccagtctacgcaggcccagccttaatggtgtggaggcaagtgtgaccagcccctagctctctccctggcactcagtcagcaatctcctctaaaacagcacctgcaacttcaaccaacatgctttctagcaaaaatgaatggactgggtatagatggtataaaggagttactcttaatcttgttgggtgtgataatggtagagtggttatgctttttgtttttttttcaaatttattttgttttatttttttggttatgcttcttttgtaagattttaaaatttattttattttttatttttaaagattttatttatttattcatgagagacacagagagaggcagagacacaggcagagggagaagcaggctccatgcagggagcccgatgtgggactcatccagggtctccaggatcacaccccgggctgcaggcggcgccaaactgctgcgccaccggggctgctcttaaaatttattttagagagggagagtgtgagcaggggcgggggcagagggagagggagaaacatgggacgcctgggtggctcagtggttgagcatctgccttcagcccagggtgtgattctggagttcagggaccgagtcccacatcgggctctgcatggagcccgcttctccctctacctgtgtctctgcctttctcaggaatgaatgaatgaatgaatgaatgaatctttaaaaaaaaaaaaaaggagaagcagactccccactgagcagggaacatgacacagggcttaatcccaccaccctgagatcatgacttgagctgaaatcaagagtcagatgcgtaaccacccaggggccctgaaaatacttatctgtcggggtgcccagctggctcaatcagtagagcatgtgactcttgatctcgggttgtgagtttgagtttcacactggggggtagagattacttaaaaaagaaaagtaaaaagtcattgtatgtccagactcaatctgatgtgtttacaggtggattggcacttatgtccagaatttgcctttaaggaaactccgaaaaaaagaattgtgggaacagagggggtgggtggagatggatgaaaacaaggatagtgtgtggggacatctgcctctggctcagttcaggatcccggggtcctgggatcagtccctcattggggtccccacggggagcctgcttccccctctgtctgtgtctctgcctctttctgtctctcgtgaataaataaattaaaaaaaaaaagaaaagaaaggaaaacaaggacagttggaaattgagggtttgtatgtgtttcaaaatctccataataaaaaataaaaaacacagaagtaaaaaaacaacccttcccagcaaatgtgacaaaaatcttgagaattgatgaaattgctgagtgtgtgtttgaaattttacaataagaatataaaccaccgtcccgctttgtaattgtgggtttgtgtcagtctctgctgctagatcctgagcaagctggaaggaagaaccaggtcatttggagctttgcatagctggtgcctggcacagggtgggtcctccctaaatgtaaaccagcctcccttgcctgtattagagtgcgaatgccctgagcaaagccgctggtccctgcctccagaagtggccgcatgaaggctctgagaacagcaaatgccctgcagtctggggccactttctgggaaccttgcaggggagagtgcggggaagcagcttctttctctgctcttcccccaggactcctgcctgcctattgcctcgggcactgcgttcgcagggaaaaagactttaaaaaaccaaacaacacccatctacagttatcagctcttatcaggtgccagacattgtacaaagcactttatgtgcctgatgtcgttcaatcttctcagccacccccagaggcaggtatgattgtctccattttacagatgaatggactgagactggaggctgcagtggctcatagtcctcctggcagaggcaagtccaggggagggtggaagtgctggtactgggctttcccagggccgcatgctgcctccagcctgtttccttctctgagtaacgggtggctgagtgggagcacaaccagctctggagtccctggctagctccctttctggttctgctgggggcctgttgtgtgaccttgagggaagtcctttttttctctggccctcagtctctgccgagcaattagggatttggaccagctggccctcaggtcaccccagccctactggtgccccctccatgtccatagcagttccctcaccatagggttgcatgatgtattcatttgcactttcccacagctgggcaagctggcgttgggcgcccagaggacgtattggggttgccccgatgtggccaggtacccagagggtagtcaaggaagaaggtatagtcacatggggtctccacaggtcccctcctcagggacatcttcccaggtacttgtacaggttgtttactgcacaaagtgttggaaatcagcctgggctcagtctttcaactctgtccagggacagggctgtgtctgcccagaggaaggggcactttctcccaattgcactacagcatcatactggcaaatattgccccttcccctaccccccatcccgccctcacccccgccccaggagggcttgccacgtgggcaaaggatacagggcggtcatggcccaatagacaatgcaaatgagcaggaggacaaaggtgaccagtgggtagaacagggtagacatcatgtgccccacagccctgtagggaggtaaaagcagtccatcgctatggccgcagtccctagcgcccacccaccttccagtgggcctgatcctggacaggtccctgcctctgtccttgccagggcctgctctgccccccaggctgggtgcacagtaggtcctcattgaacaaaatggaatggactgaatggaataaatcaggctcaagaatcagagaagccacctggggcagcctcagggcttcagggcaagtaagagaatagagtccttaaagtatgatcttttgacagatttggcaggtaggtcctggttgtgaataagctgctgcttctcctccttgcctgggttcctgctctgcaccaccaccaccaccaccacaacgctgctcctgatggaggggctgcttcatgttctgggaacccaagacactaactcatttaatcctctacaaagtaagaactattgcccccacttcacagacgggtaagctgagtcacagccgtgttaaccgcagcgtctttctgcccttccccttcagggccaccggccaccttcccagcactgccacgccatgcctctgcccctgtcctctgccccatctccctcccggacaggttctgacttgctggcctcctccaggagggcaatggcgatgcgaatccgctgccgcaggaagatgagcatcagcagcaggatgccttcgagcacggccagcacgatcactgagagtggacaggcggcagagaggcctgcgtcaggccggggcccagcgcggccccaggcggccctcgggtggttggtggtgaggggccgggcggggcactcacgggccgccagccaggtctcctgaacgttgcggtaggcgctgaggttggtggtgatgcccagctgggtgatggaggcaccctcatcccgcagcactcggtactcctcccagcagtggtagatgccatatgccagcacgcccagcaccccgaggatcagcactagcaccaggggcccggccaccaggcgcagaagcaggataaacagcaggctcaagaccagagccacacctagggcactgcaggcagggtggggtaggtgaggccctcccccctaaatcttatccctttcagaagctcccaaatgcctcacactctcaatatcctcaggttagactccctttttcttataaatctcgttgggtttggggtcagttctgagctctggctccttctctgtccaagtctctgtttcagatgttgggctaggagacagaggattggggagggcagcagggaaggagggagtaggagaatcggtgactcacgtgagaatccaataccaggattgggcaaaatcttcaaagatcttaacactgatgtctcgggcgttgaggatgtcaaaaagaccactgttggagagggacagagtcgggtggggctgctgccggggaagggtgtgggacggagatgcggggacaggaggatgcccacctgatcccctgggagatggaggtgttgctggagatccctgggagttcaggtggagtgctattcaagaacggaacacaacgccccagagctggagggagagaaccagcgggctcctgggtgggagggcccagagttttaccttcaaggcctctggcctccacccagagccccagtgggccttagggaagggaggagagagatgggctttgacctccccacagagagctgctcctgactgcacagccaagagggcgctcctgccccacacagccctgtccagcttccttcactgtctctcaggacccctcttcctccagtccttgctgcttccgggttgagaccctcatttcctctggcctgactcttacactccacccttaacccaccattataacccaccactctcgagaaccagggagactatgcttcatcattctaaggctctacatcattctgcagctcagacacttccagaagctctgctctggagtgcccgtgctccctggccagttcaaagcccctgcattggggctcagcccactttcccctcacctctatacctctgctctctggcgaccttctcactgagcgttctctgtcaaaaagtcccatccattactcccagttgagctccatctccatgtcctgtcctccaagaagccttctcacccctttcccatcttctaaggcacctattatgtgcctaaagagccatttatctccaccctcccaatgactttactaagcaggctggctttggcatttacattctaaaggtgaggaaaaaaggctcagagaggttgagttattggtccaagaccacaggattggaaagtgctggaatctagatctgggtttggagcattcgtttgagctactttgtattgtacttatatcgaaaatcgggtattgtttctcatgctataattaaaattttcttctattaaaaaataactttgactattggaaagaagaacatataggaaaaattgaaaagtcaattatgatcccaatcacccagccacgtttgcttgtgagtagggatggacatctagtctgttcccagtgcacagacattaacgtgtgtgggtatattttcccaggtgtgtttccctgaaacactcatgcaatgtctttgccaacatctctgatctctgcccctaaaatgtagctcaaacaggaagcagcatctgccctgcgtctctcctgggtgcctggtgcccagcacgtgcgcgataaacagagcatctgactacaggatcaggctgcggagagtgaaatgaagaccgagtgctaattccagtcctgccagacaagctgtatggctttactctttctgggcctggtttcttcatttgagcaataagaaaataggactagatgctgcccgaggagagaatgcagcttctcacctggagtggaagggaggaggaaaccggggcagagctcctgctgcagactctggatcactggctgggagccggggaggacacgtagacacagagcaggatgaaggagggagcccccacaacaccagtaccatagtccccttcccccacccatgtgactcctccttgaccacagcaatgacattacaggcagctctcaccatatcccagggcacccctggcagacaaaagttcctgtttgccgtgtagaagacctcccccaccttctctgagagctggttgacctccacggtccatgcgttctcggggcaggaggacacacacacctgggggcagagagcatgctgaggagctggggcctggaccctggggccatctgggtaaaggcaggtcccagggtctgacctggggtgtgggacactgcaggccattctcagcgactgtgatgacattggcggttaggacgcagctgaagatgttgaagtagagaagatatggtttatctctgcgggagggaaggaagtgtgggtctcaggtcctcgtcaggtgcgaggagaggggaggactgccagggcccagcggagggtggtggggggcccacaccctgatgcacactgctcagcaactggccttaagaagctcaggtcagctggggagatacaggaagcaccggaaaattttctagagtaattgagcatcggaactgctaacaaatgttaagaattttatgaccttgagcaagtcacttcactgcccactgcctcaattccatcaggtgtaaggcaatagtacctacttcacagggcttgaatgagcttgtgtgtgcaaagtacaccatctgcctggaacgtagtaaaccctgcataattgttaaggttttattatttactggaagcgtcctgcatgcggaactgatggcatggcttcggggatcaccccggtgtttcaggtgaagaaatcaaagctcagactggttgaccaccttgcccaaagccatgcgaccagaacctactgagcccagctggggactcaaatgccaaattctgaactttaaaacctatgcacttaaccatggttctgtctcccattactgggacactcaaaagccaactggccaggaatggaggctcttcaatgtggcttagagtggtgagactcagagaggatagtggcaggtgagcaacagaggaaggagctggagcctgagtgccgggatcgtgttctctgcccgctgtccacctcacctctcgtctgcccctctccctgccttcatactcacttgttggctcccaccccacagtaggccccagtagagttcctggggtagaggacttgccgggggtctccatacacccaagctggaagcagacacagagatgaatcaccagagggccggacttcggggtgaggtggtggggagcagcctcagggatggctcctgccctggttcctgcccccagccactgcccccatgctgctccgctgctggaaactcacccacgatccccaccacgatgtaacccagaatgaagagaaggaagaggacacagcagatgacatctgtgcagctcctgggagagaagcgggggaagcctttggagggggaggcagggcatgtggcctagaggtatcacaagttggagtttgggggatgctggagaatgggcctcagtaggttttattttatttttctaagaaaatctttttctcacaatgcaccaggaaataaatacaagtgattgtttccatgtgtcctcaggaaggagagggcaccaaaataaccccaaaaaacaaaaaaaaaccacaccaaaataaccattttttgggtgacagaaatacttctgaagtatgacacagagaagtgaacacctcataagtgcctggctggatgaatttgcccaaagagcacacgcccaggtcaagaaacagaacatcccagcaccccagaagcccccttgtgcccgctccagactcaaacattcacccatgggcatcattctcctggggcaggagttctcttttttatgaccttcttaccaatatttcagtaaaatacaaagcaaaatcaagatcccccaccccctaattggaggcagtgcccagaacttacctgttcctgatgggacctcgaaaggaggggtcatatttggccggtttccctgagaggtacgggcaggagtatggagagtgaggccctgagcagatggctccccatctcctgtccctcctgcatctgcatcctgccctgaagcgggatcctaccggggcccaggatgcccctgtccctccagagttcaaggtgggaggaggtggggagatggactggggtagggctgacaggagaattggagagtaggagacagaggtgggattagggcctggtcagcagcttgactgctcaccacgaattctaccaagttggctttggaaggagggggaaggggggtcttttcaggttgattccagctcctatcttgaggctggcagccagggatatagccttcacctcctgctcacttcctgccccatttgtcctgtgtctccctcccctgcgatgtgggactctgagtcaagccacctctggctcttacgccccaatccttatccctctccgctccctgtactccaaccagggtgggcgcagatccacagcagcacctgagggaggtcacagcccctccccacagctgccccagccctacctccgccctctggcccaaggccatggggaaagagcctggagcccaaggcattaactcctacaaggagggcccctattttcctgctccccacctcatctctgctaaaggggaccccaggctactgccagtctctgggtgagcagtcagggtgatacctaagcctggctgttgagactgtgggcggtttcgattgtggccatgtcctgttcctggtcctccctgagtacacacggggaggaggtggggcctgcagctagggtcccctgttggcaccgaggagaggagcggggacagagggctgggcaagagtgtgggaaggggtgggattcattttctttaggtgttctggactctgtccctccatggctctcagacgtgagatcaatgattgacccaaagctgttccaggaagtctactggggagtctttctggctccttcccctgacctgcttgggcccgacttctgcctctgagaggcccctccctcttgagattccctcccacgcagacctggggctcagacccccaagccccaagggaccctcactgttcatggggattccagaggctgccgctccagttccttctcctctagaccccccacccctaatcttcagggtctctgggacaggctcctggccctggtttctcacagagtgcagataggctccctgttcctgctcccctcaggccttacccttcacgaaccccttgtgaagtccctacccctgtctctcacgatatcctgagaaggcccccctcctaacagagaccccagaggcaggccccggtcccctctccactgaaacctccagcctaacacctcacaggaacccccagacacaccccactcctgccattactgctcacacagaccctggcaggccaacttctagcaccttttcccttcagagacccagggtctaaggctgaaaccccacctcctgacaggggcccagaccccagcctcgcccctcaccggctctgcagcacgtagaccctcccagtccccgagccccatcttcctgttcaggacactgaccctgccttttgccattcaggctttgctttccagggccctgccctgagggacccagattccagccccaactcctcacaagaccccagcctcactccccaaaagctcccaggtgaaggacctcagctcctgaaccccatcttcctcccaggactctgactctacttccttccatgagctctttccagaccctcccttcagggatccaggacttccctcagcttctctccctggggccagccccaaccatcattcccccagagctggcccaggctggccgcccctgctcccatcctgggcctcacaccacagcctcaccctcagactcaccataggcctcattcctgtcctgttttccccccatggttcggtctcccgagtgctcggagccagggagacctaacgactcacctgctgcccgccccgccctcccacacgtcacagccccacctccgcctgtggtcctgacacactagttcctcctgcacgcagagcctgggcagtgccctggagaggactggaaggccaagcccgtgaccggctcagggctgcttgcagcggggttccatgggccacaacacactctaaggaaatccttcaggtttttgcaaattactctagctgtggtacactcacacctatgctctcctcccaaagatccagtgttgattgaggttggccttttagccatcaactggaccctgaccaccctggtctccccaccttctccctcaggtggctgtccacaccagccacacctgcccagcatgcttcctgtcctgtttgctgctgtggacccacattccctctagctgtgggcctcctttctgcccagcccctattgccctcccaacaatcatcaagacagtttattaccaaacccagtatttattgagaataaaggaaaccagctggcatagaggcccaatttcaattcatcaaacgtcagctgaggagggggaacagggagtggccagccctgaagtcaccctaccagggaggagccagctctgggagagaggggctgtcagacctccagggcctggctgggtcttggcagaggaatgtgtgaagggggaggggtgagctgatggcagcaccctgcaatgtgggctctggagcagcatgtggcaggagagctgctgtgcaggtggtcgtctagggctggggcgtgtgtgtgtgcgtgtgtgtgtgtggtccattgtcaggggttgacggggggcagcgcactgagctctggcagcaggtcggggtggggatccaggcgggccaggcggctctgttccagggcgatggcctcggccgagtgcttgcacttctctgagccgcactgacatgtgaaatacttgctcttgatgtcccagaagcggtcaccgtagtcgaagctgttggaggggcatgggacgctgtggggtgcagggccggcagcacaggcccgtccagagcacccaccccatctcctcccgacaggctctaggacctgcagtactggccctgccggtggccttgttacacgtgcaggagcttagctctggctcaggattccgtttgcactgtctgggaggctctgcccttatccacgcctagaagccagaccctctccagccttgggcttcgggccccaagtggcctgcctctctcaccacacccccacacacagcatggacacctcaccccagctcctccccagtccggatgtctcgggagctgaagaaggcaatgcgtggaaagcgcaagtcttggtgaagcatgaagacccggacggggatgatgttggggtcacacaggtggttgatgaagcggctgatgttgccatagtaacgggcatcgatgcagtacacctctccatcctgaggggagggcggcactcttcatactcgccactgccctgcctgcctggccagctgccccacccacggaccacccaggccctcctccccaggcttctgtctgcccactgggtgtgaaggacagaggaatttcttgcccaccttgttgtctaagtcgaagaggtaagaatcatcctctctcacatcagcctcagcatcagagattagctccccgacatacctatgggcaggaagggcgttccgaaggtagcannnnnnnnnnnnnnnnnnnnnnnnnnnnnnnnnnnnnnnnnnnnnnnnnnnnnnnnnnnnnnnnnnnnnnnnnnnnnnnnnnnnnnnnnnnnnnnnnnnnnnnnnnnnnnnnnnnnnnnnnnnnnnnnnnnnnnnnnnnnnnnnnnnnnnnnnnnnnnnnnnnnnnnnnnnnnnnnnnnnnnnnnnnnnnnnnnnnnnaattcccccccccccccccccccagagtgagaagcaggaggaacagggacacagcacgggaggggacaacgcagagtgtactcctgtcagctatggtctccacggacagctgcaccaacaggcaggaccagcgaatgtgggggaagctgggggccagtaggccagggatgagctggagaagcagccagggaaaggtaaagggaagggccagagctgcgccagaggaagatcagtgagcccctgtggctcagtatctgtgggcatgtggtgtgggtggggaaatccatgtgagtttaatccctggcaggtctgtggactaggaaccacccagcaggtggtagcgatgccaggcgacaggacaggagaggtgtcagggctgcgggaagggatggagccatgggggccatgagaaatgccaggaaggagctggggacagggacacccacacttagaaagcagaggaaaagaagccggtgaagaagagggatgcatgggactgacgtgaggacagcgtcgtgggagccaaagcgaggaccaagatgcagggcaaggcacgggtagttgggaggcagcactggcaggagggtgagggcagaggcagattctggcaaggatgagcagtgagtgggtggtggggagcctgaggcccaggaggaaggggccatttgaacaaagttgagagatggtccaataaagagatggaggccccttaaataggcaaatggggctgaaggggggcctagatgaagactgagccgtggaggaggagccaggtgacggacggggtgacagatgctgggaaaagaaagaattgctggacagaagcaaggcccgtacagaggtggacagaaaggccgcatcattacctccattttggagacaaaaaaaaaaaaaaaaatgaagctcaagcaggctaagaacttggccaaggattcccagtggcagagcacagctcaaacctgggtctgtaggtctccaggcttggaaaggcagggcaggggaggggagatgttgcagtggtggcaggaggctatcaggctctgcggtctgtgtgggctgggggcaggtgcagtgaaggggcaggcccaccagggaggagagccaagggagacctgggagtcagctgtggctaggcaccgaccccctgacccctactcactcgcagatgaaggtcccctgggggatggtctgcagggcgcggaccccccagcccatcttggctgttcggtagagctgcagtcgcactctgggggtggggagggagggtggtgttaggtggagggacctggaaagcccccatttgaggggcacaggggtgggggggtgagggcaggctgcaggaggggtcctcacttgatgccgctctgcaccacccggttcttgcagtttctccagcaggagcaagcctgattacactcgaaaatcagtgggggctcaatcttgttaaattcctggagcagccgcccgtcctggggttgagggtggggagagtaagtggtttctatctggtgcccacctcgactgccaaggaacccccagaaaaatccaccacggatcccaacccaccagagagggaggacaggctggggaggccacacatgtggagctcagacaacaggaaccccatcaagcccttaatttgcatgcagctggcacaggcccatctccccctagcaccctccccccaacccctgctttgccctgccctcttttcatgagggaggaagagagggacaggcggcttggatggggcaagcacacgcaccttgtcataccagcagcggatgctcagctggccacagaggcagttggagctggagcagtcgtccacacaggtgcagtgctggcgcaggaggcagggggttagcccgatcctcagaagcagccctatccccacagtgctccctgacccctaaccactgtcctttctctaagatcactgctttagaacagtgggggctgatggtcccaggatgagggggattcaaaatgctaattacaggggtacccagggccaacatgagcccgtagaccttcatgtgtcctaaagaaaggacccctctcccaagtggatgcaggcccacccccaaggtcccttccagccccactcccctggccaggtggctcgttggcccacaacttgcccagctgtgcttggcagctcacttgcaagtgggtgatgttacggtcgatgttcatggtggatgtctcgcagttctctgagatgtacttgtagtcctcagggcagggttccccgtccacaccgttgacacaggggatgggcacgttctcatagccccgagccacatccctgacacaaggggaatgggggctggggtgagggggtccacaaggtgcaaggagaggcctgagaggtccctggggccgtgggaggaagggggtggttctgggggctcaccggggtggggggagtaaggtggtcaaataaactagaggacagcccacgaaaactggatttcagataaatagtttttttgtttttttttttttttaccatagataagtccccagtgccatgtgggatgctcttaacactaaaaaaacatgcactggtcatctgaaatcctcctttaacgctcttttaatttactgtatctgacatcctagttaggggttggctctggggattcaggggagcctggggagggggcagagggctcaccgacagataatcttctcagtgcggatggcccggttccccactccaagccgaagcttgcgattgagctgcagcgcaaaccacacatcggagcgctcgggggtcaggtcccacgctgtgtccccctccttgttccgcagctccgggttcgccccacgtgacaggaacaacctgggaggggacgggaagcccgtggggcctggggccaccagccgagccggcggcagggtgtcagggtgcggggcaggcaggggctcacagcacacagtcgtggtagctctcccgtgctgcgatgtgcaggggcgtgtccccatggtagttgacggcgtggaggtcgcagcgggcgttgaggaggacctcagcgatggccgcgctcccagtgaaggaagcccagtgcaggcagatgttttcctcctgtgtgggtgggaggggtgagggtgggtctaagccgtgggcgcctgaacccagtctcctctctgctcagaccccatctcccctacccccaccagactctcacattgtccgtgagcgtgacgtcagcaccccgtgtcagcagcatgcggatcacttcgatgtgcttgtgctctgcggcccagataatgggcgtccagcccccactgtcctgtgggtcgggagagagggaggagggtgaggggctgccgtcccctgcccggggccacccagcagctggcctagcttacccaagcagtgcgtggtctagagcacaggccctagagctggactcggaacaggggtctctgctccacccctcatgtgttacaggaccctggctaagtctctgaacgtctctaggtctcagcttcttgatctaccccatgtgactaatagcgtctactgctcaaagttgtggagtaatttttctctttccaaaaagcacatattttttaggtctttccactcgaaagtcctaggatatggtaacccaatagcaataaccactgctgaggacacagaccacgtctctaaaaaacatttcctgtttaaaggaaccagagtcccttagagaaatggtagatcaagtctggggcaggaaatgtactaagaggtaaggatgctcttagaagttgctgggtgggaccaaaagccacaggagccaggctcatggggttcctcctggacaaaccacaggacagttcaaagactgaaaaatgacagtaatgggctaaaacagacccaacatatgacacactaagaggtaataagaagcatcgccacacattcctagagattaaggcagcaactgatcattccaaaaacatagaaagaagcaaacaagaaaaaagtggaaaaaaaaatacaaatgaagaaaaggcaagaaatagggacagactggaacagagtgatggaagtgttggagatcagcgggggctgacaggaggcacaaaggccagggctgagccaggggcccggaggaaattggctgggcagccagccaggccactcacctgggcgttgacgtccacctgtcctgtgctgagcagcaggctgaccatctccaagttcccgattttggctgcatggtggaggcaggtggagccatcttcctcctgagggagatgtgggcagatgagtcccttgctggcacctcaaaccctgtttctgacccgaggtcccagctggcccggtcaccacaccttgctgtagacacagccgccacgctgcaccatgtagcgagctacctccaagtggttgttcactacagcctccattagcggggtccgctgctgcttgtctactgcattgatgttggctccagcctgtaaggagggggcatgtgggctggcatcacagaagggctgggcaagagagggggcgcaagggcctggtccacgagacagagggcctggtccgagctgacctgcagtagcacgtgacagatctcaacagagcccttctgggcggccgcgtgcaggggcgtgcgcttgctctgctgatcgctctggaagttggggtccaggttgtccactgtggggagagcccgccataccggaagaaggagggacaagtggtaagtgactaaggggcaggtaggacctcctctaggaaggctatgtggggtggggggccctctgggcaacgcagttaacctctctgggcttccactggcagggctggtgtgagtggatgtgtataaacacagcacctacgtgtttgtcgtcaccactgtccccatcatcctgggttatctgtgagtatgtctccccctccacgctccgtgtttcggggcaaggatgatgaccttcactgttgtacccccagccctgggcccggggtctggcatgtatggtctggtgttccatcaaggtctgcagaatgaatgaatgaatgagtggaatactcacacagcatcaggatcaccttctgtagctccccctgtttcactgacaggtacagctgtcgggggtggaaacggagtttcttccgcctgccatggtgagggagaggggtaggtgtctcagaaagggaacccacctttcagccccagccctcatcgccatgcctgagagccacccctcattcacctctctgactcctggatgaccagggccttctccagggcctcgcggcctggacccggtggcagccccacggctgagaggcagcccccattgggaagggtcagggagggccctgagctgtcgatggtgtcggccagagggtcgcagggtgggcgccggggctccccatgccctcgcatccgggcactgtgggagaaggtgctgatgtgtaccagcagtggtgttgggcagggaacagatagttgggaatgggaaggccagtacctgggctgggaagtgtctgctctcccaggggcatcctgagccaggggtgggggggcaggggctgcagtgccagctggtggggtcaccccatccccccgggggatggtcacctcctgggcctcagatgcatcctccccacagtggggacagaagaccatgccattcagctgggacacacaggccttgtggaagcggtgggccacacggaagtcagggtggcactccaggaacgtgccctggaagacaaggcattcaggctccgggagacccctcccccacggggcacgcagcctgtccgccccactggttactcactgctgtacagaagtagccacagccggggcagcagtggtgtttgaccatgcgggcacggtgggtctcacagagcaccatcagtgccacgcggcttgatggcctcatcgtctcccgtttgaggatggcagcattgcagcccgacagctgtggcagtgtgaacgggcaggaagagggtgaggctggggcctggggctgggtcccccccactgccggcacctctcctatcagctcacaggcccacctctccatccacactctctgtggccatgcacttgtgcccagctctctcgctgatgcggtcaatcttgggagcctccatgcggcagctgcagaggggcaactcctcaaacccccgttccgtctctagtgaagacgtgtcattggatatcccttggacggagggaaaagggcgctgagcgaggccatccccatcacccatggggacccctggtggggcctctcacccccgccctgcttttccctcatgctctagaacccctaaagcctggccatggaaggacagacacctgggctccagtgggatcctcctcctcctcccggtaccccccagcccagaggctgccccctagtggctcgccatcccagcaattggcaattaccagcgtggttgggggagagggtcccctcgctgggcagctccagggaccccagagggacctccatgtactcactagggcctgaggagcccacaccattcactcctgacatagagacagagagagtgagagcacgagctcataggtgcctggacacgtgggtacatgcgtgagtacatgcgtgagcgtgtgtttgtgcacgctctctgggggctgggagaggggctggaggagcagacccagaagctgaggagcctcctcacctcgtggctccttggcccggggaggctcgcgcttccgccgtttcctagacggctttacccatgggctgtccttccgccacttcttcttggctttgcgccggccactggagccactctgggatggaggaagagttagagagcctgggccccagcccacgacctctcctcccctctgaggactcagacctctggccccaatcccagagtcccccctgctccacaggatgcccgctgcgagcccttacccggtcagactgattgcctgattcctcatcttcttcttcttcttcttcctcttcctcttcctcctcctcttcttcttcctcctcctcctcttcctcttcttcctcactcagttgttcagccaaagcttcaacctcagactgggagagaggcaaggcagggctggggagacagcaacctccagcccatagccctctcttgcaggtaacttgagaaagagacagggagggacttatccaaccccaaagactaaggcagtgaagctggagaaagagctactactactgtcccaggatggctccctggaggtgagcatggatgggaaaaggaagtgagctgaatgttagacagctgtgaagaactcacaacaatgtgtgtgaatcttgggaacatattaagcaaaaaaaaaaaaaaagttcagaaaacaagcacatagtttaagtcttgaagttcacatgtaagcaaaactacccatggccactccaaacactagatggaaacctaatgataaactttataacgaggatgaggttgacatcccataaattcttttttaatattttatttatttattcatgagagacacagagagagaggcagagacataggcagaaagagaagcaggctccatgcagggagcccgatgtgggactcgatcccgggactccaggatcacaccctgagccaaaggcagacgctcaaccgctgagccacccaggcgtcccgacatcccataaattcactgaccaatctcaaacatgactaataaaaagacaagatgtcctgtgcctcccgatatgacacaacaggaagtatgcacaccagctatcaaatcctctcaccattaaaaaaaataaaaaccccaaatcacccgaagccgatcatgcttctagatctagtttacatgaaatatcgggcagagaggacatttagtcctcacccaatcagtgaattcctaaacatgaggaattctgtatcacaagtgacctggtttcttcaacagataaatggcaaaaaaaactttttcaaaaccaagggcatccatatccagagagacctaaggcaaatgtcaatcaaacgaatatatggagcccatctgacaaacagtggcacctgggtggtttagcggttgagcggctgccttcggctcagggcatgatcctggatctggggatggagtcccgcatggggctccctgcatggagcctgcttctccctccgcctgtgtctctgcctctctctctgtgtctctcatgaatatataaataaaatcttagaaaagaaaatctgacaaacaaaaacctgtttacgaaaccaccaaggcatattatgaaccctagtagcaaggtgatggtgttagggagtcactggtagtcaccgggagtcacatttttcagattgcgaacagtgaagcagtgatatcaaagcataggaagaggtctcacatttaaagatacaaatggaaacatctccagataaaatgatgtgatggctactttaaaacagtcagggaggtgggccggttggtggaggaagagctgaatcaagagccactgtgtcctgaaaattgtgggagcagggtgaggctccatgagggctcaccatttactcttttgtgcatatctgaaattttccctgacacgttaaacaaagtgcacgtcaggaagaccgcattatgtcacataggtaaaatacaacatatgagnnnnnnnnnnnnnnnnnnnnnnnnnnnnnnnnnnnnnnnnnnnnnnnnnnnnnnnnnnnnnnnnnnnnnnnnnnnnnnnnnnnnnnnnnnnnnnnnnnnnnnnnnnnnnnnnnnnnnnnnnnnnnnnnnnnnnnnnnnnnnnnnnnnnnnnnnnnnnnnnnnnnnnnnnnnnnnnnnnnnnnnnnnnnnnnnnnnnnnnnnnnnnnnnnnnnnnnnnnnnnnnnnnnnnnnnnnnnnnnnnnnnnnnnnnnnnnnnnnnnnnnnnnnnnnnnnnnnnnnnnnnnnnnnnnnnnnnnnnnnnnnnnnnnnnnnnnnnnnnnnnnnnnnnnnnnnnnnnnnnnnnnnnnnnnnnnnnnnnnnnnnnnnnnnnnnnnnnnnnnnnnnnnnnnnnnnnnnnnnnnnnnnnnnnnnnnnnnnnnnnnnnnnnnnnnnnnnnnnnnnnnnnnnnnnnnnnnnnnnnnnnnnnnnnnnnnnnnnnnnnnnnnnnnnnnnnnnnnnnnnnnnnnnnnnnnnnnnnnnnnnnnnnnnnnnnnnnnnnnnnnnnnnnnnnnnnnnnnnnnnnnnnnnnnnnnnnnnnnnnnnnnnnnnnnnnnnnnnnnnnnnnnnnnnnnnnnnnnnnnnnnnnnnnnnnnnnnnnnnnnnnnnnnnnnnnnnnnnnnnnnnnnnnnnnnnnnnnnnnnnnnnnnnnnnnnnnnnnnnnnnnnnnnnnnnnnnnnnnnnnnnnnnnnnnnnnnnnnnnnnnaattctcccactcctccagggaccctgggtcccctttctccatggtcatttctcctgaaccccgtgcagaacccaactcctccgactaggaaaagatcagaaaaatggaagctgctggtacttcccttcccaaccatttcccttgagggcaggatgcagccccccccaggtggagaggccttgtcttcagcctctctaggctcaccaggccacctccagagttcagcttcctccttttggccacatctggaaggagagagagaaaggaataaggctggttcttcgaccctccggacaagatttatcaggtggcaggtgggtggggtgtgggggtggcgctgacctgaggtcatcttccccagcgagtgcaagtcatcactcatgcggaaatgctgcacttcagggggccgcttctctgggacaggaggctagtggcagagagggagcacactttagggtcagggagcatttgcattcagtcaagggtgagccacaccctcaaaaatgtcacctgaagctccagtaagccagaatgtggcaatcacaagaagtgctgtctctcgagaagaagggtatgaggcacattccacacctaacactcaccttttcactcacccgaaggagcgggccctctttacccattttacagatgagaaaataggtttgtgccttgcccaaagctacctaaaccatacccaaacccccaaaaacactgtcacaaagcttctgaaattctggggctttttgtcctttccctcaccctccttccctgtagggagtcacagtaaaatccttagaagccctttgaaaaaggaagcagggggagtttcaaagggagggaaaaagctcccttggggcttgctttgaggtagaaagcaagttagaagttccttagtcattatcataagaataattgggacaattaactacaacagtaatcctctaacctttttttatttttaaagattttacttatttattcctgagagacaaaaagaggcagcaacagaggcagagaagcaggctccctgatgtgggactagatccaggatcatgacccgagccagatgcttaaaccactgaaccacccaagtgcccctctaaccttttttacaactcccctctccccaagaatataaacttgtctgtctgttcagatcaagcccagcccagaatctgacacacagtagcccctaggtaagtatggcgagccctgaagggatgagaaaaagtctgaagctaaactgtaaaaaaaaaaaaaaaaaaaaaaaaaaaaaaaagtccacaaggggtacacagtgggttacctgggtctccccacctccacccctccccctcattctcacctgcccatttcctggtttggacatggtttttctggctcggtggaccttgggctgcccctctgggctgggtgtggctgcagggggttcaggccccgctgctgccccctgggctcccggcatactcagcagccgcatagccaaactctggactgaggggggtgattttgctgcgcctgtcattgacatcttggcgcggctgggacaggcaccccccttgctgggggaagaggggaatgactttgtggcatggcctggaagacaaataggcagacagaaacaaggtaagacgagaggtaatcagaggataccccccctctgccccccaggcccctgactccccagcctctcacccagcaggattcggctcccgtggaggtccccatctccctccagattctcaggttcatccccaatgagcggtgtggctcctaggggggtgtcagccccctcatcacccacggtgactgtgacagaggctggggatgaggggccagcaggctccagggagtcagggctggacttgggcagggtctcctcaccacgaggggtgtcccccaaagagccgtgaactgtaaggggaaagaaaaagttcagggctaaggtctcggggaatcctgtgttgggggaggtgaaggtccagctgggcctgttcagccgcactcacctctctcagaggctcctctgggctccttctccagcaccagcgcccccatctcagcaggggcctccccctggcaggggacacaaggtataggagggctggtcagcccgctaggaagttggggagcccaggacgcctgggctctgggaagagagagtaggctccggggcctacctcttcctcgatgggggcccccccgtccgcggcctcggctgccctggggggccgcacgacccctcccccgggcccgcatcagccccctccctctcggcagaccccgcatctctggggcctggaaaagagnnnnnnnnnnnnnnnnnnnnnnnnnnnnnnnnnnnnnnnnnnnnnnnnnnnnnnnnnnnnnnnnnnnnnnnnnnnnnnnnnnnnnnnnnnnnnnnnnnnnnnnnnnnnnnnnnnnnnnnnnnnnnnnnnnnnnnnnnnnnnnnnnnnnnnnnnnnnnnnnnnnnnnnnnnnnnnnnnnnnnnnnnnnnnnnnnnnnnnnnnnnnnnnnnnnnnnnnnnnnnnnnnnnnnnnnnnnnnnnnnnnnnnnnnnnnnnnnnnnnnnnnnnnnnnnnnnnnnnnnnnnnnnnnnnnnnnnnnnnnnnnnnnnnnnnnnnnnnnnnnnnnnnnnnnnnnnnnnnnnnnnnnnnnnnnnnnnnnnnnnnnnnnnnnnnnnnnnnnnnnnnnnnnnnnnnnnnnnnnnnnnnnnnnnnnnnnnnnnnnnnnnnnnnnnnnnnnnnnnnnnnnnnnnnnnnnnnnnnnnnnnnnnnnnnnnnnnnnnnnnnnnnnnnnnnnnnnnnggagccacggcgcgctttctggccatctccccacacgccgggagcggcctcggcggtggcagcggctgccctaagctgggggcttcgggggcgcgttcccgccgctgcgggcgtcggctgcgcggggagccgaaggcgaggcacgcctggccgggggtggcccctccgtgccccgcctgtccgtaggtaacgagagcggcgtctgagcgtcccggctcgcggcggctatcttcccgaggaggcccgcgtctgcttctcccgcctcggtgcgctctagtttctgggtctccgggtagcaagtgtcggcctcgcttctcccccgagcaggaagggggcagcgggaacgcatggaggacaccggtgctctcgactgcttcgtaccggcaggagcagcgtcctctcctgaacccggggctcagggtcccttctgtttgagccgggtatgctaaggcaccaagtgcaccggggacctgagtaacccccagaggctccacagtcatcaccgcctgctgagtacactatactaaggagcctttttttggtcgcaagcctaggcattccgtgggtcataagcccagttgacagaggaagtatgaatgatattacaccgagataaaaaccttgatagcattatttagggtaccatccctttgggtattatattctggtcaaagtttggcaaaaaccctgtaagatctcacgcgcagtatttggtagaggtccgtggtttggctccagggcacctgaggccaattcaaggccttctgggaactgtagttctctttggttaagaactattcagagctttgtgggacttgtagtcttccccatgccctaatccaaacttttttttttttttctggctttcccaggacatgaacccttttctcagaacataaatgcccaaacataggctcctgcttaaaattttggtgggtataatgatcacctttatagttcatccctagcactgataccaaactctcgtgatagatggggaagtcgtgagttatcaccactaccaatcgtggaacagaagtgtgagatatctgccaggtgctgaggttgccgaactgggagggtccccagccagagaagcacacttgtcacagtcccttggtcttgtcaagtctcctccaggcataggacctctgcatgagctgcgctgagtagtgagcaaacagcataaaagggagaggctgtccagggtgggacggtcatacacacgcagttgccaaacagagtataaagaaaaaaaaagtttgattttttttttaaatttattttgtggaaaacaaaagcagaaaaactaaaaccccaaactccagaaaaaatcctaaaaaatacgttttgttttcttaaaaaatactgtataagtctctactcctctccctccccccaacagccctccttgtatcctttcatctaagtgccctaccccccaccctgccactattcatccttctcattattgtccccactcttccatatctacccaggatgctcacccccaagttctcttccctggcacctgacatggtccttcctattggtttggtgagcctttacccacagtcccattcccccagcatgcaagaactgtctcccacttcttttctgggattcaataatactttccctgctaccactccctctcaccaggatatattctatgcaggagcaagtaagctgccctcctgcccaaaattccccttcccaaatccccaccccccaccccccatctccaagaaatatcatgaccctctcccctgggccagctttaacccaggaataaatcatcttcctcttttttccccccttctcattttataagaccctttccctccctccacatatccatgcacctctaagagaagaaaattttctctgggagcccatattgccttggccttctcaaagaaccctctctcattcgtttttttttttttttttttctgaaaaggcagggtcttctgtccaaggaatcttcggcccctctctcaggatatgtctgctagggttccccagcgtacctgcctgttcccaaccctcccatcccctattctattctcctgggccagggagctcccttcacactcagcccagggacccccccaccccacgccgctgggccttggagcctgctctgctagctctagcggatgaggacattgatctccgccacgctggcctccagcacgttctccgctgtggtcttgccatgctgctccttgaggtgccgcctaatggcaggcttgtgagcgaagcgcacgtcgcagtaggagcagcggtagggcctggctccggagtgcaggttgaggtggtcgtgcagtgtggacttctgcgtgaagcacttgccgcagatgccacacgagtgcgacttgacgccgcggtgcacgttcatgtggcggttgaggttgctgctgtggttgaactgcttgccgcagcgcgggcacatgaagatgaagtgctgcgcccgcatgtggaagaccagcttttccacaccctggaatacttccgggcacttggtgcactttatgttttttagggggtttccactggaaaagcccccaggcaggggtccccggctgccccctgcccccaggctgccccccgccccccgggcagccatggccaccgctgctgcctccaccaggcctgaggtggctcccacgctggcccggcctccagggatcaacagcaaaccctccccctctgcgtcctctgagaggctgtagcaggctttcactacaccctgctgtggggccacagtgctggggggcacgctgctctgggtcagctctcccaggtggccgcccacggagcctccgatgctcaggcctccccccagacctccaggaggtttgagccggtgggccacctccagggccgactccaccttgacgatgcagatgtcagacacgtcctcgtcctcatcctcatcttcttcctcggccttcagctccaggtcctcatccagagggaactccagtttcacaggcctcaggagtggagggggcagagggggtgggggtggaggcttgggggctggctttggggtcctggcaggagggaggagggatttggtggcactgacgctgctcacaaggctggcatcactgatcccgtcctctttgaggcctattttgggctcaatgaactggctgagggcgttcctgcatttctccaccacgtgctccatctgcaggtaggaggcagccgtcaggtagttgacgatgtccctgacagcgaattccagcgcaccggtgtagcaggagaggagcaggtccgccacgatgcgcgcactgtgcatcagtgagacctgcagctcggaactggggttcagcaggaactggtccctcaggaaaggcgaacacgcggccaggatgaccttgtggccacggaacttgaggctgtcggccacaatggtcacgtcgcaaaaccgctcctctgcgcggagctggttcatgttccgcagggtagcggcctcgtggccgggcagctggaagcgcaggacttccaccccagaggccattgtggcaggggtgggcaaccctggttgggaaggaaaccggtcagagacaaaggtctctggctctcctaggccagggctccgggcccctcgcccccattcttgcccagcctcccagcttcagatctcccagtcttcaggcctcttcctcagtttccccagtccctggggaagcgctcgggcctccgaggacgaggacggaggcgtggttcccgggggcggggcagcggcgtccacaccgcccccnnnnnnnnnnnnnnnnnnnnnnnnnnnnnnnnnnnnnnnnnnnnnnnnnnnnnnnnnnnnnnnnnnnnnnnnnnnnnnnnnnnnnnnnnnnnnnnnnnnnnnnnnnnnnnnnnnnnnnnnnnnnnnnnnnnnnnnnnnnnnnnnnnnnnnnnnnnnnnnnnnnnnnnnnnnnnnnnnnnnnnnnnnnnnnnnnnnnnnnnnnnnccccctttgcacgtttgcacgcgcctttcacgtcctcccccagctgcctgcacgctccgtgcacgcccccccccacgttcagagctccgtggcacgccccccccagcccacgaccctgagtgcacgcgcctctcacctggcccggttccgcgcgctgttttccccccctatctcccccaccccccccggggttggcggcgcccccgaacacgggcagggctcgggcaacgcgcaagcgcgggggtgcacgaagcgcgcgcgcggggccaactccgcgtgggcgcagggagggaggggcgggggcggctcgcgcggtgtgttccaggccccgcgcgcctcggcgtcggcgagaactcggggaggaggaagaggggagggaattaaaggagcaggattccccccttcccgacccccctttcttccccggccccccccccccgttaaagggccggacggcctggtctcccctttggccgatgttatttgtccgcccgagcggaaattcggtccacaccccctttcccgctccccctactgtgtgcgtccgggctgcccggccaatgtgcgcgtgcgtgccaagtgccgcgcggagcccgctggctcggcccgccccccgttcccggcggcccgcggcgcgcgcccccgcccgcgctcccctgccgccacctgcccgcgccgcgggtgccctgggcccgccgggccggcgggagaggctgcgccgcccctcccggaggacccaggccgccccgcgaaggccgctgctggccacgggcgcatcctcggcggaggacgctcacagcccttccagccacacttgaagactttttcaactcctttgaagctagtgaccgcccagccttcctggcctaaaagaagttttaacttgctgcggaaacactacggtgccttccacttacctctttctcaaagttgtgtaacatcacccctctccgaccttcccctccattctcaggattgatcccacttcttgccaaatcagacgtcctccagttgtacgcaccgtcgataaccttgcccatttcctccctactgtacaattagccctggtattaattcttctgattatgcgattatttatatcaggacgattttaccgtctttaatcttcctgactgcagctgttcctcccattcctgctcctccatgggcctggcaaggtcagagctgcaccgccctaaacaaaacgtccctttctgtcactcccaaagtaacctgcagtctccacagcttcctcctgaagattgccctcccccccatcctagtacactcacttccaatccatccaaatccaggtgaaaaatcccctgcttccctttgattggattggttggttatataccccaggagaccagctcatttttcttacacatgggttttgaggaaactgcttgttatataatgggttcaatatttggttccccctagattgtaaacttcttgattgagggaattatgtcatgggttgtattttgcaaataaaaggcatgcaataaatgatttactgctgaagtcattccctttcagtgcagccagcatccacccagaaaaagtttgttcctggctgaaactgaattcctgaactcaaaggaatgacctttggtggaaagccggggcagtgtttaggtggtgcttgactccttgccttttgcctttactctgctttttatgcttccacccagttctcttgcctctttatagcaatctcctttgtagtcaggccatataaatctgagaaagaactttggcctttgtgtcagacacacctgggtcaaagccatattctatacatttttaaaaaaagatttattgggatccctgggtggctcagcggtctagcgccgccttcagcccagggcgtgatcctggagaccgcggatcgagtcccacgtcaggctccctgcatggggcctgcttctccctctgcctgtatctctgcctctctctctctctctctctctctctctctctcgctttctctctgtctctgtctctcatgaataaataataaaataaaatcttaaaaaaaagatttatattttatataaaagatttatatattttagaggggggaagggcagagagagaagagaaagaatctcaagtggactccctgctgagcatgaaaacccacccagggcttgatctcaggggctccatctcaggaccccgagatcatgacctgagctgaaatccagagtcggatgcttaactgaccgagccacccaggcacccccatattccattacttttgaaaagagggaaattccttaattctctgaatcatagcatctttgttttgaattggagaccctggtttttcacagggctaatgtgaagtttaaggcatacaggaggtgctagaacagggatagctctcttcctttaattgggaggcagattacaaaatcttcaaaagaaatttaactgaaattctgtttccctgtctcatttcttctttccctcattgccaaacctttcaaaagagtagttcactccagtgaaatcagagatacaaaagctgtcaaagtaagaactgaagtctgtaaagttatgtatcctgtcaccttgctacttctcctttctgggagagtgtgaatgggacagggggcctaatctcagcttgaaacttaagacaggtggttcttggtggcaagtagagttgagaactgatgaatccttcaagtgccaggcccgtccagctacagtttcatgtggaaataagccatagtgcaccaggctatcttctcctgtacagcctggtgaggaggtgtttagggctattttcccacatagcccatgcaggggtatcttgatccttgtcccttggccccagacttctgccaatgtgagatgaggaaacctcctgtccttggctagtggtaccaaactccctggcatagtgtgaaggacagtggattcaggattcttagtgggcttgagaaataaaatctgactatggagcaaggaacaagaggagacaaaaggtctaggctctagtttaggttggaggctgtcaacatccccgaggtttcagtattctcttcaagaaaaggagggattgtcctatgaagtctctttcagtgctgtgagtctttaaaagcccaatctgaaaagagatgtgtgcatttttgtgtctatgtctgggagaagtggtcaaggactaagctagctcatggcttagagtatcactcctggttcctggtgaatgctaacagtggtctagataatcctagacagaaatggttacacatttccctgagaccttcaaggtagttttggcagtgggtgtacttttgccatatgctcagcctaggccagaataattatattccttgaggtaccaataggaaatattggacttagggacgcctgggtggctcagcctcaacggttgggcatttgccttcggctttgggagtgatcctggggtcctgggatcaagttccacatggggctccctgcatagagcctgcttctccctctgcctgtgtctctgcctctctctctctctgtctctcatgaatgaatgaatgaatcaatcaatcaaaatatttttaaaaaaggaaatattggacttaaatccacaggctgataaaacttttcgtgtattacaacaaaacctccaacatctcttcctttcagcactgccctcactgtaggaaccctgagtcctgctctgctgctccctacctctccttgttgcctgagcaaccaacttccaggcctgccagtgtccatgcaaatggacctcatccacacccctaattaaaaaaaaatgtccagtttattttatgttttcttttttaagattttatttatttattcatagagatacagagagagggggagaggcagagacacaggcagagggagaagcaggctgcatgcagggagcccgatacgggactcgattccgggtctccgggatcgcaccctggattgaaggcgatgctaaaccaccgagccatcagggctgcctttattttatgttttcttagagtcacttgcatggttcaggattcaaaaagtgtattttatcaatcagaaagggaatcaataccaggtgggaattacttgcttgcttatcaaaagaatgcatttgatatttatttgggagaacatttttaccctggtgggggatgaggactcataaacaagtgatcaaaaatatttctatcaccttgggaattctggccaatgaaattgctcaagcaatagcagctcaacaaaaagcattagactctttggcctggatgatagaatggccttagattgtattttgccggaacagggagggatatggaaggtaattaactcttcctgctgcatttacattaattattcagctgaggtagaaacccacctagacaggttcaagacacttggctgcaacaaatttctgccaaagtcctgtgaacagaatgggattggttttctggtctgttttcttggattcctcaaggaatttgatcagtactctgggcattaacccaagtgggagatctatctgctctttatatgatgtacatactcacacctgtggcatgagatgctgcttgaaggcagcaaaagcaggaactaacttgatggttctccaaagctttgaagttaggccaggtgccagaggattcacagttaggagcaaaccagttgcattcctctaatcctgatcttcgcccctcttcagccagaagtagctagagcagtggtcatccctcaagactcaggagtaactagaaacaagtggggggaggggagctgaaacctggtatgcaaactcctgcagagcccacagctgcctctggccagtcttgtagcccttagttactgttaaagaaacctgtaaaattgtctcaggaaataacatgttgcctcatgaaaagtctgtgggatgctattctgcttgagatgacaaacataatgtgccatttttgcaagaaaataataataatagtttgcagcttagtaatagtcacaagatgtaaaatgtctgccttttagagatgacatcctgaaacacaatctgctgagaatgttttgcagttcccggctcctaaagaggaacagccaggcccctgcagcagacgaccacctctctacaatcacaccaaaaccataccaggagatgccaaatgagagaagaggatcaagaaaggaagtattacagtaggtccaatccctaatcaatcagcatgatccaagagcctgagaccctaatcctgaattttcaccctttattttatttttatttttgtttacttatgtttttaagattttaagatttttaatagagagagcactaactggggtgggaggggcaaagggagagggagaagcaggctcccccctgagcagggagcccaactcaggcttgatcccaggaccctgggatcatgacccaagccaaaggcagatgcttaaccaactgagccacccagacgcccctagattttcaccctgtaaaaacccctgcttgcaagccaatggggagtttaggactgtgagcattagctcttcattctcctgggtgatgtgacaccaataaatagcctatttttcctcaccccaaaaacaaaaccaaaaagccaaaagtaaccaaagcaaccccccctactgccgtgccaaacaaccaaccaactaaacaaaatcaaaatccaaacctccaaacccacaaaattagaaaaatgtaaaagggtacacactgaaagttctcctgccaacccccacccagttccccttccctccagcaaccaatattaatggtttcttcaaagcttcttgacattcaaaacttttagtttgacttcatttcatccacttctttcctgagatcaccccctgctgattgacagcatctggaactgtgtcctttctgaaatttgaaatgccagagccccattccctcagtgaccctcagatctctctctcctgggaggcagcaagcatccctgccccaggtcccagggagacctccaggcatcctgtcttcccctctctccctgtccacctgggtaccactctcagctgctctgacctagcagcatcctttacctgggttctctgtacaccaaggagagcccctcggcccaccacgctgtgctgcacacccgccccctctcttgagtacccctacccttcttctgatcgcctgctctcagcagcccagagagccttccttcacaccccaaatttccctttctttactcatccttatctctctttccttaatttcagaacttgttgaaagtccatccttcttcctttttttttttaaaattttatttatttattcacgagagacacacacacagagagagagagagaggcagagacacaggcagagggagaagcaggcttcatgcagggagcccgacgtgggacttgaccccgggtacccaggatcatgccctgggctgaaggcggcgctaaaccgctgggccacccgggctgccccatccttcttcctacatcccattcttcttctttttttttttttaagattttatttatttatttgtgagagacacacagagagaggcagaaatataggcagagggagaagcaggctccatgtagggagcccaatgtaggactcaatcccgggactccgggatcatgacctgagctaaaggcaaattctcaaccactgagccacccagctgttccctacattcccattctttttttttttttttttaagatttatttatttattcatgagagacacacagagagaggcagaaatataggcagagggggagaagcaggatcccagcgaggagtctgatgtgggactcgatcccagatccccgggtcacgccctgagccaaaggcagatactcaactgctgagccacccaggcttccctacattcccattcttttttttttttttaagattttattttatttattcatgagagacacatacacagagagtcagagacatgggcagagggagaagcaggctccatgcagggagcctgacgtgggactcgatcccaggtctttaggaccacaccctgggctgaaggtggcgctaaaccactgagccactctggccgggctgcccctgaatttcttaatgatatgtacttttcttgtcttcataacttcattatctgtgcatattgtaggtatccctaaatagcatgctgtttagctttgtgtgtttaaccatcacatagatggaatatacattatgcatttttctggagctggttttttaactcattctgattttgttgagttgtgtagttgtaatttattcactttctttctattgcatgcttacaccacaattaattaatcctttgtcctgttgatggacatttgcattgtttagagatttatttatttatttgagagagagagagagagagtgagcaagcaggaggggcagagggagagggagagagagaatccccagcagactccctgtgctaagcacagagcctgactcagggctccatttcacaatcctgaggtcatgacttgagccaaaatcaagaggtgagccacccaggtgccccacttctgcgttgtttaaactggtggttattactacggcgctgatgtgagcttttactcctctctgagtgtgacatgtaagcttctctagggcagcaggcttcaaattagggatgtgtgtccctgtagtgtgagaggactgtccaaggagtagatggaccagagagacgtaagggaacgcttttcagatctgactctcccaaaaggcataaaggcactggtgggcctggggagacccccatgaaggagaaacatgtgtcctcatcctcttgcccaacctgcccttgccacagaaaccaagctccagggggatgtagaagcatcaaaacaccagggtaccccaggagcagttccaaaatctgttggttctgagaatgtgagtgatgtagtgacatccttctgcacatcagctactttctctgtcctttcaacaaagctgagtgtcagctgattgagtattttaccctttttatcattattatttttaaatattttatttattcacgagagacagagagaggcagagacacaggcagagggagaagcaggctccatgcagggagcctgatgtgggactcgatcccgggatcctgggatcacgacctgagtcgaaggcaggtgctcaaccactgagccacccaggcgtctcaccctttttattattgaggtgaaattgacaacataaaatgaaccattttgaagtgaacaattcagcagcatttagtacgttcacaatattgtgcagccaccacctctgtctacttctgtctcgttccaaaacattttcatcaccccagaaggagccctgttaaattgttgcttccctcctccctctggctctcagcagccaccagtaggtgttctgtttctctggaatgacctgtcctggatgttttgtataaaaggtatcacacactatatggccctgtgtctggctgcattcatgtgccgtaatgcctttgaggttcatccatgccatagcgtgtatcagtagtctgttcctttttacgggcaactgatattcaggtgtatggatataccacaactgtttttttcattcctcttgttgatggacgttagggccctttccaccttctgacgattgcgaatagtgctgctatgcacttgtctttgttgagaacctgtttttagttttttggggggtatttacctaggagttgaattctgggtaatatggtagttctatatgtaacttttgaggaaccaccaaacagttttccacggctgctgagccattttatattcctaccagcacatttctccacatcctaggtctcacttattttctatatatatgcattttaagccatccttgtgggtatgaagtggtacctcattgtggtttttatttgcatttccctaatgactaatgatgttgagtatcttttcatgtggttatcggtgccacttgtataccttctctgagaactatcaattcaagtcctttgaccattttttaaaaagattttatttatttattcatgagagacatacacattcagaggggggggcagagacacaggcagagggagaagcaggctccatgcagggagccccatgtgagatttgattctgggacttcaggatcacgccctgggccaaaggcaggtgctaaactgccgagctacccagggatccctcctttgaccatttttaaattgagttgtttgcctctttgttgttgaattgtaagagttatttatatattttggatactagatccttataagataggcaatttacaaatattttctccattctataggttgtctttttcactttcttgataaaatgtctttagattgggacacctggctggctcagattgcagagtgtgcgactcttggggttgtgagttcaagctgtgtgttggatgtagagcttacaaaaaaaaaaaaggtaataaagtctttaggtgtacaaatattttaaattttggtgaggtctaatttatttatttttttcttttgttgtttgtgcttttggtgtccatatctaagaaaccatccccaagggatgactgcacctggcaggctcagtcagaagagtgtgtgactctttatctaagggccatgagttcaagctccacattgggtgtggagattactagaaaaataaacaaacaaacaaaaatcaccaaatccaaggttgtgaagatttactcatgtttccttctaaccattttacagcttaagctcatatagttaggttgttgaaccattttgagttaatttttgtatatagtgtgaggtagggattttattttttttcttttgcatgtggatatccagtttttccagcaccatttgttgaagaaaacagctgattgagttttgataagtcactgtcttttggtatataatttcaaagaatttattgacattgctatgacaaaccttcttccatttacatctacatatttatgggaacaaaatttttggttcgtacatctacaaaaatgaaaaataggaatagaattcatactgaatcctaattctagcaataaataacattcacccaataaatacatgaactaattgaaaagaaagtgacctaaccatcttatttagaatcgtacttctttttaagaaaaatatcacagggacgcctgggtggctcagtggttgagcgcctccctttggtcacaccctgggctgaagggggcactaaaccgctgggccaccggggctgccctaaaaatttattcatgacagagagaaagagaggcagagacagaagcaagctctacgcaaggagcttgatgtgggatttgatcccgcaactccgggatcatgccctgagccgaaggcagacgctcaaccgctgagccactgaggcatccctcaattcttttttttattttttattttattattttttttattatttaaaaaaaatttttttttcaatttttatttatttatgatagtcatcagagagagagagagagaggcagagacataggccgagggagaagcaggctccatgcactgggagcccaacatgggactcgatcctgggtctccaggatcgcgccctgggccaaaggcaggcaccaaaccgctgcgccacccagggatccctcttttttttaaagtaggctccctgcccagtgtggagcccaatatggggcttaaactcatgtgaccctgagatcaagacctgagctgagatgaagaatccgatgtttaatgaactaagccaccagggtacatctaaaaattcaatttttaaaaaagtttatttattttaagtaaacctatacccagtgtgggacttgaacccacagcctcaagatcaagacttgcttactctcccatccaagccagccaggcacccataaattcaattttaatctatatacatattttcgttgcagagaatagaagactttcaaacctaagccatattttattgagataacattttggtgggtagaaagggaaaatatgaattcagaagaaatggaacatgtcaagtttctgactttttctgttttgttttgttttttaaaatatttatttattcatgagagacagagagaggcagagacacaggcagagggagaagtaggctccatgcagggagctcgacgtgggacttgatcccgggactccaggatcacgccctgggccagaggcaggcaccaaaccactgagccacccagggatccccaagtttctgactgttacagaagagagtggtcatgggctttttaatgaatcagagagagtgtcgttaagagtgaaataccactttttaaaaaggtcagtgttggggacctgtgtggctcagtggttgagcatctgccttcagctcaggttgtgatccccagttcctgagatcaagtcccgcctcaggcttcctgcagggagcctgcttctccctctgcctatgtctctgtgtatctcatgaataaataaataaaatattctttaaaaaaaagtcaatatttacaacacactggaaattgcatctttttgcaatgacttaaacatttcaggaacattttaggtagtagtataaaaatatgcaaggagtgcctatatggtttgcgaatttttaaaaacacgagcaaaagagtgaagaggaagtgcttctcacacttcattgtgcatgtgaatcatctgaagattagttcaagtgcagatgctgagcttgtaggtctggatgatgcctgaggttctgcatttccacaagctcccagtgaggccagtgcagctggtctgtggaccacactttgagtagcaaacatccatacacagtaggccccctttatcggtgggggatatgttccaagaccttcagtggatgcctgacactatggattttctgaatcccatatggctacttgtttcaatacatacacacctatgataaagttgaatttataaattaagcacagtaagaaattaaaaagagtaacagaacaaaacagaaaagtgctaacaatatactatacaaaagctatatgaatgtggtctctttcaaatttcttattgtgctgtactcactctccttgtgatgacctgagatgataaacggcctatttgagagataaagggagatgaatgcctggcattaggctcccgttgacttgatccacttgatccgtcagaagtaggatcatctgctttcacactgaggttaactgcaagtgactgccgctgataacggggtatggccctggatataggggtgctgctttggataagggaggtactaccgtggataggagggcgctgctgtggatagcagggttactgctgtattcctactagtggaacttctgggtgatggcatcttcacatgttctactcccctgcccaatgccgaaggatcttctgaagtagttgtaccaatttacactctgaatggcagtggaccagctgctgcttgtgaaaggtcactaaaggtttctggtttccagcacttgcctcgcttgagctttctgaagctggtggcacatttgacagcgcttgtttgatacactgcctttccctggtttctgtgacacctttctttgagcttcccttcctacaacctcaggctgctctgcaacccctcactctcttcctttgtccatctgttaactgttggtgtccttggcctcttattctccttgttctccctgggcgatagcttgtgcttttaagaggttggttattacctggaggactgtggtggctagttttatgtgtcaccttgggtggactgtagtatcagtcgttcagttaaacactaatctggatgtttcttggaaggtgtttttgtagctatgattaccatctacacacagttgaattctatttttttttttaagattttattcatttattcaggaaagacacacagagagaggcagagacataggcggggcgtggggggaaagcaggctcaccttgaggagcctgatgcgggacttgaccccaggaccccaggataatgacctcagccaaaggcagatgttcaaccgctgagccacccaggcgccccagctgaattctaagtaaaggagattttcctggataatgtgggtggacctcatccaatcagttgaaggccttaggagcaaaaactgaggattcccagagaaactcaagactataacagaaatcttgcttcagttcccatcctgccagtctgcggtacaaattcgaactcaagaccacaacatctggggcctctgggtggctcagtggttgagcgcctgcctctggctcaggtcgtgatcctggggtcctgggatcgagtcccgcactgggttcaccacaggaagtctgcttctctctctgcctatgtctctgcctctctctgtgtctctcatgaaaaaataaataaaatctttaaaaaaacccaacccacaacatcaactcttcccaacctcctgtctgcctgtggattttggacctggcagcctccacaattgcatgagtcaattccttaaaatcaatctctttgtatgtatgtatttatttttaaagattttatttatttgagagagaatgagagagagagcgagtgagagcacaagcaggggaagggaggggcagagggagagggagaagctggctccatgctgagcagggaacttgatgcggtgcttgatgatgctgtgcttgatcccaggaccctgtgattaggacctgagctgaaggcagatgcttaacaaactgagccacccaggtgccccaatctctttgtatttatgtttctgcttctctggggaacaatgactgatacagactcccaccagacttgcctcttgtgtctggtctaggatatctgtctcctcctgaatgttctagaggtagttaaaacacagtatatcctggatagagtctattctttttctccccaaacctgtttctccatttaggtgcctctatccattccatcacccaagctaaaaacttgggattcaatatggacttctcttggctcttcatccttcatatatactcagccaccaaatcccttgcccatccatttaataaatatatgagttcccacaatgtgccaatgcggagccagtgctgtggctcaaagaagagtaagagacatttgctgagggtgtggagaaactgaaagccttgttgatgggaatacgaaaaggcaccgaaaacactatggtggttcctcaaaaaaaaattaaaaatagaattactgtatgattcagaaactccatgtctgggcacacatccaaaagaactgaaagcagggtctcagagatatttgtacaaccatattcacagcaacattataggagctaacacagaaaataacccaagtgcccatcagcagatgagtggatgagcaagatatggatacacatacaatagaatattacttggtcttaagaaggatggagattctgacacatgctatggcacagatgaaacttatggaccttgtgctaaggaaaataagccagacacaaaaggacaaatactgtatgattccatttatatgagatacttggagcactccaaatcctagaaatagaaagcagaagggtggtggccagggctgggggtagggggatgtttaatgggtacagggtttcagttttataagacagaatgagttatggagatggagagtggtcatggttgcacaaaattttgaatgtgtttaatatcactgaactgtgcacttgaaaatggttaagatgagcggcagaggggtgtctgggtggccctcctgattaagcacctgattcttgatttcagctcaggtggtgatctcgtggaacctgcttaagattctctttctgaaaaaaaaaaaaaaaaaaaaaaaaaaaaaagattctctttctgacccaccccccaaagaaaatcgttacgatggtaaattttatgtgtattttacctcaaaaaaagtttttttttaaagaaataaaaaatagatttaatagtgaacaatcattttattttttaaaacgattttatttatttatccatgagagacacacagagagaggcagagacacaggcagagggagaagcaggctccctgcagggaacccgatgtgggactcaatcccaggaccccaggatcacactctgagccaaaggcagttgctcaaccgctgagccactcaggtgccccaaacaatcattttaatacagaaaactgtcctttcaaatataacttgaagaaaaacctattttttaaaagctaaaaatgcatatccgcttattggacacattttgctgctcttgttggtttcccaggaagctaaaacctctctaatacttcactgccttttaaattgaataataaaatgttaattgattaaaaaaaaaaaaaaagaaggaaagaaaaatacgtttcctacactcaagatgactacaggtaataagtaagcaaccagaggatgctggggcaagtgctgagatgtgggcagcccaggtgtcgggagagcccagcggacagcacagagggtctccggagtctgcccctcaacacttgtctgggctttccttccccactgctttgcatccatgtagcccctggtctcttgcaaggattaaaatagtctcctaactggtcttccaattcaccttccacactgtttccaatataatatatttgagatgcagatgaaatcatatcactcccctgcctacaatgttgtatacctaattgccttttaaactgccaccctggctcctgagtagggcagactccttccccgtctcatctttctgtggcctcctctttcctctcccaccctaacccttcctaacttacctgcagttctcttaccttcttccagggttccagactccaagcctttccctacacagattgctttgcctgggctgtcctctctcttccttgtcgggtgcttaaatattcatcttttaaagcttatttccggttcccatatggagcctttctgagcctctgagagatctgataccctcctctctgtgtgtctgtgaactctagatgcatccttatctcagcttgtatcggtcagagtggctaagcaaatgctgcagtaacaaatagcaccacaatcagtagttccccatgcctgtttattactcactgatgctacctgtcagtgagtcagcacggtggtggtgggggcctctctggtcatcagaatcacttggggatccaggttaaagaaggctccaccaaaagagggcaccagaatatctcatgtcgcattggcaattagcacttctgcctagaaaaaacaacccatgtggcttctgctcacatttcattggtgacagcatgccatgtggctatgcctaacttcaagagtgctgagaaattcaataccaagtgcctggaagaaggcaaaaaataggaaaattggagaacagcctcaatgactactgtggcttggtgcagtgcttacctgcttccatctcttccactggacaccagcgatgccaagtcatcacagggtccctgcccttgagcagtttgcgctccagcaatgggcagagacccataaaccaatggattgtaattctccatgttcatgttatagtctgggtttggctggcatgttggttggggaaaacccatgaaagaagagcaatgggtcatgggagaggcaagtatgacagcgacagtcttaatttgcgtgtccctgaaagcagagtctgagatgtgggtttaggcagttaatttaaatgattctagaatgcagaagtaaggcagtgtgattttgggaagaaggaaaagccaatttaggatgattggctattgtgctcgatgggaatgcgactccactggaattttctgaggagggaaacagaaggtctccagaaattgcccattggaaggacaggaggcaggagtatttagccaccaatttccgttctctgatgagtggcaggttgactctgggacattagatccctggcctttccccctgtgtttgcccacttgtcactgaggctccgggaaaggccgggatttagcacaaggtgagtctgagctccaaagaactgtccacgccagccactgctgaaatcagagagtggcacagaggatacagggcacaggaaatgaatgccccaggggacctcatgtttcctaaattactgctttctgtcacttgctgtgctaggtgctaatttatgggtctttccctcattcagtacagcaaccttcctggcgtaggttttatggtgatttatagaaagatggtagcaagtcaccagagcaagaataataggtggctctgatggagtggctttcctttcatctggtcatttttccaaatggtctatctcagaagtgggattttaaaaatacagttatgggatccctgggtggtgcagcggtttggcgcctgcctttggcccaggccgtgatcctggagacccgggatcgaatcccacgtcgggctcccggtgcatggagcctgcttctccctctgcctgtgtctctgcctctctctctctgtgtgtgactatcataaataaataaaaattaaaaaaaataaataaaaatacagttatgatggggctccagaggactgactcatgctaacaacgctcatgaaagactcatgtataaatggctcatttattgatttccgcggtaggtgtaacttgcaagatgatttggtacttacgttccccgagctttatcatttattcgtttgatatttttattatttattcgtttgatgtttttgacagcacctgttgtgtgtggcagggtctttgtgccttgtctagtctttttatttgtctgatcttacttaatggtcaaagggggttgaaattttttatattttaactttttattttttaaacattttatattattttttaaaaagatcttatttatttattcatgtgacacacacacacacacagagaggcagagacacaggcagagggagaagcaggctccatgcagggaacccgatgtgggactcgatcccgggtctccaggttcacaccctgggctgaaggcagcgctaaaccgcggagccacctgggctgccctttttaaacatttttctttttatttatttttattttttttatttatgatagtcacacagagagagagagagaggcagagacataggcagagggagaagcaggctccatgcaccaggagcccgacgtgggattcaatcccgggtctccaggattgcgccctgggcggaaggtggtggtgctaaaccgctgtgccacccagggatccctttttaaacattttttaaaaagactatttatttatttggagagacagggagcatgagcaaggggagggagagagggcgagggagaagcagactccctgcctgacatgggcttgatcccagggccctgagatcatgactagaactgaaggcagacccttaacccactgagccacccaggcacgcctactttaactttttattaaggaaactttcaaacagacacaaaaattggtagaatacacagatgacccagcttcaacaattttcaacagtttgccagccatgcttcatcaggcctccgcctcccactggagaatttttttttaaagatttatttatttattcatgagagagagagaggcagagacacaggcagagggaaaagcaggctccatgcagggagcccgacgtgggactcaatcccgtcgaaatctgcagagatcttatttatggcttaacacatggtgtatcctggaaaatgtcccacgtgcactggagaaggatgtgtgtgcttttgctgcctggtagtgttctgtacacatctgttagatctatttgtcttattgtgttaagtcctctatatcttcatttccttttttgtctggttgttctgttcatcgtttgtttgttttaagtgggctccatgctggggatggagcccaatgtaggtttcaaactcaacgacgctgagattaagatctgagctgagatcaagagttggatgttccggacgcctgggtggctcagcggttgagtgtctgcctttggctcagggcatgattctggagtccctggatcaagtctcacatggggctccctgcatggagcctgcttttctctctgcctatgtctctgcctctctcattctgtgtctctcatgaataaataaaatctttaggagaaaaaaaaagagttggatgttcaactgattgaaccactcaggcacccctggttgtctgtgcattaagaatggggtattgcaatgggtgttaacctatatgttggcaaactgaatttaaataaaacattttaaaaaagagaatgggggggggatccctgggtggcgcagcggtttagcgcctgcctttggcccagggcatgatcctggagacccgggatcgagtcccatgttgggctcccagtgcatggagcctgcttctccctctgcctgtgtctctgcctctctctctctctctctctctctgtgtgtgtgactatcataaataaataaaaattttagaaaaaaaaaaaaaagagaatggggtattgacatctccaagcatggttgtaagacctgtctatttctctcttcttcgattctgacccattttgcctcatatattttgacggtctgtaattagatgtgaaaatgttataattgttatgtatccttgctgcattgaaccttgtattaatatataatgtccctctttgtctcttgtgaacttttaaatttaaagtctattctgtctgacattggcatacttatcctttcttttggttactgtttgcatggagtatccattttcatcctttcactttcaatctatttgaggtctttggatctcaagtgagtctcttgtagacagcatatagttaggtcatgtatgtttttgtatccagtctgcccatctctgtatcttgattggagagtttaatccatatacatttaaagtaattacgggggcagcccgggtcactcggctgtttagcgccacctgcagtccagggcgtgatctggacacccgggattgagtcccgtgtcaggctccctgcatggagcctgcttcttcctctctctgcctgtgtctctgcctctctctctctttctctgtgactctcatgaataaataaataaaatcttaaaaaaaataaagtaattatgacaaggagggacttactcctgtcgttttgctacttcttttctatatgccttgtaattttatttgtccttcatttctttcattactgtcttcttttgtgtttagtcgattttttttggtagtgaaacattttaaatttctttctcgtttttttttttttttttttttttttttttaaatgggactccaggatcgcgccctgggccaaaggcaggtgccaaaccgctgagccacccagggatcccctctctccatctgtttgaatatgtaccacacatacccaacaaaagtgtaaagagaaataaaggggattttgagaagagtaagtctctctccttgccccacatcccattttctagccctcaaagacaactctcttatccaaattttgtgtgcctttctggagaaattgtatatatataaggagcgtatgttgctacgtcttctttctccccatttttctgcataattggcaatagaccacacacatggtttcaaatgtccatttagttacaaagtatatattatattacggatagtatcttgagacattgcacctcatacatgcataagccttaaactttcagaggctgcatagcattccactgtccaaactataaggtactctgtgttactcctctgctaaatgacttgggttatttccaaacatttgctcacaatagtgatgaatgctgtagtgagtatctttgtacaccactcttccacacctgtaagagaaaagaacatttcgttcttatagtcctaatttaattctcacagataactttaagaggagtgtattttgctgttggctccatgtgtgacaggtgacaaaacaggataagtaaggctgtgaaacagctaataaatttgccaagccaaacctgagattctaggctgtctttagtcaaagcctgaatttcttctgccacactacagccggggccagatgtctgggcacaaagggttctactggagcatgacctttcatttgagtctggtagaaaagcaaagcatgaatgtatgtcccttctatactggaaaggtctctccctgccccttggcagtgttgagggtaggggcaggagactgccctactttgagttcaccacctctcaaaggtgggagggagttagtaagaggaaaggagatgaatcatcttcccctacacacaattcccaggccatggaggaaaacattagagaggcattttttttaattaaaaaaaatttttaaaaaagattttatttattcattcatgagagacacacacagagagagaggaaggcagagacacaggcagagggagaagcaggctccatgcagggagcctgatgtgggactcgatcccgggtctccaggatcaggccctggacttaaggcggcactaaaccactgagccatctgggctgccctaaaaaaaaatttttttttaaagtaaactctacaccgaacatgaggctcaaactcacaaccctgagatcaggagtcacatgttctatatttgagctagccaggcacccctaagatgcattttgaatgaaagggcagaggagggatggttaggtcacccctcccaccaaaagtaagtccagacctggaggatgaaggtggtgagagggatccagggaggtatagcctgaggccatcttgcctcttgccatttccaggggacctctgagtacatgagtcatggtcaccaccctcttacctgggctacacaggacagcctccccataggtggcaagaaataggggagagggaataatatatgcatcactggccacgtagtactgggagactttggagggatgggatggacagaggtgaggtaggagctgtgtggcgagcagacagacacactggtatacctcaagcttggccgtttccgggggctgagtcccaaaaaggggatttatggccccatatgggaggtcataggcaggccttcagtttcttggggaggtccttactttgcttaattctcaggaattgtttacgcaatagatgggtgagaagaggaggttccatgtcctgatccagagtccaggcttgcaagttggcctctggggttcaggggcctggaagagccttgggatgggggagagctagggactgggcataaccctttcctcagggtgatttatataaaggtttctcaaggttatagttgggcaattagttcaacataagtacgttagtgcatggtaggatgggggtggtgtgtacctagagctctaacagcgacctgtttcagaggaagtgggtgaggtctaaccttatgtaaacatatttttttaaaaagaagtggaagggagcacctggctggctcagtcaaaggagcatgatctcagggtcatgaggtcaagccccacattaggggagagattacttaaatagataaaacttaaaggaaaaaaaaagaaggggtgcctgggtggctcagcgtctgcattcagctcaagttatgatcccagggtcccaggatggagctgtgcatcgggctccctgctcagtggggagcctgcttctcctctctctgctgctccccctacttgtgttctctttgtcaaataaataaataaaatcttaaaaaaaaaaagtggaaggactgaacaccaaagacacttctgttgctaatctaaaggatgctgtttagttggagtgagaataagactggggaggggttctcctgtggtataataaccataagccttgatcttactcatggagctcattgtttcaacagaaactcctggatcctttgtcagggaggttgagataaggacacaaagaactagaactagaaggcagcacatcctgtgtgtgccctgtaggaatctggagaactgaagagaacttcctgaaggatgagggattggagaagaatggagaaggtgtcacaggaaaggggacaacaagaggccagggtccaggggaaggagggctcaggaaggcccagtgcaagggggtgagtggggacctgggactggaggggaactcaggaagctcagaaaagcctcttcagagaagatgtaagaagatgcactaatgcatcagcctctgagtgtggactcaggagccctgctgcctgggtttgaatcctggctctgctacttaacacccgtgtgaatctgaggcaaggcattgaacatttctgtgcctctgcttcccctatgtatactgggggcaatgacaaaacctgtgtcataggctttttgtgagggttaagtaagcccttacatataaagggtttagaatagtgtctgtcatgtaacagttcctgttcataagaagtcttcttccagaagcagcctgtgagacaaggattcaaaggcaaatagtgcatttgagaggtggtgccaggaaacatgggtatggactgggaaagtgggatggggaaggaaggtagtccataaaaggtgtgtcatcaagcaaattcaccactgtggatgagtggagattagctccactgaggaccctggagaaccctggggtgcagaacgtcagagttgtcccgtggtggagagtgaataagctgggatatttatatgcccactcctcgcagtcacagattgaagcctgctttcggcgggggggaggggcttaattctctggcattcccaggtttctgtgcgtaggtggagcaggacactagagaaaccttcagaaaaagagatagagacattgctattggaagtcgatggccctctccaggggccatcccaaaggatgtgagtgatgcaagaacagatttcctacaaacataaagaagtgcgttgagtaatattgaatccataactaaaatcacacagtacgaaccagttagtttccaaaaccaggggatgatctgaaaatgggaatcggccctgcagttgccaagggaggttgagggtggcagattctaagacgttagttagatccatgctaagtgctcagattggacaaggaatagactgtggctgaaaggagaccatactacaatggccctgcctgtctcacaggccgatcatttttcgtatgattttttaaaaagattttatttatttatttgagagagagagcatgagtgggataggggaaggggcagagggagagggagaagcagactcccctctgagtagggagcctcatgcaggacccatcccaggaccctgagatcatgacctcagcttgaaagagcagatgcctaactgattgagccacccaagggctcctcatatgaaattttcaaggaactgactttcccatgagaatagtaaggcctcctgagaggccatcatgtcatcacttcttttttttaacgtgtgactaggggacgagttgcaaagtatggtgtgttgcttttttctctttagaattgatcccctgggagtatgtattagaagctttgaattgttgagaagaaattgggcaagaggaaagacactggcaggagtggaggggctgtccttttaagcattatttacctccttccttccatctggagtgaaaacattgcaccaggctttataatgatgctaaaaatagactagccaaggtcaccttcacccaatgggagtctactaaaaatcaacttaggagcctaaagaggggaataaagatctggtgtcttcaggcccagagcctctcaggtcatggtccttccactctggactgggcctgatggagacttggaacagttacccaactccagtgacccatgtctttgttcaccttgatttgccattatgcaatgtagcatttccgtgtgcagctgatctcctctcttttgtgcatttttgtctcccaaaactttctaatatggtattagagttctagctgtgtatgcggtaggcaaactagagaccacatttcccagcctgtcatataacaaagtctttgccaacagaatatgagcaaaagagggactggaatgcagacttgatggagacttctttcgaccatgcagactagggtgattctcaatggcacggcagatggaaggagcctggggtcctcagtgatgctgatgagcaactgtgcccggccagccagggccacctttgccatattagccctgcctgctcatgctgagggtcctatttgtgagagatgcaaacttctgccttatttaattcactgcatttgtgattgtctttatcacagcaacttacattagaccctgatgagtatatgtctgtgggtgttgccttcggctttcatactgatttctggctaactaaatgtattagttagatacatgtttggctgctaaaactcgggctaaaataacagtggcttaaatgggctgagcttaaaccatccagggcagttatgatagccctgcaggattagggagcggggcttctttaattttgtttgtcatcatcaacatgtgacttccatcttgtggtctagggtgactattttgtcttccaccagtgtatctgcactccagccagtgggaaggggagaagaaaaattgaggtgtacacccctttaagagcataccccatgggcccagtggaaaacttggaagttttatttattttcattattttttaaagagtttatttattttattcatgagaaacacacagagagaggtagagacataggcagagggagaagcaggctcccttgggggaacctgatgtaggactcaatcccaggaccccgggatcatgacctgagccaaaggcagatgttcaaccagtaagccacccaggcatctcaacttggaagttttaatacttaaggaagaagggggaatggattctgacagactgctaagttttctaactcgacaagtgctgggagaaactcacaaaagaaagtcaccccctcttttaaagatggcttttacatatgtactgggcgtatatatgaatgtactgggctgccataacaaaacacctgcactgggtggcttaaacaacagaaatgtgttatcttacagttctgggggctggatgtctgagatcagggtgccagcatgtttggtttctggggaggactttcttcctggcttacaaataccatcctcacctgggctttcctctatgatgcacagggatggggataggagggaggtgtgttggggagggagagagacagagagagagagagtgtgtgtgtgtgcacaggcaagcgtgttctgctgtcttttatggacacttatcctattggatcaatgccccactcttatgacctcatttaaccttaattacctcttaatatgccctatcatcttcaatacagtcacattgggggttagggcttcggtatgtgaattttggggtgatacaatttagtttgtagcagtgatctaaagaagggctttaaaactcagtggtttaagtatttagccaggcaaagattcattatgttctgatgacaactcccaaatcttggttgccataggtgtttttcaaaatatgggcagaaatctctcctatactagtgtggatgcctctttgcagtatgactttgccagtcttcccatcgtgaggttgggtttcccccacccttaagtctgggcggccctttgatttgctgtcaccaatagaacatgatggaagtgatgttatgtgatttctgaagatagggctcaagagaccatgcagctttgctttggatctcttagaatgctttcctgaggctgcttatgcaaggctagggatgaaagaccatgggacagagaactcccggtgtctgacttctcctgctgaactcagccctcagttgagtgcagctgcctgagtgagcccaggcaagagcagcagaagaaccaccaggctaatgcatgagaaggaataaatcattttttaaatcctctatattttgggtggcatttacttttttccaacagcagtggtgatgtaatagattaaaacaaagatttctggttcttttttcctcgctcatattacatacatatcctgtgaggatcagcagaggttctgcttttggtgtctctcaggaatgtaagacgatggagcagccagcatctcaaatgttgccatactgggggaagagcatggtgaggactgcattggctcatgaagcttccatctggaaacagtacacgtcacttacatttcattggccagtgcaagtagataaggaagctcaatcttactatgtgaccaaagggagacaaagccagaatatttgtgaacatccttaatatccaccacccttgggatccctgggtggcgcagcggtttggcgcctgcctttggcccagggcgcgatcctggagacccgggatcgaatcccacgtcgggctcccggtgcatggagcctgcttctccctctgcctgtgtctctgcctctctctctctctctctctgtgtgtgactatcataaataaataaaaattaaaaaaaaaatatccaccacccttaagatagtttctctctggtaacaatctgagtaggtagacagggctgatatggcatcaacagtgtcagggatccaggctcctctgtctgcttgctctgtcatcctcaggatgttgcttttgaattaccatcagatttctattttagcccatggaaaggggaggacacatttaattttggaatacatgtaacttggaagttacatgtatcagttctactcaattcctgttggccagaaccaagtcacccattatttagctgcaagggtagctgggaaatgtagtctttagctgggtgactgtgtgtctcactaaacatctttctgtaggagggagagagcacagatactatgtgccgggaaggcaccagcaactctgccacacagcacctctgggacccccaacaccaagggtgtcatggtcttcctgcattgtcagtttcatccaaggtgggcacactttgcatatgtgttattaagaagttattcataatttgaaagagttttcacaaacttaaatgatcacaaatcaaaaccgaaatgcaataccacttcacactgctcagaatgattaagataacaagccaggaaacaacagatgttggtgaggttgcagagaaaggggagccctcatacacgattagtgggaatgcaagctggtgcagccactctggaacacagtatggaggttccttgaaaagttgaaaatagagctaccctatgacccagcaattgcagcactggggatttatcccaaagatagaaatgtagtgatctgaagggtcacctgtaccccaatgtttatagcagcaatgtccacagtagccaaattatggaaagagcccagatgtccattgaccaatgaatggataaagatgtggtttaaatatacaatggaatattactcagccatcaaaaatgaattcttgctatttgcaatgatgtagatggaactgagggtattatgctaagtaatagagagaaagacagagaaagacaattatcatgatttcgcttatatgtggaatttaagaaacaaaacagaggagcataggggaagggagggaaaaataaaacaagatgaaatcagagagggagacaaaccataaaaggctcttaatcataggaaataaactgagggttgctggagggatggtggtgggggcatagggtaactgggtgataggcattaagaagggcacttgatgagcactgggtgttatataagactgatcaatcattgaactgtacctctgaaactaataatacagtatatgtcaattaattgaattaaaattaaaaaaagaaggaaaaaaaaaaaggcacatccaaaatccaaaaatacttttgttcctttgggtaaaccaatcccagacttatttattttatgggctgggaatttttctaccggactttccacaaaagtgttttaaacattttccagactccaaaactaagtgttgatttcgtttttgtctttagattctttctggggaagggttgcaaggaataaaaagattgtgattcttcctatttagcaagaattcctaagaaaattagccccaatctcttgcaggtttatgttcaagaagacaatactatcccaggatctcaggaaataaagttcacttggcaacacctaagagaaaactgaaactttacttaaataaatgattttgcaatatcttggatggttttgggtttgtgtgctttagactatacatgcaagagcatgtgtgtgtgtgtgtgtgtgtgtgtgtgtgtgtgtgtgtaggggggtagagactgagagcagtatggaaagcctatggtacagagcaactgactaggatatgtggggttagagaactggacaagggcttcatcctctcagctcagcctccagtctctgattatttttttcctgccaagagcacatcccccctgcggctccctagtttttcttctctggcagcaaatgaagcagctgctgagtcagctctgggtttcgggaagtcagatgaccttttccctctgccggctttctgcctctctctgccccaaggtggataccatggacccactgatggctctcctttgcctgttgcccttatacccaggtaggagcaggggagagggatgctggagtcctgtggaaaaggcctgtactgcccaccttgggttccctcttgtaaatgccaatttctctggcttttctgttctcatcttttctccactactgtgttgtgtgtcatgctcacaggcttggctgcagccgctccctcctgccctcagaacgtgaatatctccggtggcacttttaccctcagccatggctgggcccctgggagtgtcctcacctactcctgtcccctgggccgctacccatccccagcatcacggctgtgcaagagcaatggacagtggcagaccctgagatccacccagctcacaaaggcggtctgcaaacgtgaggctctctgtgggctttgctcagggtggggctgaacctgactacatggtgtgccaggggtggccaagctgtttttccatagggcttttcaaaataatgagaaaatgtccattgtccatagcaaggcattagagaaaggccttaatggaaatttaaaaaaatacacggggtgatattttttttaacatttaacaattgactacagaatactgaccattcagaatgggtgctggagtctcccgatgccaaatgttaccctttagtgtccattcagggggtatttgaggaactcaggggagaggttgaggtgtccatggccctcagggtgctgagagatgtggttatttatcagtctgataggttgaacagtgtgaaattgccaatattcgaccaattgccacaagcagtgattgccacaagcagcaacccaatattttgacaatcagttggtgactcccatgcatccacgccaaaccttaccatcccaggtgttttccatccatccgtgtagtctcatccccttctctccctccagatgttcgctgtccagctcctgtttcctttgagaatggtatgttcaccccgaggctggggtcccaccctgtgggcagcaacctgagcttccagtgtgaggatggcttcaccttgcggggctcggctgtgcggcagtgtcgccctaatggcatgtgggatggggagacggccgtgtgtgacaatggtggtgagtgccctgccctcatagctgcaggggcgggggtcacccgggaaccttggactcagatgtgtgctcatggggcctgtgtggggacaggggcctggtgttctgatgccaaaataatattcctggattttggttagttgaggtctacaggtcccacatcaccaacctacaggagctggccgaggcagttgctgctaagtttcagatccaacgtaaggcctccacacagtctgtctagcttttcccaatgcctcaaagcaagattggtattcaggcccaatgggctattgtactgacaacgtcctgagagagctcctagtgctgtgctgaattcagtgccttgcctctggagccagttcgggtccaacctgggtcggacttggatagcttttgggcaggctctttaagctctctatgcctcgattttcacatctcaaatagggatggtaagactggccacgatattagggcttctctgtggattaaatgagttgacattaataagcacctagaggggggatccctgggtggcgcaacagtttggtgcctgccttaggcccaggccgcaatcctggagacccgggattgaatcccacgtcgggctcctggtgcatggagcctgcttctccctctgcctgtgtctctgcctctctctctctgtgactatcataaataaataaaaattaaaaaaaaaagcacctagaggagtccctggagtttagtaaatgacacatatgctgttgtcatagttattactgctcctgtcaatggtaaggagctctgcttgataggacatgggtttctaggattctctgggtttggggagctctggaatgatagttctaagcacagaagacagaagacacagagtccatgagatggtaggaccatcccatcacccagtggcccagccattgggtccctatgcatattcatgactgtttgccaaatagctggcttcctttactcagcatttttttttaattttaaagattttattttattcatgagagacaagacacacagatagagagagagagaggcagagacacaggcacagggaaaagcaggctccatgcagggagtccgacgtgggactcgatcctgggactccaggatcacgccctgggctgaaggcaggcgctaaaccactgagccacccaggcgtcccatttactcagcattctgcctgtgagatttatctgcgtggtctcgtgtaggagcagtttgttgtttaatttttaaaaagatttatttatttattttaaaaagagagaggagtggggaggggcagagagaatcagaggcagactcagctctctgtgctgggcacggagcccgatgtaggacttggtcccaccacctgagatcaccacatgagctgaaaccaagagtcggacgctcaaccaactacgtcacccgatgctcctgttattttttattactgtgtagttttattatacaaataggttacaatttatgtgttctcctcttgatgggcacttgggttctttccagtttgaggctattatgagtaaagccctatgaacatccttttatgtaacttgttggtgcacgtatgaatttgcttctcttgagcatgttgtcttggaagggaattattgggtcacaggttggcatacatattttattttattttattatttcatttatttttttagagagtgagagcatgagggggaggggcagaggaagaggaagagagagagaatctttttttaaaaatatattttatttatttattcatgagacacagaaagagagaggcagagacacaggcagagggagaagcaggctccgtgcaaggagcctgatgtgggactcgatcctgaatcctaggatcacacttgagccgaaggcagacgctcaaccgctgagccccccaggcatcccagtgtttcagcgttctggctgctcacatcctctctgacacttggaatgagccatattttcagttttagccatcctggtgggtgtgtagtgatgcctcctgtggtttatgaagtgcaaatattatttgtggcggcagagggctcctgggtcagcaccttccgtgggctctgggatgggctttccttgggaagcacggtggtggtgtctcccaagggggaggccagatggcccgcagaggctccacgggcctggggaggaggaagagctagagggacagggtgggtaagggtgtcccgctcactgccatctttgtgtgttcactcccagctggccactgccccaacccgggcatcccggtgggtgccgtgcggatggggtcccgcttcggccttggggataaagtcagctaccgctgctcctcaaatctggtgttgacggggtctgcggagcgggagtgtcagagcgatggggtctggagtgggacggagcccatatgccgccgtgagtagccagccgccttgaccctccagggactcccgggcaccccacccctgaccctggccgaccccagtgtctattcccacagagacctactcttacgactttcctgaggatgtggctcccgccctgggtgcttcgttgtctcacctgcttggagctaccaaccccacccagaagaaaagaggtaaatgcttgaagtaggggcagcagggtgctgggcctgggacggggaggagcagactctgcagaggatgctggggctttggcaaggctcagtggggctgaactgctcggaggggggcagggaggcctacccctggcaagagggaaggagtatggggaaggcaagaggaagatgtgaatttgccccttctacgtttctcccagagaacctgggccgtaaaatccaaatccagcgttctggtcacctgaacctctacctgctcctggatgcctctcagagtgtgaaggaagaagactttcacgtcttcaaggagagcgccattctcatggtggacagggtcagggaataggggcctgtgcacaggaggcccttcctactctcgctgtctctctctggttccttcccttcctcagaactgcactcacagcccacctcctccaaaaagtcctcccagattaagtgcatgccatgcaggaatcatggattccatttataagatcccatttttcatcccacaaacagtcctggggcaccttgtatgtgtcaggcaccatgctgggtgctgggtgctgggtgctgggtgctggggcacaccaaagatgaacaggctgaggtcctgtttcccaggcacccatcatctagagcggtggtctccacaggagaatatacaaaatgatccactagggtgtgacagattactactggcatccttgttgaatagttttaagttaaattaaatcaacaaattaatatttaatactttccattaaaaattctaattttttgtgtttaaaaggtgtataatacatttgaatagcgatgcaccttataaataggagtttagttttataaatacatatacctccatgtgtttttactaatgacatgcatgaacaggagagtttggaagtcactagtttagattccttgccagcgctttgctcagtaattacacttttcacaatagttcatgtagatatatgtgtttttcttctcagttacattttaaagaaggcaacttttaggctccttgaagtctctcctaagactaacagtaaccactaagccgtgaggctgcacaacacgccagctagagatgtgcctcagattcgcgtggacaggttcaaatttgacctccgcctcgcacaacaggcctcagtgtcctcatctataaaacaggggccatctcgccccctcacagaattgatgtgggcatacaatgggagcgagtgagcctatcaaacagagtgcctggctaacaaacgtcggtttcctggctccctgcgagcagcagtctcttagtgactactggtggccctgacctctgtaagtcttggcccaggctctctgcctcctctgggacccttggtttgctctcttattctctctccttcggtttcagggcctctaatgctgcctctcacttgcccttctcagatcttcagctttgagatcaatgttagtgtcgccatcatcacctttgcatccaagcccaaaatcatcatgtctgttctgaatgacaactcccgggatgcgactgaagtgatcaacagcctgaacaaggtcaactataaaggtatgggtgtcatcaaatgaaggcgatgaggcaggggtcaagggacaatgagctccctgtgcccgcacagattttggacaagttagagagagagagtgagtcctttggtggcattctagtcccaagactctggaactcatgttcctctgggggaggtggcttccagttcaggttcatgtcaggggaatcccagctcccaccagctcatggcttactctaaaatgctacccacccaaatgcattgtgctggtctttggttctctcctgatgccagaaccatgtggctttcttggctcaacaccgtagtctctccatgccattgtcaaggtgcctgggtgacagctagcaggtggctgtaacaatttctttgggaaccccatctttgaatcttgaggctttagagtggccttcagtgggcattacttcttctttttgtttaaagggtatatttgttaattagagagagagacagagggagggggcggaggaacagagggagagggaaagagagaatcccaagcagactacttgctgagcatgcagcccaatgcagggctctatcccatgaacctgagatcatgacctgagctgaaaccaagagtcagatgctcaaccaccttagccacccaggcaacgctgcagtgaacatttctaaaggaaaagacttttaatgtttgaacaggcaatgatgccaaatctctatctggatagagaaggtctggatttatcaagccagttgataaatgtatttccaatggttgggagaatagggtaattcctttctcctaggtggtaggtgggggcatttctagagaatccttcctcttcacatattccagaccatgaaaatggaaccgggacaaacacctatgcagctttaaatagtgtccatatcatgatgaataaccagatggatcgcctcggaatgaagacggcggcctggcaggaaatccgacacgccatcatccttctgacagatggtgggtatcgttgcctctgcaagtgagtctggcacagtggaaggaccaccagtgtagggtcggaagacctgcatgttgattctccctctgccactctgggcctcagtttctcatttgtaaagtcgagatagtgttgatgatgtcaatgggataacaacaacgataacgatgatcataaccaccctcctttcctgacacaatttttatggagagcaaccgagatagtttgtgtagaagtgctttgtgattacagatatcagttatggttactaccgcaaggttgcctagagtcagctagatggggaggcatggctttggggcagggatgtcaaggcgcatggatggaaaggtggacgtggagtggagctgggctatgtcatttatttctcgattgtgtccaaattacatagcccctcagaacttggttttcttgcctataaaatgaggatacccacactacctgaggtttcatgagaattaaatgagataaagtttatgaagctcctggcccggtgcctggaatgtcgagaatttcgccaaataacatatcttgaaactcacgtgggaagcgataaatgttaaggttcccagctggatgcctgcccactcctccggagctgtggagagtccagatatattccccagatggacaattcttttccctccattctaggaaagtctaacatgggtggctctcccaagctggctgttgacaatatcaaagagatcttgaacatcaaccagcagaggagcgactatctgggtgagcctctccctcctccacccccagatgtgctgcccctgcggtgggtgcaggctggagtgggcagcttgccttcatttccagcgagaccccaggctgtgtcgttctgtgtgaaggcagctgagtcatgctcgagtctggtgtcaaactgcctgtggttgcagccttggtttcttttgttggctgtggccggggctggtttctgcctttgctacaggggacggtgctaggactcacctcagaggcccataggggcaaatactcagatatctcctggtgcagaggaacagtgtatggaacagtgtatgtgagcggctgctgccatcatcatggccttgaaactccagggaggaagggcctggactctccttgtagggaccgtccctggcgtttcctcctttagcggtatggataaccaactaaggctttggcagttgccgcctttaaaggaacaattcctcggggttcagactaaatgcaaatagcattgatctttgaccagaaaagaattttagagaaaagtgctctgtgtaagtagggacagttgctcttgaacctccaagtttcactttccccttgggccttctcttcatggccccaactccaccctcccctcaggagcaagtggattcctttttaagactctggcctagggaaggggaaggccaaactctccccgctaactccttagcatcactgggctagggttaaaacaccattttagaataccttattaaaaaaagcaggtactaaagggacatagtcatagaaaacatgcagaacctaattgtccaactcccactgtgactgcttctggcctgcggggggcgacactgccacctgaggaaagcattgtctgccccccatctgcctgagcatctcactctttgcacaccactcagggtcctccgggagccggaaggggccacgaggggtgcaaagcacaggagaagcccggacgctgcggccaccccgggcagttctgactgctacctgttctctcttggaggcaggatgtgaatggtcatgtgggcccaggttctccggtgggaagagatggctccagacccccctctcggagcctgtaccttacagaggaactagatctgaagtattgcctccaagctcgctcataggctctttattcaatcataaatgtccttaagtacatttggaagtctctcctgggcatcattctaaggatatggctgtgcagaaaatgaacaaaaatgcctctctctggggttgtcattctggaagggcattgcattagtctcctagggacactgccacagatcatacaatctagggtgatttaaaacaacagaaactcatggtttcacattcaggaggctagaaatccaagatcaaggtatcagcaaagaccctatttccaaatagggtcaccctcacaggtcctgggggtgaggacttgaacatttccttttgaaggcacagttgtgcccactttgggcatgaaacaagataaataaggaccccatatggcgtggtggatggtgccctgggacaaggtataaaatggaacagaaagggaacagaattggccaaggcatagcagttttagacaaggatcccaggcaaggcctcactgagatagtagcatttgagtcaagatttgaaaaggtgggacgcctgggtagctcagtggttgaggcgtgtctgccttcgcctcagggtgtgatcccggggtcccgggatggagtcccacatcgggctccctgcatggagcctgcttctccctctgcctgtgtctctgcctctgtgtctctcatgaaaaaataaataaaatctttaaaaaaaaaaaaaaaagacttcaaaagttaagaaagtgagccgtgtgggcagtctgggcaagagtcaaccaggcagaggcaccgcgtgtgcgaaaggcctgggttgggagcacgcctgcaaatttgaggaacttcaaggaggttatatggcagggagtgaagggtgtagagtgtcgggaattgaggccagacaggtagtagagggtggggtccagctcatttagggctttgtaggacccagtgagttccaaatgataattccctgtctcgcagggtagctcctcagccacaagattctggtgatttccttctccccatcagacatctatgccattggggtgggcaagctggatgtggactggagagaactgaatgaattgggatcgaagaaggatggtgagagacatgccttcattctgcaagacacagaggctctgtaccaggtctttgagcacatgctgggtgagtgagctttgccctcttcacaatggagccggctaggggtccaggctgggaacctactcatggtgctcctcacaaacctctttccccctctgctcccacacccgcagatatttcccagctcacagacaccatctgcggggtagggaacatgtcagccaatgcctccgtccaggaaaggacaccgtggcatgttattattaaggtaccgggaaggagggaagggacttgggtcccagaagtagaagaggaaatgggccagagacatagcagtcccccaaaaacacctgtttgcctgcagcctaggagccaggagacctgccggggggccctcatctcagaccagtgggtgctgacggctgctcactgcttccgccatgctgagaacagctctctgtggagggtcaccgtaggtaaggggggggtcactgtgggtaaggcagggtccacactaggttcctgaccctgtggctggagctctcaacagcagtcccagcctctggcctccctggaagccctggccctgcctaatctgcttatttttcccaggggatcctaactcccagtggggcaaagagttcactattgagaaggcagtgatctcctcggagtttgatgtctttgccaagaagaatcaggggatcctcgagttctatggtgatgacattgccctattgaagctggcccagaaagtgaagatgtccactcatgccaggtgctagagtctgggatgagagggcgtcctctgggggagagtgctctgggaagtcccacaggaggggacaccaaggatgggctcctgtgactcttgtctgtctccccaggcccatttgccttccctgcacggtggcggccaacctggctctgcggagacccccaggcagcacctgccgagaccatggtgagtgctgggcctcaggtgcgtgaggactccagtctggagtctggatgctgcataaagggaccagcatcacatccctctctccttaactgcagaaagtgaacttctgaacaaactgagcattcctgctcattttgtggccttgaacggggacaaactgaacattaacctcaagacagggacagaggtgaggatctcaggtctgggatgctgtgaggggatgggacccctgtggcagctccccaaagtctctctttgtcccttcctcctccagctctggcagccttctccctctgaccccatgccacctcccctccaaggctagcaactgtaggtagcccctgggactgctcattccatccctctgtcccactctgcccctgctgcagtggacaagctgtattgaggccgtttcccaagacaaagctatattccccaacttgaaggatgtccgagaggtggtgacagaccagttcctatgcagtgggacagggaaggatgacaatccctgcaagggtaagtccctcccacccccccacccccaccccgagcctggatggctgagggagagaccaccgccatccctgcggccagcatgcatgccaagacagtggtgcactgccctgacgacaggggcagggtgagagtcagaatgacaatttcttgtccctccttctggcaggagaatctgggggagcagttttccttgagcggagacacaggttttttcaggtgaggagagaagggggatacttacaggaatggggttacaagatcatggccttgcagggagacgagggcggcctttgaaggaactggggaggttgaggcttggagctgaggctgtgacagcctcccaccccatttctctccctcttccaggtgggcctggtgagttggggtctctacaacccctgtagcaagagtaataaaaactcacgccagaggccccccaagggcaaggaaccacgagattttcacatcaacctctttcgcctgcagccctggctgcggcagcacctggaggatatcctgaacttcttacccctctaattgtggccacccatccctctgttgtcctgccagcatctgccatctgtcttgtctcgcacccttgaactcagacccatgacccatctgtgctcccggcaaccccagagaagcacatccaggctggggaatccccaggggcgcaccctctcctttccttgactcactctcctttcactcatgtggaattacccagttatgaaattaataaaaatcgacaatgtcctcatctgtctgtgcctctacctggggggtggccgggggcggggggaggggagagcggaggaaggccagaatgattccaggaactgcagggaggcaggtcacggaccctggcgcacaaacagtggctggactctgctctgtgacagagtggacagggagtgagccagcctttatttttggtccctaagggggtggtctgggcttgttgggggaggaactggggctgagaggtggtgttgaaggtgtcagtccaggttcaccgcagcaaagggcagggcttaggcagtttctatttccttgactggcagctctgcggggtgggggtggagggctccctcttggacattccggaaagtggtgtgggtcaggtgggcggggtgagccgccagtgccagaacagattgcataaagggccggaggtggtgggggggcaggggaagagacagcaaccagactcaggtctgaagtttcggcttgggcgctgagcgaagcagacaggcagcaccagcccgcagagaccaccctgtccccacccccagtctctcctgctcccatcaccatggggagcactctcatgcctcaactctgccttatatccttggtgctgggtctcttgtctggaggtaagagagggtcaccactcccccttcctgctgcccccagcttctttccttggccttgtgaggctgggcttcaacagcctttctcttcaggtgggagtgccacgccattgtctgaggccaggccccaaggcccctgccctctggagggagtacagatcaaaggtggctccttcagactgctcaaggagggccaggcgctggagtacctgtgtccctctggcttctacccataccccgtgcaggctcgcacctgcagatccacggggtcctggagcaccctgcagacccaagacaaaatggttgtcaagaaggcagaatgcagaggttggagggcagtgagggtgggcacggggtgatgcagggatggagcaggtggtggccgaggcccagcctaggacgctgtgagagttgggtggagaccaagcaggttgaggggtgaggatgctgagcaagtgcagcagctgtcgaggactgaagggaggggggtggaagaagggagcgaatcttcactgagcacttatcctgtgccaggcagccccggcagtgaaaggaacactgagaaagggggagcatggagaagcaggactcatcatgggtcaggggtaggcgtggtttctgagggaccagaaagaccctatgtctttgtgatagggtccctgaggcccggagggagactctcaagagcagccctaacttctcagtaacttctgcttgtcctccccctcccccaaagcaattcggtgcccaagaccacaggagtttgagaatggggactactggccccgggcgtcctactacaatgtgagtgatgagatctctttccgctgctatgatggttttactctccggggctccgctaaccgcacctgccaggccacaggtcgctgggacggacagacggccatctgtgatgatggaggtgagcagcatcccctcccccgtcgacgggatcctctccctcctgggggccgtgttccagcctgaggaaggggcgtcacaactcctgtgctctcctgtgccatccgggcctcaggctttggctctcacctccgcatctcgtgcttctgtagcgggctactgccccaacccgggcatccccattggcacaaggaaggtgggcatcaactaccgccttgaagacagagtcacctactactgcagccgaggcctcaccctgcgtggctcccagcagcggacatgccaggaaggcggctcttggagtggaaccgagccttcctgccaaggtgatgcttgccccatgccctcaggttcagatcccgctctttcatcctcctgtccctaccccagagccctgtcttctccctgtagtgcagcccagctcctcccctcgcttcacctgcccctagaacgtcctcactgcggagcccttcctgccccgaaacccacctactgtcccgtccctgtccatgtgtctctggccctccccccaccctgacacgtgacctgctttctgccctccccagactcctttatgtatgacacccctgaagaggtagccgaagccttcctgtcgtccctgactgagaccatagagggcgtggatgctgaggatggccacatcccaggtttgagtgcagaccacggagggaggcagggaactaggggaggacgaagaggcaggaggaccctgcgtgccagagcctgagtttttctggtggcacccaggggagcagcaaaagaggaagattgtcctggacccgtcgggctccatgaacatctacctggtgctggacggatcagacagcatcggggctggcaacttcacaagagccaagaactgtctccgggacttcattgagaaggtggggcccctgctagaactagttccctggtgtccccagcccctctgggctgcagaacctcagaaaacctctggtcctatactgtctttcctcctttttacttgaagtcgtttcttgacctttcaccccatcacccaggcaaacctcagggtgacccatgagcctttgggtttctgaggaaaaccttccctgtcccagagaagctgctgacctctcccaaccctagtcttctttcaacgccatgaccctttgctcccctaacccacaggtggcaagttatggggtgaagccaaaatatggtctagtgacatatgctacaaaccccaaagtctgggtccgagtgagggacaaaaacagcagcgatgccgactgggtcacaaagatactcaaccaagtcagctatgaaggtcagaggtcagggaagggactggtggaggaggggtcactttggaatcagagaagtcaaaagactcagggtggttgtggggagaccacgtgagaaatcagggaagaccactttgcgtctggggttagacggcagacttgttggtgaatatgggtcaccggggacctatcgggggctgaggaggtcacttttgtggccaaaggaaagccagtggggtggcaactcaagaacctgagagatgtgggatttcagttgttggcgggcctctcagggtcatggatgacttagccaaccaggcaaggtgaccgcttccctttccccagatcacatgttgaagtccgggaccaacaccaagaaggccctggaggcagtatacagcatgatgaactggccaggggagacccccccagcagactggaaccgtacccgccacgttatcatccttatgactgatggtcagaaggaactcttctcctgccccagattccccagcctttcatatgagtgggggactgttcggtccacgtgcaacaccagactgtcacatggttggggctctgagtactgctcagggccccaagcatgctgatctctcctgtgaccctttacagaggaaaggaggaatccttaagcttctgttgggatctgtcacttccatcccctcaatctgcttccccagccatgtgtcaggacttctggccaatcttcctcgacccccttctttacttgcttcccaccttcacaggccctgtttcttctataggcttgtacaacatgggcggggacccggtctctgtcattcacaatatccggaacttcctggacattgggagggatcacaaaaacccacgggaggattatctgggtgagttttattgcccaggagccagtcccttactttctcagctcttgctcccggggcctgggcactcattctccccatttcctcccacagatgtctatgtgtttggggttgggcctctggtgaaccaagagaacatcaatgctttggcttccaagaaggataaggaacaacacgtattcaaagtcaaggacatggaaaacctggaagacgttttcatccaaatgcttggtaggaaaagatcaggatgttataaagaggtcaggaacctccccaggtcccccaaggtcactcatacttcctcttctcctttagtcctggcagtctggaaggactttctcgctgctccttctttatgtcatattctggtttcctggcactatctgcttcccgatcttagaatcaccgagctctgaatgacatcagagagctttcttaaattcctcattttacacgcgtggcaagtgaggctgagaacaacctggggacagcaagctagcaagtttgacctgccaaccaccacgtctcccatctcttactttcaagttcttttcactattgccacagttccttgtcctcagtgaaaggaaacaaacactcctgtctttcctttccttacaggcttctgctcctcacaaacacgtagatgtccctccccttttaaaaggctgctgccatgtggaaatgaagcaccctacctttcagcatgtagtcagaaattttaaagtcattttcctttcttgttagatgaaacccggactctggggctctgtggaatggtttgggagcacaagaaaggcactgattaccacaagcagccatggcatgccaaaatctccatcactgtaagcaaggcgtcctggtgccagggacctgtgggaggcaaagtcagggtggaatgggggcgggggaagggcaaaatgtttatactagattgtggtttggtaagctgagctttcccctctgtcgttctgttcccagcgcccttcaaagggacacgaaacctgtatgggggctgtggtgtctgagtactttgtgttgacagcagcacactgtttcacagagaatgatcagaaacactcaatcaaggtcagcgtgggtaaggaagcagccaatcaatcctgagcttcagctgtgcaggaacccacgctcccacccgtcctcacagcagcccactatcttgcacactgggccacttgggagtggggaagacttgggagttaggcacaatgtggggccagatgtaggaggctgcccatggagaagtgggacgtcccgacatagccactttcctaccttaggagggaagaaggaattggagataaaggaagtcctagttcaccccaactacaacatcaatgggaaaaaagaaaaagacattcttgaattttatgactatgacgtggccctgattgagcttgagaagaagctagagtatgatcagacactcaggtgagccctctggagccctgagaagtttgggtgaggtggggccgcaggcccagggcagagccaacttctccctgaatctcatctctccttcataggcccatttgcctcccatgcactcaggcaacaaatcaagctttgaggcttccgccgtcaaccacgtgccagcagcagagtaagatgttcagggacaacagcacaaggggatgctaccaggggacaagtggggcgtgacagggtgctgcaagagcagattgtggccagcctggtccctagctcacaggaaagggttgggggacatttgctgagtgacaaagccaatggggaggtggctgggtagggtgggagagggctaaaatgacccagtctgtccatttgcccagtggaagagctgctccctgcaaaggacatcaaagctctatttgtgtcagagttatccaaagacaggaggaaggtgctggttcggaaggaggtctacatcaagaatggggacaaggtaaggaatgtgggactctaagcaggtcctccaggccccagttcttccagagcacactctattcaccctttcccctccacgctttatacctcatctatagaaagccagctgtgagaaagacgctcagtatgcctccggctatgagaagatcaaagacatctctgaagtggtcactcccaggttcctttgcactggaggggtgaatccctatgctgaccccaatacttgcaaaggtgagaaaaggctctttggttgtgctgcatgttcctgaagcccaagaattgctctccctacagcttttcctctcctgtaggtgattctggtggtcctctgattattcacaagaagagtcgcttcattcaagtgagtttcccctctcctgtctgtggggagatgccaagtggtcagcatggaccctacagcaggaaagctccgtgcatgtggcctgaaaggggaaggcgcagagcctgcctccttacaaccattccttgaaatggctggcttaggtccatgtgtctggcccgtgtgcttgggagaccagtacagagctgggtccccagtctaattcttctaggtcaactccaatgtaactgggaacagctgagcttcctgcgattaggaaggaaggaattctaccaaatgatccatggcatccccttgccctctccaggttggcgtgatcagctggggtgtagtggatgtttgcaaagaccggaggcggtggcagcaggtacctactcatgcccgagactttcacgtcaacctcttccaagtgatgccctggctcaaggagaaactcaaaaatgaggatttggaatttctgtaaggggttccctgctgggaaggggtatgagataaaattaaaacagctgcgacaatacctgtgttcaagatccttttgggagaaagaagaggggaacgtgcactggccatgtgttacaactgagataaaatctaacagctgtttttaaaggctcaaccccaatcccaagtgctgaaaaaccagaggctgagggagatgtgtgagcttccacctcagtgttttactgagaccaagtgttggcgcagatgaggcacacggaatacagctccattccctagaagccatccacaaggttttccttgtagacatcatcgctgtagacaatctgggtcctcttgtcccgatggcaacccttagggctattctggacagctggggagggaggaaaggatcggttaaggtctaaagcattgcatctgagcactagtgaggccagaggctcagagtctgaccagctcactcccggcctctggctctcgaagcccaatttcaatgctgccctctagcggccaggatagcctggctccctttagccccattaggtgggtggctgccaacccatccccgtggctaggagtggaggctgttgttgtggcctgcacagataccattagggatattttgttcttagaaccaccccagatgttattgtttacacaaatgaatgatgttaacccattacattttaaagtattaaaatttaaaaaatctctgtaggcctttgctgacatgctagtcatttcttgttccttttgtatggagggccactcttactctcaacacccctttctgcttacccctttgccaggaaaaccaacaggtatagtgggctattcagactaaactaagaaatgctactagacccaacgggagaaccattctgggtgcagctctgacccaaagcattcttccgccagcctcaagctattctttccccttctttttcctccctacactgacatgtccctctctttaccccatctccaaggattccatgcctaccattctggggctacagtgactcaccccaaaccagcctccattctcttggatctctgtaccctgacactgctgatcactcccctgcttccaaagtttgtgtcctttggctttaatggctgccccttgaatattccccaagcccaggcctgggtaactgcctgcctgcgccccctccccaaattcagtctcccttgaggatactaccaatttgcagccactctgtaacacagaggactccaacccatgttttcattcctcacttcgcacccaagttccagatctctaatttcaaatgtttataagaccaactacactccatctcctaataaagccacgtgagatgcccattttcttcaccaacctccctcacttctattttcttctgcattccagttactgctttgggagttattctcaatctttttctctccgttttctcccacttctaactgacagaaggcctgataattctcattcccattcccacggcctccacacagattcaggcctctatcaactcctcagaatcctgggacgagcagggaacaggcaggaagggtgagctgtggggcacaggatggaggaggaagaatccattcttaccgagagagccccagacagacttgccagtggcagcgtccagcatgggctgcttgcgggcaatgctgactttgagctgtacagactccacctgggtcccattgagctggggcagaagaggggaggaggcaaaggatggggagaaacattgcagacaaagcaaaggaggaattccaacagttgccaccctagcaacagactgaggacctgagattacatttcttgtgtgaacaggaagagactctttgtcaagaggaaatgatttcctcctggctcccagtattttaaagagaaaatatgaggatggcaggagggatggggagaacagatctgggaagtcccaacctcagcaacggcctgatctgctgactccatcttttcataggtgacgaaggcacagctgggatgaaaagaaaacagggtcagtatagagggcctatgggctcttgtgaacccaaccaaactcagtgctcacaggccgttggagataggctggtgttctccctcaaacccaggtcctcccaggacttattatcttaccccactgtcatccttactttctgggtgggtccatggagaggtcaatgatgtttccaaagggagagaaggccccacgaaggagggtgggcgtcatgtcctctccatacacatagagagtattacccttccgaggggccctgcgttcagggaatgaatccgaccctacgggaccaggagtcatagtcataagacgcaatccatttcagcctctactttaagaggccactttcctaggacctgcctaaacattttcacttttcccactagcccagatcactcactgcggaaagggccctctcgttctcgatcgcggtccctgtcccgatcacggtccctgtcccgatcgcggtccctgtcccgatcgcggtccctgtcccgatcacggtctcgatcccgttctcgatcacggtctctgtcccggttccgctcacgactgtggtcccggctgcggcttcgtgggggggaggttgaggagcgggcaccaccacgttcttcatagccccagtcaaagcttcgagggggaccatcaccagcccctgggccctctgcctcctccccatctggccccagttcccgaagccgatcactggaagacacaaaactggagaaaggcagacagtgaggatcaagggggcctttacctcaatcttctagaccctgggaagacttaacctactgcagccccagtttcttccactccagcccaaacctcccatggatacaggcaatcaccccttccccactcccccagttgggacccagtcgtctctctagttctctaacctctcatacagagatttcctttgggggcgtctggacgactgcaaaagaaaccagggacagttaagatgagtcctagttgctggcatatggccccaaatatgtgtcttcttgcttttctcattccctgggcccccagggacagagaactgggagccatacctcctgcagatcatcatcggcagatatgcttctttggaacggctggaaagtgggaactggccccttctcagggtcctgggaaggtcacagagatctactttaatgtgagagcaggaggaggcctaaccacggggcagaaggagttcctcttccctcaccctcttcttggtttcctctggcctctcttttctcctttaattcccttgtgcatttcttatttgattatgttttttttttaaagattttatttatttattcatgagagacacagaaagagagagaggcagagacacagacagagggagaagcaggctccatggagggagcccgatgtgggactcgatcccaggtctccaggatcaggccctgggctgaaggcggtgctaaaccgctgagccaccccggctgccctgattatgtatttttttaaatgatctaacataaagaatatttagcttgttgaacgcttctcaaatccgctgacctcttcaatctattcagcttgtcaaaacaacaaaatctagaagctcgactatggtagatcagacccagaaaacatgtaaaatgaactgagaagtcattcagtgtcttcactctatagatgagaaatctgaagctcagacctataggacaacttgcccgtgattgaataaacgctattttccccctatgttctacctcccttctgacttggaaggatgccctctgaagtcaagggtcccctgaacaatctttttgctcatgctcacctttaacttcccctctagggttcgagaacgcttgaagcctgagttcttggtctcagccttgatggcactgatggctcctgacttcactagctgctttgcctgctctgttgccgtggctgtgtccaccacaggctgttccgacagtgctggagtagtaaggggaggaggcattattttggccaggctgtgagaaagctcagtcccactgtgcccacttccagtctatccctgtctccccggtcactcacagcgtttcacaccgccttggctggctgtgctgctactactttgcttcttcagagccagcaatgcctttttctgggaacaagtgagaggagagggattggtgagggccagtccccggccaggtcttctcccagggtccctgggcacctcactccaggggatgcctttctcagaaaacaatgcaaatagtgttcctggagtggtacactgaggcagccctgcctcacacacggtccactggatcatctataataccagtaatacttaatctagccaaaccacagtattcaaaggctttccagagtctcaggtttttgaagacaaggaattcaaccatgggccagagccccaagatataagctgcaattaagtataagcctatatgcctttcttgggggcttcatccatccatcccctgtacgtttggcaaggacagactatgactttgtaacaaaggtatgcaaaaatacgagacacagttccttccctcaagaagcttacagtctatgaaacaagatgattagaagtaactatcaagaatgattgtaagaggtgcagactgcttgctactgtgaccaagtaatattatctcatgccaaatgggtattaaactggtccctggatagaatctacacaaaacagattgaaagaaagggcattttaggcaaagtaacaggatggcaatgatacagaaataaggtggctttgggaatgcatgtcttgggactagtgaatagttctatttgactagaaagggatgccaaggtaaaggctttgttctatagacaatgggaaaccacttacgggttttgaaaaaaagagttttgtgtttttagtggttcattttaataagagtgaaggaagcctgtccaaaaaaaaaaattgagaaacttctcgagaaaccattacaagtgtctacatgaacaacaaaaacttgatctatgaaatacacagaaaaaagcaaacagaagaagttgcttcaaaggaagaatcaagacttggcaaatgtttagctttgcaaagtagagaagtcagagatgagattttgattccaaacacctggaagaattggctgtggtcacccctatttggaaggtcaagaaaaggaactaaattagaatagataggaaggtgacagctgcaaccctgggtatctgagggcgatcggtaacagcctggatagaactgaaaaaacaaagtaggaggttacatccttggtggtgcaaaaagccacgaaaaaggagactgctccacagcaggatgcacagaagagaaggtgcacaccgagacttgggagaagcccagctctatgaggccacgctaagaggagctacatctccaggtatgagctagaagaacccccccatcccctcacactcaccccaggtgttctcaacagtgtagagtctgtgaaaggttgggccacgccccgacacactccctcacctttttcttgagtttgttgaatttcttctgcagagcctcctcctcctcgctcagtccggggggtatcaccaacatggtggctcctggttcaggggcagggcccaagacatctttccactgtcaccgcccagggttcacacgggatccccctgccccgcgcccctccaggcctacctactcctgtcttttgcctctccctaccccttgcttcaacgaggctgccgtccaaacccccgctcgtgcggaccaaccagcactccctctcctctccggcaatcacggccaccagcgctctgaggaaccaagtggcccaggcaggaggaagcaccccttccgtcgccaagacgatggcaccagacaccccctacccctgctgggggtacggcagccgcacggtccaaacggcacaggaggcagtggaagccgcgcagcgctctcacagcaacggagaggggaagaagacagaagagctcggaaaaaaggggcgaagcgtgagaaggagaccttacctgagggggcggtaaccgggggcccacggtctcgggcggcgcccgcgctggcggcggcgagcgggctcacagcgatgacgtacgaggggcggggaacgcggtaaccaaggcggcccgaggctacacacttccgcccggcagtcgcccggctccagtgagcttctccttggcgctcaacgccgctcccggcaggggtgtgtgacggaagtcgcctccacttccgcccgttccggggcggggcccgctcctcggctcctcgctgcgcttccggtctgcctgctgccgtgcctccgagatgatggacaccgagcgactcggtgagagggagagggtgagacgaaggagtagtcggaggggtggcccttggcctctgacctctgaccttcctcccgtagcgctccctcctccagatcccctggatctaccccttcggccggtggagctgggatgcacagggcgctgggagcttctgaatgtgcctggggctccagagagcaccgtgagtgcctgtagaccctgacattgaccctccttagtgttgcaccctagcacaagctcatccttctccctggagccctgtcatctgggcctgccttctgctggacagaccccagcccggtggacaacatcttgtgaagacagagaagggaatgctccacataccttggctctgagagctgctctttcagatgcggttttcccctttggagtcacctgtctccaagcaccagggcattgatggccagccttcaacaaggccctgactccccccttttcctaaaactggtgtttctcaaacttaagtgtgccttgtaattagtgtatgtgtgtgtgggatttttaaaaatacaaatttctaaacccaatcacagagatggcgaaagtattgtatcgtgacttattagtgatcattgcttcaggtaaaccagtagcgggtactttgccctgtaaaacgggacagtttggaaaatattgcttctgcctgactctcctagtcggtctggaaagtctaccatttctcatttaacacaaatcctatcattttcttttttgctttatccatacctaatgcctctcatcttgtccttcaccagcttccccatggcctcccgccctgtgcgccagatctgcagcaggaagcagagcagttgtttttgtcatctccagcctggttgcctctacatggtgtggagcactccgtccggtgaggggtctagactggtgagagaggcccctgaaggaaactgagacaggagagaaagcagacctgaaagctgttttccttttctgcagaaaatggcagaggaagatggatccttggtctctcctggccacactgggggccccagtgccctctgaccttcaggcccaaaggcacccaaacacaggccagatactgggctacaaagaggtcagaggtcaggggccacaggaagcagggtcgggaaagggtcaaaggcaagcacagcctcactgggattgtggtcctttgcctcaggtcctgctggagaatacaaacctatcagctacaacctccttgtctcttcgccggcccccagggcctatctcccagtccctttgggggaatccaacacagtaccctttctggccaggtgacttgtgggaatgggatggtaggagaaggtgccctcagtctcctggaaagggttccccctatcccgtatcaccgcaccccacgaatcctatttgtctatcttctccccaggtggaatggatgagcccaccataacagatctgagtactcgggaggaggctgaggaggagatagactttgagcaaggtgaggtggcgccaggatggacccttgggagcagggctgtgagtctggaccccgaggaagagggagcccaggcccatcgttgggctgctgcttagcccttctgtgtctttgagaaaattaggaaaaggcatccttgtcattacagtttttactgtcacctgctagaaagttgtgcagactacttgcgactgtaagtagccccatttgcaacatctgtgctgtgaagggcatcttgtaggtttgggtaacatatgacttgtgtgacactgtgtcatagtgctgattctgtgtctctgttctttcctttagatcttcttacggttccacctggcttcaagaaaggtgtggactttgcaccaaagggtgagttttagttttgggatggggtgcagaagtggtgttcttcttctgtagaacaaaggtagacatcaccaggtatccctttttaccttgttcctcagatcactcaactccagctcctggcttgctcagcctcagtcatttgctggaacctctggatttgggtgggggtgatgaggatgagactgaggcagtgggacagccaggaattcccagaggggacactgtttcagccaccccctgcagtgcttccctggcccgagcaagcagcttggaagacctagtgttgaaggttggtggttctgggcagagaaagaaggggccttactgaggtgctagggtgggatggggtggctggcttggttgggtctaagaggaagactggagtatcttttgggaggggtagtaatgaatagctctctgactgtatttctgtcatccctgcccctggcttttgcaggaaacatccacagctatatctcctccagagccccccaaacctgtgcctcaggagcagtgggcgattcctgtggatgtcacctcccctgttggtgatttctaccgcctcattccccagccagccttccaggtagggtggcccagtcctcacatgttcccctgtctcctctccgctgttctcttcatctcctttccccacccaggccagatgccttctaggtcaatcttggacctcagcttggcctggccttgctctggtatcccacagccaccttgcatgccccaagagctggaggcaggagtgctctttttcccttgtccgtccactatctatttctctctcccacagtggtcgtttgagccggatgtgttccagaaacaagccattctgcacttggagcggcacgactccgtctttgtcgcagctcacacatctgcggggaagacagttgtggccgaatatgccattgcccttgcgcagaaacacatgacgcggtacaggtcccctctgccttcaccagctggtcctgggtcctcctgcaccctttctgagtgtcatctcttccccacctcttaccggtccttcagatgagaggtctggggagaaactgagatagggccagaagtgaagtgggcaggtgtggcagggatagtggttagaagaagacctgcattagctttggaggggattgggctagaatttcttttcttttttttatttaaactgagttttctttcttttttttttccaaactgagtttttttttttttttttcttgttttctttttttaaagactttatttatttattcttgagagacacacacacacagaggcagatatataggcagagggagaagcaggctccccacaaggagcctgatgcgagactccatcctggatcctggggtcacgccctgagccgaaggcagagacgctcaaccactgagccacccaggcgccccttgggttagagtttctgtgggattgtgtcatgaaggagactgtgagggcagtttgggagggaggggggccacctgagctctggcatgcctctgagagggctcagggtagaagaggcgatgttgcccaggaggctctgggagaactgaccagctgacttcatgccctcttcccaggaccatctacacatcacccatcaaggccctgagcaaccagaagttccgagactttcgaaacacatttggggatgtgggattgctcactggggatgtacagctgcacccagaggcctcctgtctcattatgacaacagagatccttcggtgagagataggcactcaacacgggtggatttttggtcaggaacgtgaggctgctctggacagcatgttgactgagaacagggtggagtcaggagccactggggagtcagcttctggcctcttctccccagttccatgctgtacagcggctcagatgtcatccgggacctggagtgggtcatctttgatgaggttcactacatcaatgatgctgaggtgagaggcacgggagccccagactccagtagtcctctcctgtgggcctggatcacatatccctagtccacacacccttggggaccttactgccttctttgcccccaaatggaaccctgtgcgcttccctaggggcagaagagcagccccctctgagctgctggtgactggtcttctctctctgtgcccagcgtggggttgtgtgggaggaggtgctcatcatgctccccgaccatgtctccatcatcctactgagtgctaccgtccccaacgccctcgagtttgctgactggatcgggtgagatgcgtgccctgggacacatgggtgaatggggctgcggcactccttggttgggagtgggggtgaagactaccacagcaaggagagtggtcaggtctgtggaatagagaggaggaagtggtggggctggagtatatgtctgactcagcggctgccggaccccacttgggtccaggtcattttgtgttgggagaagagatgatggaacagtcttccagtctggctcccagaaaagtctgggtgaagccagacggggaaggcggcagggatgtggggtccttcctacactgttgcccctgacctgctgccttctccccacacaggcggctgaaacgtcgccagatctatgtgatcagcactgttgcccgccccgttcccttggagcattatcttttcacggggaacagccccaagacccagggggagctctttctgttgctggactctcgaggggccttccacacaaaggggtaagctggagatggggcagagtcagggctgggtccactgggtgtggctgtgatcactgacccccgctatgcttcaggtactatgcagctgtggaggccaagaaggagcggatgagcaaacatgcccagacctttggggccaaacagcccacacatcaggggggacctgcacaggtgagaactggcaggctttgtacctgctaccatgtgtttcaactctatccattcttccctcgttccccaggggtttggacttgagctttgagcactgtccgacttgacactgctttacctcccctcactttggccctgactggttcaggaactcaccacttcccccttcgtgccctcttccccaggaccgaggagtgtacctatcccttctggcctcccttcgcacccgcgcacagctgcccgtagtggtgttcaccttctcccggggtcgctgtgatgagcaagcgtcgggcctcacctctcttgatctcaccacgagctcagagaagagtgagattcacctcttcctgcaacgctgccttgctcgcctccggggctctgaccgccagctgccccaggtgtggatgggggtcttggggactgatggggagagaattctccaccaccttattcctgaccctgggtcttggctccttgcaggtcctacacatgtccgagcttttgcaccgtggcctgggtgtgcaccacagcggcatcctgcctattcttaaagagatcgtggagatgctcttcagtcgaggcctggtcaaggtatccacactagtagaagaggaactctttggagcacttgttgctctctttggggctgcccagagggtggaggggcaggtctttagacaagacagcacagtggctaagaactcgggctttggtccagattgcctgcatgtgaatcctggctgcactacttactcaccatgtgacctcaggcaaactccttaactttcctgaactttagctttcccatcttaaaatggggatgtgccagatcagcacaggcagtattcagaagagaaacccctcaaattagcaagtgtctgaaaagttattagtcatcagaaaaatgagaatttaaaatattcaaagagaaatgactttacagctactaggctgataaaatttaggaaaccagccaatgccaagtgttgccaaagacatcagagactataggattataggaaccctgataaaggtgtatagccagtctggagtggaccctggcattttgaggtaaaaaaaaataataggtccaatatacctttgatcctaaattccatttctggatatgtagtagaaacaagtttcctggtctatgagtgaaaatgtccactcttcctttgttggctctaattttttggtagggtgctggtgacaccaaggtgctctcactgggaaagtgaggaggtaattgcccaggatatgccccacagtgctctgcagcagtgggaagcaatgaattaggtgtaaccataggaaggctcatgggtgttgaaaacactggtggaaaagaacacgagatgtgtcattgcttttattttatttattattattatttgagtatcgttgacacacaatgtttttcactggttttgggtatacaacatttggtttctgtttgtataatagacataacgtttatttggtatgctgtgctcactacgagtgtaacactacctgttaccataacatcgctattatcgtgtcattgacggtattccttttttttttttttttttagatttttatttattcatgagagacagagttgggggtgggtgggcagagacacaggcagagggagaagcaggcttcctgcagggagcctgacgtgggacttgatccccggtctccaggatcaggccctgggctgaaggctgtgctacactgctgagccacccgggctgcccaacagtattccttttatgcctgtgacttattccgttcctagaagcctggatctccccgtccccttcccccagtgcacccatcacctaaccccttccctctggcaaccagcactttattctctgtatttataggtctgagtctgctctttgtgtgtttctttattcgttttgttctttagattccacatatgagtgaatcatatggtgtttgtttttcttggtctgacttatttcacttagcatacattcatttagcatacaaaccatccctgttattacagatggcaagacctcatctgttgttatggttatgtaatattccaacgcacataccacatcttctttattcatgtgttgatagacacttgggttgcatccatatcttagctattataaacattgctgcaataaacatagggggcatacttttttcttttcttttttttttttgagtcagtggggaggggcagagggggaaagagagtctttttgtttttttaagattttatttattggacagagagtgggaaagcatagcgggtggaggggcaaagggtgctgagcagggagcctgatgcagggcttcatcccaggaccctgggatcatgatctgagccaaaggcagacccttagctaagtgagccacccagacagtcccgagaaagagactcttaagcaggctccatgcccagtgcagagcctgatgtggggctgacacagggctcaatctcataactctgagattgtgacctgagccaaaactgagttggacacttaaccaactgagccactcaagctccctatcatgtcttttttttttttttttaaagattttatttatttattcatgagagatagagagagagagaagcagagacataggcagagggagaagcaggctctatgcagggagcctgatatgggactcgatccagggactccaggatcacgctctgggccgaaggcaggcgctaaaccactgagccacccagggatcccctatcatgtctttttgaatcagggcgtaactaactgccttggacgtggattgtaaattcatgcactcaaaagataatctgtgaaaatatattgacacaaaaagatactctaaatatattgggatgattaatggtggggacataggagtgagatatgggggttacacaaaagaagtagatgaatagataaaataaggaaaatgacagcacttgcactctagatttgccatgagagttatttattttttttaaattttttaatttatttatgataggngagagagagagagagagagaggcacattttaggcagagggagaagcaggctccatgcaccgggagctctacgtgggactcgatcccgggtctccaggatcgcgccctgggccaaaggcaggcgccaaaccgctgcgccacccagggatccctgccatgagagttaaatgagatcctgcaagttaaccgtctgggaccacacctggtggtcccatgcccagggctgggcatctgtgtgcagcccctttgctgaacctctcttcccccatcccaggtcttatttgccacagagacctttgccatgggtgtaaatatgcctgcccgaacggtggtgtttgactccatgcggaagcacgacgggtctaccttccgggatctgctccctggagagtatgtgcagatggcaggccgtgcaggccggaggggcctggatcccacaggcactgtcatcctgctctgcaagggccgtgtgcctgagatggcagacctgcaccgcatgatgatggtgagccggccaaggtggtggcatgaggctgagctgggacatcaccagctctggggacctgctggattctctcttccagccctcttccccctccttgctttccacagttgatccctgaacagtgtagtgttaggggcgcctacctcctgcacagtcatatatccacatataacttttgacccctgaaaaacttaatagcctatactgttggccagaagccttaccaataacacatgattaatacctacttgtgtgttatatatgtattctctgttttattcttgaaataaatctggggataagaaaatgttataaaggaaattatgagagaaaatgcaggactgtatggcatttattgaaacaaaatccgtgtgtaagtagacccacaaagttcaaacacatggtgttcaagggtcagccatttttttcttttgcctgggagaaaccaaggtcagagtgagcaaatctgaggtttagactgaatcttacctcctttagtcttttgtcactgtgaagacagagctaggtagagcctttgagggcctatcaagttttgttcctttattttgcagaggtggtgaggaagcaatttgtctagggtttcatggttgcagggcagggactggatctgctgggactagagctggtccccagagggctggctgggggcctcccccccccccctccagtctcactgacttctctgacttgacccaggggaagccatcacagttgcagtcccagttccgactcacgtacaccatgatcctgaacctgctgcgggtggacgccctcagggtggaagacatgatgaagagaagcttttccgagtttccatcccgcaaggacagcaaggtgaggagattgggatgaccagtatactgggcaggctgttgggacgagggaagccaggctgggaaggggcaggcacctagagactgggggtgcaggcagggagggtggcacactaggcctggggactgtcctttcacacttccccccacttccacccaggcccatgaacaggctctagatgaactgaccaagagactaggggccttggaggaacctgacacgactggccaactggttgacctgtctgagtattatggctggggggaggaactgacagagacccggagcttgatccaggtgagtgggtgttggaggcatgatggagggaggagagaatgagacactctgggtgctcctgaacctaggcccggcctagtccctgtgatgtccgtatgatgcctcctccgctctctactctttagcgacgcatcatggagtctgtgaatgggctcaagtctctctcagcgggaagggtggtggttgtgaagaatcaggagtatcacaacacattgggtgtgatcctgcaggtgagggcagtggaaacttggaccccagagggaaggagggagaaaggagggagtggggggagaccctatctccatcttccccagttggctgtggtggttatagtcacaatggtacactcacatcccctgttgctctcctttcctgttgctaccactttgtgcctacctccttgtcctttcctgaagactgttctgatgggcttggttaccagtccatcctggtgggctttgcagttgctctgtgtccctgcctgagggtggggacctgctctccatctttgatgtctactcctcacattgccctggcctggcctccccacctgccctaggtctcctcgaattctgccagcagggtatttacaaccctggtcctgtgtgataaaccggtgtctgaggacccacaggagagggcgccagccacccctgatgtgccatacccggatgaccttgtgggattcaagctgttcctgcctgaaggtgagcatggggcagatgtccaagttcctgacagcagtgtggaaaggatgcctgggtccagggtcttgtttgactctgctctcccctttgcacagggccctgtgaccacacagtggccaagctccagcccggagatgtagccactatcaccaccaaggtgctccgagtgaatggggagaagatcttggaggacttcagcaagaggcagcaaccaaaattcaagtcagagattctggagagatctttttttcttgggagggactatgtaacagggtatggggaggtgtggttggggcgtcaggggcttctgtggaagaaaagactctgccctaggtctcaagactttgctccttcctcaggaaggatcctcccattgcagccgtgaccactgctgtccaggaactgctgcgtctggctcaggcctacccagcaggacccccgacccttgaccctgtcaatgacctgcagctcaaggatgtgtctgtggtagagggggggctccgggcccggaagctggaggagctgatctggggggctcagtgtgtgcacagcccccgtttctctgcccaggtaggtcctgaatgccagctcccaagttgagaagtgggggctgtggttcccttctggtcccctgtagaccggccagccccatctctgcccttgtcctccatgccacctcaccttgcggcatgaggaaggcttacgtgcttctgctggtggctgtctgcagtacgtgaagctgcgagagcgaatgcagatacagaaggagatggagcgcctgcgcttcctgctgtcagatcaatcactgctgctgctcccagaatatcatcagcgagtagaggtgggaggggtactgggggcgggaggggggttggctagcgagggagaagatagcaggctcccaacacccaccgtctttcttcaggtgctccgaaccctgggttacgtagatgaggcgggcaccgtgaagctggcagggagggtggcttgcgccatgagcagccatgagctgctcctcactgagctcatgtttgacaatgctctgagtgccctgcggccagaggagattgcagccctactctccggcctggtctgccagagccctggggaccctggggagcagctcccaagtaccctcaaacaggtatgggacacccaccccacttcctctcctttggctgtggcattcctgagccccacccccacaagttctccaagtgacccccctctagccctgtgaagtgcccctaagagctggaatgccttcttccttatctgggctaccctgctcctggagaaggaaggcagggcctgagcctcttattctgacatctgcagggagtggaacgtgtccgggctgtggccaggcggatcggtgaggtccaggtggcctgtggcctgaaccagacagtggaggaatttgtcggggagctgaattttgggctggttgaggttgtgtacgagtgggcccgtggcatggtgagtgactggggttttgtgggtggctggttggggagaggctgcccaggtctatctaccacattcttgcttcccccacagcccttttccgagttggcggggctgtcagggacccctgagggcctggtggtccgctgcatccagcgcctggctgagatgtgtcgctcgctgaggggggcagcccgcctggtaggtgagcctgtgctaggtgccaagatggagacggcagctaccctgctacggagggacatcgtctttgctgccagcctgtacactcagtgaatgctgtctgtgtaaaaatgtagtaataaaatagcaaacccctgcctgtccttaaggtgttgggcagggatgactcaggcaaaagacacagcaagaaaaaaaagaagacacagcaagaaccacctagaaatatgcttttatctgtgcacatggagacaggaccagcccctttgaagtttcagtccttgggggaaggtgtcttggggggtgatgggaggtcctgggtcatggcttccacataccacgtgggcaggaaggcatagggtgcatcttgatgtttagacaccgtgactgggctgccaggctcccaggagaagagatggacaagcctaaggggcacatggggtcacaggttgagggctggaggagagctccggagacccagaaggcaggggcagagatgaatgcctcacctggggtcatcctggacaactgtgttctgggcaaagctaaggaaggcagcacagaagttcatgcacacggagggattccagccatcacggtcattctggagggccgaggaggaggtggaaggcaggtggtgagggggaagacaggaaaggggaaggcggactgctgccccgcatagtggacctgtggtctgggtgcgggggacgctggtgggagctgcagcaccactgccttaccctgacatactcgaacatttccatggtaggaaaggtcttgagggaacagatgaaaccttctgggttacggaagccagcaacgacatttgggacccccagaaggaatgactgagcccaccattttaggagcttatgtctgtcaggaaaggcaaggggtcagtagggccctccccccactccccagcttctccctcttccccccgcccccatcccttttccagctgtgtgctctaggctctcctcctacccacccccaccctgaacctgtagaagctcctccagtggccaggcctgtgcatctctttcgcggtcttgagctccacatagcaggtggggggctgtgtggatggggcctgggggtctgtgcagtctacctcccctgagaagagcagagggtggtttcccaggcggcttcgtagcacagagcagaaggccacattggtgttaacatccccagacgggtctggggagctttcaggtttgtctgcacaaggagaagcagcaacaagggaggggactttcaatctctggggaagggggagagggctccagagcagacgcaactctcacctgcacacatgtactgctcaaacttgtaccccatgtacatgagctcccggaggaggggtggccgggcgagcctctgggcccgagctgctggtgtctctacctcactcagatatagtgtcccctggaagcgggaagctgccagctgccagccttcctgctgctcatacggtgtcgtcagcaattttgtcaggtgcccccgccatgtcactatggcccctgctagccagcctggacccctgagggaggagtgagaagcattagctcaggtgattttcccaaagagcctaggttccttctaaagaccgaactcactccagctttggctctcctaattttagagagtgggtgcaggtctccagatctacatgtgtgcttgctttgctcacccctccagctggcctcggtgatccaggagccagcgaagcaggtggtccagcccttctcggacctcctcatccctgggctggtatcgatcagggtatccatctctgaggtcaaatttggggccttggccataggtagggggtgggctgtagtagcgcaaggcgtgagcatccccgtggtactggcgttgtgcatccagggagaagcagcccagnnnnnnnnnnnnnnnnnnnnnnnnnnnnnnnnnnnnnnnnnnnnnnnnnnnnnnnnnnnnnnnnnnnnnnnnnnnnnnnnnnnnnnnnnnnnnnnnnnnnnnnnnnnnnnnnnnnnnnnnnnnnnnnnnnnnnnnnnnnnnnnnnnnnnnnnnnnnnnnnntgcgatccatgaggtcctgagagctggggcctattgagttatccttttacggaggaggcccgggaaagggggactctgggtctggactaagcgagcctcccgacggccaggctctggccccgagcacaaacaagacagccgcgcagcccacccctcctcttgccctgcgccccgctgccgacgcctcaaacgcggtgggggctggggaaggctgtccgggcgcagatcaccgacccgcaggccccaaagcccgcctcctccacggagcggagacgtcacgccggtgcgtccaggagtcgggaggcgcgcaaaggtggtgtccgcgctccgagtcgcgctcagcgacagacgcgggggcgcgcttcccccgggagctcgcgctccgcccgccgcccacgcgctcccggcccccgctccccgctcccggcccccgcacccgcgcaggaggccagtcccggcgggtggcagcgctgctcggggccgcgcggagagggccagcggaagctcttggggcgcgtcatccttaccgcgccgggcgggcctccagggagcctcgcgtcaatgccctgcgccggaagagccgtctccgcgccccctccctcggcgccggcctcttcccccgcctgaaccccgggatatgagccgcaagaggcagggtctggtcccggacccctttgggctgaagcggcggcgggagcgagggcaggccgaggcggatcccctgaggggcgagtcgggtaagcgcggtggcccggggccaggctgggagcgcgccgccgcccgccgcggtgaccggtctctccgtccagggtcggcgcgcgccgcggtcgccgagctggtgcagctgttcccgcgaggcctgttcgaggacgcgctgccgcccatcgcgctgcggagccaggtgtacagcctgctgcccgaccggacggcggccgaccggcagctggtgagcggcgtcggggcggcggacggaagccgcgcccggcctcgccggagggccacgggcccctgaccccagtgggtccgcgggtctcccggggtggccacggacctcgcggaaagaccctccggcaggagagcaggccacatcgtggaggcggaggagcgactcctgtgaaaacggagtcctcgggcgtagtcggagccttccatcgcggggaatgccggcggccgcgtcccagtgtggtcgccgtcctacccgtgaggcgacgctggaggataccgttagcccggagaggggacgccgtgccgcgggggtcggaggaagggagataggcagggagatcggttaggaagacgtggcggcggccaactggcgaaggcctcaaggagggtagtgcagtaggagggcgagggtgggtgacggtgaggagcgtggggagcagtccgggtgattcaggttttccagatggcaggactcaggggggggagtgagtagagtagggacgcgctgaggcgcgggggcaggcgatacattttggaggacttggaggtgcttgggaagcgtctgaaggcaagtgtgtagtagacagttggatgtgagggactggagagaattctgagccagtgatactagagttgttcggttcattcagtctgcggaggtaggcgagatcgggtaggaagagtagaagagtggtttttaacctttttacagactttaagagataaagctatggccctttctctccagaaaaatgcatatatgccgcatacatagaaggtatatgtgcatttttcttttttttttttagggggagggtgggttgttttacagatcctctgaggtccagggttaaggacctcaagtttagagtgaaagggccaaatctacaaagctaagagatacccacatttaaggcagtgtttctcaaagtatgtcccgagttccacctgtatcagaattacctgggctgcttgttagaaaatacaggttcctgggactcacctaaagctaatagatgcagatctcttgaagtgggacctgggaatctacattctgaattactgtcccaagtgattcttaatgttccttaaaatttgggacccattgttgtaaagggaaagcagaggaagaggagtctcgtctctggaagaggctgggaaggaattgtcagagttaggaggaacccaggaagaggcctgttgagaaagcaaatagattttcaaggaggtggaatagttggcagtgttagaacctgtgatttaaggccagtaaattaagtaaggtaataccccaaatcagtccattggatttagcatgtggaagattaatggtaacctgtcaggacaaaaagagggaagaaaaggaagttggagactagctccactctcgggaggaagcaagttagatagaaccactccttttttttttagattttatttgtttatttatgagaaacacacggcgagagaagcagagacataggcagagggagaagcaggctccatgcagggagcccaatgtgggactccatctcgggactccaggatcacaccttgggccgaaggcaggtgccaaaccgctgagccacccagggatcccccatagaaccactccttacagagtatttgttgtttgtaatttactgatggtagcctaatttttaaaaagctttaaaaattgcacaaaggaaaatataaacacacgatttaaagaatgttcataaagcagatacccataaagcaactaccacctaaggcagactatagccacatacatcactctctgatggaaatgagttgtgtcccttggtgataactatggtcctgacccgtatgataattgttcccttggttttctttataccacctatgtgtttacccgtaaacaacatagcccagttttatccatttttgaccttgatgtaaataaagtaatatgtatggatgtatgtactgtatttataccgtgtttcattaggtggatacttttgaaattctcagtttcatgtagtgatagtgcatttgctttcatatattcctattttgtgaatatatcccattttgtcagttctagtgaaaaatttcctatgtttctaggaaattgttagtcatttaaatttttaaattttctaatttagataaagtctgtagtcttgttttactgtctattggatgtgtagtgatgaccctttttcattctttagattatctgtgcttttttctagtcccaccccaccccccattttcttggtcagtctcaccaggggcttatcaattttaatagtctttcagtgaattaatgcttagttttgtagctctctcatgttttctgttttattgacgctttctctctactgttgggtttattttactttttttcccattatttcatcctcttcctttctgatatatgcacgtcaagttgtcgtttatcataagcacatgcagatatatatagttttggcacgtattttaattatgattcagtttaaaatatattgtaacatttttgtgagttttttctttgaccaagggttgattagaaatgtgacttaattttatacaatttcatattacctagttgttactgatctctgacacaaatgatattgtggccagagaacatacacactatgatttcagtcattggaagtttattgagactatgtggtcagttttgctagtctatgtatatttgaagagaatatatatttttcaattgttaatgtaagttatttcctcaccgagtctgctctgttctgtgaatttatagtgggttaatatacttttgagattttggacttgctattatttcttcagatactttccctcacccaaaatctcgaccactaattccttgaaggcagggcctatgtgttaatcactactttatcttagtgtctggcgtattattggttttatgaaatatatgttgattgatagggaactgatgagatgggtggatagaaaggtgggtaagtaatttgaaaagactacttagtaaaccacctgattctttccccacagtttttcctttgcttagagaaaaactccccaatattgacaataaaatctccctgcccagaagttcccagagatagcagagtggcttaccctgatgcccttctttttattgccatctctctggaaacagaaggagcttcaagagcagggggagatcagaatcgtccagctaggctttgacttggacgcccatgggatcatcttcactgaggactacaggaccagagtgcgtgtaactgtgtgtgtgtgggggggcggggcaggctgggaagttgaagagtggaaggaaaaagaaacatactctcttactctgtgtcacagagaggacatggggctctgctgagcagtaatatgaacgagagggaaatgagggaaagtctgagaggtagaaggacatgagtgaaagggaaaaccagaagagaaatgtcctgaaggggtcagtggagggtgagggtggggccagactgcatctgtcatctctggttccaggtcctcagggcctgtgatggccgaccatatgctggggcagtgcagaagtttctggctttggtacttccagcctgtggggaccttagcttccagcaggaccaaatgacagagaccttcggcttcagggacccagagatcacgtgagacttgggggaccaatagaacttccctgtttcctcccagtcccatcaagccttttccttcttccagtgcacctaccaaaaagatagactcttctttttagtaaaatgacctaaatttgtactctttcaccaagagaggaggcctgtctttacctgaggccttagaaagaatactggtctaaaatccaggagctctggatggctaatccaatgactagttgcccaccaggtaccataagtgcctgttgtgaaccctgctgagactaagagaatagagaggggtatgagcttgggatggtcctaaagccttctcattaaaaagcagaaactggggtgaagtgaggattccatttcatgggcccttatctggctcaggttccctatgtgtacccaagggtatatgtgaaagcattttatatatttttagtgagacatgggaggatccatggtgaggcctggggaaggcaagtggcaggagcacagaagaaaggcccttgtttatcacctggggttaggccaagagtatgtgagggcatgtggtcaaggaggaggaagagaggagaagcagctttagttgaacaggtaatagtaagaggaaaagaaagtgggggtgggaggcagtctaggaagaggaatggaagcaagggcctggggcgttaaacagcaaggtgagcagagaaccactcggggtgggctactgttacctagtccccttgcatggttgtgcagttttggggagacagtgtccaagtgtcagtaggcctcctctcctggcttctcgccctccttaggcatctggtgaatgctggagtcctcactgtccgagatgctgggagttggtggctagctgtgcctggggctgggagattcatcaaatattttgttaaaggtattctatctgcagctcaagtcctcagccctttaaggacacctttgggtagctccttggggcccaagccttatgcctttcccctctcctgtgccacttctccagggcgccaggctgtcctcagcatggtccggaaggccaagtaccgagagctactcctatcagagcttttgggccggcgggcacctgcctcggtgcgacttggcctcacttaccacgtgcacgacctcattggggcccagctagtggactggtgagtctcgccctcagcctctagcagatgataaggcagtgaaccaaggttggactccctcctgggactatcccaggccaagctctgagttttacccagacttttggcctaggtatctggctccagcctcgtcttttcttttgcttgcacagtgtctccaccacttctggaactctcctccgcctgccggagacgtgaggattctgctcatcattgcatatctctgcagagtgggttgagaggggtccaggagtatgtccagtggtggatgagatagggtcaccttgggaagacgtaggagcccggatgagtgttgggcttgcatctgcataaagggtcagacgtgattgctgctgtttacctgggctctgacccagtggtggggtttgggcaatgcttctctgcccttctgtgggactggagccacaaaccgtgccaaggccatggctcttgcctttcacacagcaaagtactgctgtcgctcttgggataggaagacgggatttccgggaaggctggtgagggagggcagagttctttcttaaatgttaagatcaagctgccaaataaagtacaaaccatgtgcaatttcttggatgtcttttgttggatgtaatatgtatctggacacctggtttgggggcagagttaaagccaaccttgagcctgagctttgcctcattgttccgagagagaaaaggacactggggtccattctccctgcagggtagtaagggtatgccctgtgtcctcagccatggaatttgtgttggggcctacacagagcgaaggcctggtgtcgttcaggttttgtgggggttgtagttagagacaagtgtctggtattttgttttgttaggatttttaccaaggaagccatgtatctccaaccatgtactgagccacactggactcctacgcccatgcgtgcgtatgtgtatacctgtacacccaggtacacccaatatagcggctgcccagggcactgggatgagagggttaacgtggaaggacaggactcggagccatgatttcctcagatgccttcagagacccaggtgtcgggggttgtccctcctccccctgaccctgctaaacaccgggcttggggccagttgcatttcttgcctgtcacatggtttcccagcttagcggggccaggggaggagcaaggtccagagtcaaatctgctcagagcccgggcttgaccagagaggagcaggcagacagactggtctgatccctcttgggtcctccagccatgaggctcctctggggactggcctggatggccagtttctttgccctatccctgcagaagcccaggtcgggaaggaaggacaccagtgcttgaggaggacagggctggtggcgggagagcaggcgtaggggacctaactgaggacggggggacagaggggcctgggggatgctgaacaccaaaccttcctgctctccctaggttgctcctgttttcgccttctgtggttcacctgggggtccccctgtcagtgggggtgcagctccaggatgttccccggggacaggtggtggcaggatcagtgtttctgagaaacccatccaacctgaatgccctctgctccacaaaggctgactttaccctcagctcagaaaaagacttcgtgctccttagcctccaggtaactagcctccactcccctctatggcttcttagcaactctcatcctgctcccctctggtcagcgttttgtgctctcgctaggctccccctgccacaccttgcatggctgcctttcctgtttctgtctccatctctgactttttccttctgccctgtctctgacctgctccctctccctatcacgaaagatctccccagaagaagcagagaactgtggcctctaccgcctcctcagtggccccgaggtccagctggtggcccagtcagcatggctgaagaactttctgtccagaaagatagatgttcagggcgtcaaccttcttttctcctctcgccgagggcacctctttctgcagactgaccagcctgtttataaccctggccagcggggtgagtcaagccctgggcctctgcctctggctctcccagcctgcccagggcatgtttggcacctgtaagtaagagcctgaatgtgctacacaggaaggctgcttggcaaatatttgttgtcctcctctcactggctgggagcagtgagggctgaggcccaccctttgccaatggattcctgctcacctcctgcccttctctcccagttcgatatcggatcttcgctctggatcaaaagatgcgcccatccactgacaccctgacggtcacagtagaggtgagttcctgacttctgaccttgaccaggagggctgctgatctgccctcccacccgtgaccacttctactcccaccgcagaactcccatggcctccgtgtgcgaaagagggaagtgcgcggtttctccatcttccaggatgacttcatgattcccgatatctcagagtgagtgcatccccaagggccggttgggtgacgggaagatcaggaaggaggagggatctgggggcataagatgggaggagggtcagtgcataggaagggagcaaggaagggaagtgggaggctatggaccctctgcttgactgcgtcctgctttccaccaggtctgagctgtcccaaagaaggaaagctctcccggaataagagaaacgtgaacttccaaaaggcgattcatgagaagtgtgagttgtgggtgcctgtgtagctctccactaggcccaagggttggggtgacgggtctgcctcttggcagctccactcctgggtgggccttgtaaatggtatttggggccagaaacccaagttctggggttggggatggatggaggctctctccactggcctcacccaagtttctggtctctcaggatgagccgtcgtgtatctagacgtcagggtaggaaatgagatgtgtctccatttggttcccctgtgcttaccctcgcctcgccctgcagtgggccagtatgcttccccagtagccaggcgctgctgccaggatgggctgacgaggctgcccatggtacgctcctgcgagcagcgggtggctcgagtgcggcacccagcctgccaggggcccttcctgtcctgctgccagtttgctgaggatctgcgnactcgaacagcagcacccaggtttccgtcgaggaaatatggtgagagctggagacgcgagagaaattttctcctttcctcaaggagaaacggagagaaggggaggtctggggacagggcagggcagggaggtgtgggtgccatagccctgaagggagggaagttttcagagggtcctttcactggagtctgacctgccaccccttcaccctgagtcagtccttcccaacttcgaggtgaagattgttcctggaaagccctacatcctggcagtgcctggctttcttgatgagatccaattagacgtccaggccaggtaactctcccatctcctgcgtggggcacgcagggttccccatcaagtctgaaggagctgtgaagccctggttcctcttgccctagtgccacccccacccccaccctgagacatgggtgttatttcctaaactaaccctcttcccactctctctgcggcggcaggtacatctatgggaagccggtgcaaggggtagcatatgtgcgctttgggctcctgaatgagaatggtgataagactttccttcgggggctggagagtcagactaaggtaggaaggagggtgtggggagtgtgggagggtggaggggaggggaggagagggaaagggaagggggtctgggggggtgggcaggagggtcctgccctctgtggggaagggcaggagggagacaaatctcaccctaggccctgttttcttctatgccccagctggtggatggccagtgccacatttccctctcaaaggctgaggttcgaggtgccctggagaagcttaacgttaatgctgctgacctccctgggctgcacctctatgttgcagctgccatcattgagtctccaggtgaggggcttcccttattgtaacccctgcccccaacccctgaccttcgagctgaccctctgttctccagcatcgacatgattccctgctcttcttacccttgtgtcttgtgtcttgtgcccaaagccagaaaagacccaggagactgtctctccccaactgtgtttctgggtggtttcaggagaaggtactcctgcttccatctcagttttctttttcccttcaccccaccccccacccccaacccccgtccatctggcagacacgttacataccatctgtgtgctgggtcctgtgtgggcctcagcaaacagagatgaatacaggacggcccatgccctgagcagctcgctgtcttgtgagcaagaaacgcttgagctgcattccccctcactctcctgctcatccttctggggctctctgtcctccacctctctctgccccatctcttgcaggaggagagatggaggaagcagagctcacatcttggcgttttgtgtcatctcccttctccttggatcttagcaacaccaagcgacactttgtgcctggggccccctttctgctgcaggtttcttctggaggagaggatgggagggtggggtgttgtcaaaagggcacatggcctcactgagcagtctcttttatctggccctcctccctgcccccaggccctggtccgagacgtatctggttccccagcctctggtattcctgtcaaagtttcagccacgttgtcttctgctagatctgctcctagaatccaggagcttgaacaaaacacagatgggagcggccaagtcaccattcccatcattgtctctcagtccacttcagaagtgcagctcttggtaggatatccgcttgcgggacaggattggagaaggaaagaaaggctggctggcttctggaaagccaggggctaccctggctaacccctgtcttgggcttggggaagaagctgggtcctggggtctttgccactgaccctagccctgccctgtccctctttccaggtgtctgcaggctcccctcaccctgctgtagccaggctcactgtgagagccccgccctcaggaagttctaggtttctgtccattgagcggccagatcctcgaccccctcgtgtcgaggacactctcaacctgaacctgcgagctgtgggtgtcagcggggacagcttctctcattactactacatggtgcgccttgaccggttgttgagcagggcagggtgcagggattgtctcaggcgggaagcagccctgggcacggagggaacggttttgggattggggatgtgcatgcagtaaagaggaaaccatccttgccccagatcctgtcccggggccggattgtgtctatgaatcgggagcccaggagggacctgacctcagtctccgtgtttgtggaccatcagttggcaccctccttctactttgtggccttctactatcatggggacattccagtggccaactccctgcgggtagacatccaggcaggggcctgtgagggcaaggtaactggcatcgggaggggcggtgtgttaggggatcgagagagaaagaagagagattgcgagcgggtacactgaggaggcgtggggctgaaagaagctctccccactctgactgccacctcctgcctctgccagctggagctgaatgtgggcagcaacaaggactatcatcctggggagaccgtaaagctccacctgcaaacagattctccagccctggtggcactaggagccatggacatggctctgtatgctgtgggtgggaagtcccacaaacccctcaacatggacaaggtttgtcaagacctcagttttccccggcccatctcccctttttcgctcattgtcctgctgtcctgagccctggacccaaccccgagatctcacgcaggctcccccgaggcctccctcatatctagactcctgtggtctatatttccccattctccgtatgtctttcaggattgcccaaaccctgccttctcacctggagctgagtggccgatctggcccctcaacttgtctgcaacatgccggccttttcttgccaggtcttccaagttatgaacagctatgaccttggctgtggtcctggaggtggagacaatgctcttcaggtgtttgaggcagctggtctggccttttctgatggagacctgttgacctcggccagaaagagtgagaacagaggaggaaggggggttgggtgacgggaagatcaggaaggaggagggatctgggggcataagatgggaggagggtcagtgcataggaagggagcaaggaagggaagtgggaggctatggaccctctgcttgactgcgtcctgctttccaccaggtctgagctgtcccaaagaaggaaagctctcccggaataagagaaacgtgaacttccaaaaggcgattcatgagaagtgtgagttgtgggtgcctgtgtagctctccactaggcccaagggttggggtgacgggtctgcctcttggcagctccactcctgggtgggccttgtaaatggtatttggggccagaaacccaagttctggggttggggatggatggaggctctctccactggcctcacccaagtttctggtctctcaggatgagccgtcgtgtatctagacgtcagggtaggaaatgagatgtgtctccatttggttcccctgtgcttaccctcgcctcgccctgcagtgggccagtatgcttccccagtagccaggcgctgctgccaggatgggctgacgaggctgcccatggtacgctcctgcgagcagcgggtggctcgagtgcggcacccagcctgccaggggcccttcctgtcctgctgccagtttgctgaggatctgcgcaagaagtcccgctccagaggccaggtgggccttgcccgaggtgaggccctgggtggtgctggggggcaggcaggcagccctctggaagggcagaatggcccccctcctcattgccctccactatggtctcctagctctggaggtcctgcaggaggaggacctgatcgatgaagatgacattcccgtgcgcagcttcttcccagagaactggctctggacactggaaaaagtggaccgcatccgccagtgagggggtgtggtgggcttggccttatctctgggctcttgtctggggctagcccagggtgtgacagggcttctcgcctttccctccgcagattgtcaccgatgctccctgactctctgaccacgtgggagatccatggtgtgagcttgtctgaaagcacaggtgacatggccctgcctagacctcggtgctcccccgtctctctcccctggacccaagctccccatgtagccctctgctcttagcatggggctgggggcaaactcctggggacgtctgtgtcggtgtgtgctggggcccagagactaggaagtggcagtgggggacggggagtagggcagaactgggtcacctctgggaccctgtggcctctggtctctgcgccccctgcctcaccgccccccatctgccaggcctgtgtgtggctacaccagtccagatccaagtgttccgtgagtttcacttgcacctccgcctgcccgtctccatccgccgctttgagcagcttgagctgcggcctgtcctctacaactacctgaaagacaatctgaccgtgaggccctggagaagcctgagcttccagggagtgggtgggagctagcgtgggtgaagtgtggggagcccagctgggtgggggctctggccatccccgtcttcctgcacccaggtgagcgtccacgtgtccccagtggaggggctgtgcctggctggaggcggagggctggcccagagtgtcctggtgcccgcaggctctgcccggcctgtcagcttctctgtggtgcccacggcggcgacagctgtatccctgaaggtggtggctcgagggtcctgggatttccccgtgggggatgcagtgtctaaggttctacaaattcaggtgaatggagcagtcctgagtccaggtccctaagctcccagatatacattttctcctcgcccctcaaaccctctataccctctctgccggccaggccagaggcccctgaataccttggtctgattgtcttctacaattctaatcccactctgtccctgagattcagactcccaagtcccagggggtgtgcagtgggaggggcaggtcatagtgctgtgtgacctctcatagctgcatttcccctgagacagaaagaaggggccatccacacggaggagattgtctatgaactcaatcccctgggtgagtggccccctgcctctggccaccagtgtcctaattgggagatgtgggccgccaaacaggttgccaacttcccccattcccccagaccaccgagcccggaccttggagattcccggcagctctgaccccaatatcatcccagatggagatttcagcagccttgtcagggttacaggtgggagtgccctccagtctgtccccagggcagcctcagattcatgtgaagcccacagacccctgttagatcccctgggtccccagacctgctcgctgacccttgcccctccatttcccctctagcctcacatcccttggacacttggggctctaagggggtcttgtcgccgggaggcctggcctccctcctgaggcttccccagggctgtggagaacaaaccatgatctacttggctcctacattggctgcttcccgctacctggacaagacggagcagtggagcacactgcctcccgagacaaaggaccatgctgtggatctgatccagaaaggtgccaggcacagggcgagtaggcatggggctgggaggcgacagaggcagggggtggcccagcttgctggagggaacaggagggggcgcctgtagggattggggagcgtggccccgggcacctgtggtggggagtgagtgtcacctcagcagctgcctcttgtcctcaaggttacatgcggatccagcagtttcgtaaaacgaatggttcctacggggcttggttacatcgagatagcagtacctggtgaggttgggagtgtttccaggtctctgagaggggctgggggtagggtggggtgcagagccaggtacagtgggagggtgggtaaccggtgcctgggtgagcagggatgtgtcccctgtggggaccaggcactgtccccagccatcttgctctccccaccaggctgacggcctttgtgctgaaggtactgagtctggctcaggagcaggtgggcggctcacctgaaaagctgcaggagacagccaagtggctgctgtcccagcagcaggcggacggttcattccaggacccttgcccggtcttacacaggggcatgcaggttcggggctgaggccagtcagaggatcccaggtgggagggcccttcctgttcccacctgcctgccccctgccccactcttggctgacatcttttctgcccccttcaactaggggggcctggtgggagacgatgagactgtagcactcacagcctttgtagtcatcgcccttcagcacgggctggccatcttccaggatgacgctgcagagcagttgaaacagaaagtggtaagtgtacccgggtgtctgccctttcctgatccccagctacccccctcccccctacccctgctttctccccaggaagctgggtgtccagctccctgaccttcctccccactttgtcctaggaaacctccatcttaagagcaaacttgttcttgggggagaaggcaagtgttgggaccctgggtgctcatgcagctgccatcacagcctatgccctgactctcagcaaggctcctgaggacctgcaggaggttgcccaccgcaacctcctggccatggcccagaaggctgggggtgagagccacggggatcctggcaatgagcctgggccatgggggaccccaggacccctgagtgtgcccaaagggagaaattgaatgaagatcttaaggaggaatggaagcatgagcagagataattgggggagcatcagagggccaggcaactagggcccgccccccattcacccatcggtctctgcacttccagataacctgtactggggctcagtccctggttctcagggcaacgtcatcccacctaccctggttcctcaaggcccaacagaccctgtgccccaggccccagctgtgtggattgaaaccactgcctacgccctgcttgacctactgcttcgggagggcaagtcagagatggctgaccacgctgcagcctggcttacccaccagggcggtttccaaggcgggttccgtagcacccaggtaggagctgcccgggggctccgggggtgggtggtcttgagacagagtgcctgagcgctggctcacctccccaggacacggtgatagctttggatgctctgtctgcatactggattgtttcccacaccaccaaagagagggagctcaatgtgacccttagctccataggccgcagtgggttcaagtcccatgagctgcagctgaacaaccaccaagtgcaggggctggaggaggagctgcaggtgagccactccctcacctggcttgccatgcccccgccaaccctactgtggccaggccagaagctgtcaccctcccacccccagccctgtgtaatccccatgggagcttgtcctgatatccttgtgggaagatacttgctgagtgacctagagaaagtcacctaatctctgagcttcatttatcttatctcaagagtaacatatgcagagtctacccaacagggcttttaggaggctgaagtgaggtagtggacgtggaggagtaaacctcatgagtttggggtcacagaagaggagagggtgtgttcggggaggaggtgtcctgtgtgccttcctgacatctctttgccttctctgttcctgcaagttttccttgggcagcaagattaatgtgaaagtgggaggcaacagcaaagggatcctgaaggtgagagccaacggccgtgaacacctgggtcctggccaggggtggccatggtcttgagagggaggcctgagggcagaggtcatggtcaaggaaggagggagcccccctggggtgggcagcccccatcaaggctgatggtatacacacccagggctctcccctgagccacaggccccgtgtgtctcctggcacctccaccacagtgccaccccaaccccttcttcctcctgtgtgccctcacctggctgatggggccccttccctacgggatcccaggcaccgctctagaggccaccttagtgtccctaccccagcccttccttatgaccctggcatctcctcctctactgccctgctgcccagggccctgtcacttgtttcctggactctgttagatggttttggaacttctccctacccccaaatctctcgcctcttacccattgtgcacatggcaggggtatcaaccttctgaaaacactagtcagactagccttggagaaaagccagactcttccacctgcacgatcaagcgtctgcccacttccctgaccagacagatccgctcatctacacagatctccttgccttgaatgtccttccctccttcttcccgagtgacagacttgttcttctcctggaagcttgggccagaagccttcttggagctttccatcccagcctcttttatgccccctggagagcacttgcccctgagggcaggcccctgcctcctgtctcactggctaaccccagacctgggccatctgtatttatagactggtcaggagggaggagaggggcccaaagcccggactccctcagtccaggagatgccccaggtgtggccccggaaaaggtctgtgctccaaacgtgccctgttctcaccccttgttgagctagatccttcgtacctacaacgtcctggacctgaagaacacgacctgtgaggatcttcagattgaagtttcggttgtgggtcatgttgaatacacaagtgagtgttggggtcggaggcctagggccctgagggggccagggccgagtgccaagtcatgacatcatcaccatcgctgtgcaggggaggccaacgaggactacgaggactacgtgtatgaggaggttccagctaaggacgacccggacgccagttcccagaccgtgacacccctggaactgtttgagaggcggcggaaccgccgcaggcgggaggcccccaaggcgcctgaggaggaggaatccagagtacagtacactgtgtgcatctggtgagcactggggctgcactggcacaggggcatcgctgggccaggaggcggaggctgggaagcagaggccgggagatggaggctgcatccaccagccagggcatgtgggccccggtcgtgttgctctgcaggcgcaacggcaaggtggggctgtcaggcatggccattgcggacatcaccctcctgagtggattcagcgccctgcgtgccgacctggagaaggtgtagtcagcatcttgggggcagtggggggtggtgaaagcgctgtgcgctcgggagcctgctctgtccctgatcttagccgctgagccctgtctggtgcagggctcagggctacctcccagtgaccatctgtccttccccacagctgacctccctctctgaccgttatgtgagtcattttgagactgaggggccgcatgtcctgctgtacttcgactcggtgagcagggaggggcaacccagggaaggaggacactgggtttagtgagcatgggtgacaaggttccccagggggcagctggatcagtagccagcactctgggagagagcctgtggtgtgagcagggagacaggacagacgagtgctgcagcagggttccgtgcaggctgggaggccaccctgtcaccctgttggtgggcaggcgatgggggccgagttgggatgcggcttgggggctggtgccagtcagcattcagtaaagctgaatttactcaactgagggctgccttgcttgttcctacttgactttcctcattttggggggttttgtttttgatattgaagtgtatttcctgttagaaagtgataacagtcacggatgagtttttgtctttttgtgcctttatttggctaaagcaaacaatcatccatcctctgatggccctcaaacttttttttttttaatttttatttatttatgatagtcacatcagagagagagagagagagagaggcagagacacaggcagagggagaagcaggcaggctccatgcaccgggagcccaacgtgggactcgatcccaggtctccaggatcgcgccctgggccaaaggcaggcgctaaaccgctgcgccacccagggatcccccctcaaacttttttcgaatgtgaactgtaatctcttggagaaaatgtgaaaaagatgtgttaatactgtaacaccattaagccaggcacttggggatcaaggaacccccccactgccctgcccagtgcctgctgacgggctggaccccccattagcctgagaagctgggcaaaggagtttggttgaagatgaggggccaggaagattcctgggcgaggagttgacttaagcagcccagctcaggagggaaagtggcagggtactgggcaggaccgagccagtgtgggcgtgaggagacgggtctgggcctaagtcaggagctgcagggtcacagaggtgggcgagtgacagcacctgccgttaggttatgacagataaatggagaccctgttgcactggtgatgaagcaaggctgtcgggagggggcgggctttggggcaggcagagggagtctggggaacttctaggtctcacagcaatcctaatgcaagaatgaggctgaatgtttaatttgggactcatcggctgggaaggttttggtgaaagccaaggaacagttgagacctcaggggaatgcaggggacgggaggagcccaggccccagactgcgcctccagggaggaagaagaggaacggtcacgcatgatgaggtcagagagagccagggacggccagaagctaccctgagcttagagagtttcatgcacaatgtgtccacgatgtgagactgcccctgggcactggagactgcgacgtcactgactgccagtgaagtcagcagagaccttgcagagcagtttttagaattctggcagccagaaggtactagaatgtgaaagatactaaagataagaccagataggtcaaggagatgcagcacagtggcccgcagcgcccagagagcataccctgacctctcctccccactgtgtcaggtccccacgtctcgggagtgtgtgggctttggagcagtgcaggaggtacctgtggggctcgtgcagccggccagcgccgccctgtatgattactacaaccctggtgagcacctggggacactcagcaggtggggagcaggtgtccctgtgtgagacatcaggagctggggccatgccgtggcaggcaggatgtcctgcggctccttgggatgaggtggggggtgggggagggacatgagctctagccgccctctctcttccccagagcacaagtgttctgtgttctacggagcacccactaggagcaaactcttgtccacgttgtgctctgctgacgtctgccagtgtgccgagggtgagacccagggctgggagggagggcagggagccggtgaggcgagggcctgcgctgtctcacctgggcccctgatgcagggaagtgcccccggcagcgtcgtgccctggagcgggggctgcaggacgaggccggctacaggatgaggttcgcctgctactacccccgagtgcagtacggtcagtcttccgcggccgccgccagggtctctgcctgggcctgctcctgaccacagccggaacacacccgtgctcccttctcttaaattcccccacaggcttccaggttaaggtcctccgagaagatggcagagctgccttccgcctcttcgagaccagcatcacccaagtcattcatttcagtatgaggggaacggatgggcgggtggctggggtgggggatagggagccgaggtcaagggtttgtggcccgggtgctctggactgtgtaagttcagggcctgagctcaaagccttttggaagctccgggcttgtccataattcgaaaagcggctgtacctccccgtaaggagcggtgagggccaaatgagaggttccacgccagccctgggcccccccgctcaccccggaccttctgcccccctctgactactcctgtgtacatcatcctctcagccaaggacaccaaggccaaggtcggtcagacccgaaacttcctggttcgagactcttgccgccttcgcttggaacctgggaaggaatatttgatcatgggtctggatggggctacctcggacctcaagggagagtgagttctctgggcctccaatgtctcctgctctcctcatgcctcatgagggaatggatgcccagcacccagacctgccccgtcagaaacgaggtgccccgtgccctcctctcgcacctccccaccctcccacccctgctgactgcctttttgcctctgcagcccccagtacctgctggactcgaatagctggattgaggagatgccctccaaacgcctgtgccagagcacccgccaccgggcagcctgcgcccagctcagtgacttcctccaggagtatggcactcaggggtgccaggtgtgagggtcaccctcccgcctcccccagctaatacctggattgttgctgtacccgggcccctggacaataaaggcctctggcagcaaagtgtcagtgtgtctcaaggattgagagcagtgcccctgccacctttgccagcttctgaggccagggtttgcatcatcttcagttctcagagcctggatgacccttgagagtgtctctctcagataatgcactgggagcatccctagtggactggtgacccagcagcctgtaccctaaggctctggcatcacgccgaaacctcccttccgctctgcgtgtggggtgctcccctgccccactgtggccagcgggggcctccggcacagctcgtgctcagcctcatgccttggctcttctgctttagttagagtggctggtggccacgtgcttcccgctctgccctcgagcagctgtgagtcctggggtctcctgcttggagccggcccctgatctccttacagtgattaggggacttgcccagagttgtacaaggacttggtgatgtgtgtattaatacactgggccagccctccctacctgccagcctagctctccccatgtggcggccccccttgggtctcggggctgacctagaacaccagcgagagaaattggccgagatcagctttgatggaagtctgttcagcagcctgccacccgaccgtgcagcaggaatttgtggcactttcactccatgctgtgccctgggccaggtccccgtcctctgaaacatgtaatgactggagctgcctggtcctgtgcggcacgtagttggggcatctgacccagtctgggagaggggagaaggggaaggcttcccggaggagatgacatctaacttgggttctgaaagctaaggcatcaggcggagagggtgggggtgggtgagggcacttgaggcagacgatggagaccatgaaaggcccagaggccaggggcactggaggcactggagaagccatttggaggcactgcttgtaatcccattgtgtctgaaatttggatttggaggtggggtggaagagctggggccagcaaggcgatcaggtcactttatgaaggtttgttcccactcaggccaacttcccggctccctgttctttcctgtggagcccctccgaagccatgcaaccttgggaggttctggcctccacccacgtctcagaggctccccaaggctgttgctgccatggccccttggctgcccatcaggtctctccccagagctggtcagcaggggcgcaataaagcatttacgagagctggggttcagctgctgcggtggcgagacgcggcccgggtctggggtgttaactatgaggaaggaagcagctgccattgcccatttcaccccaccccgagatcccacccctgcttgttccctcctagccctggacctgagctccctcatcaggacccccaatggcagctccctcaagctggtcggtggctcggccagcatttccatgcagggtctccagccacgtagcctgtgctctctgggtagagccaagggcgagaaggtctaagtcctcctgggtgcaaggatcagttcacagagccagggtgggacctggtcacttccgagccctcactcccaccccaggcagccctgacctctcactggccgctatcacccctcctttgagcctcccagctgcttcctcccccctaaagtggttcctgcctgccctacctgccttgcaccctttagggcaacagctcccagaatagggctgggcctccatcccagctgtggctgttgggtcccttcctggggactttggcatcaatggggatgggggggggcgggggcagggttcatgaccgaacgtgccaggaacctcccttgacctggggccggaccagtaacccgaggactctgacccgggaggcagttccatcctgcctgttgcagggagcacaagcagcccagtgcagggagaggagagggcgggcaggcagactcggaggaggagcaagagagggcagctgtgctccccaccccccagattccaaggtcagtgaagtccctctcttcctgctcgctccggttctctgaggtccccctatatctgcacagtgagttctttttggctcaagccagcttgagttggcgcctttcccctgccaccacagagcatatcaaggacatagtaagagctccaaactgggggggcatgtagttcttcaacttttgagactgaaatagggcacgattaataattacactgggactgcaggtgtaacctggatgacccaggcagaccaggccgaaaggtcaccccatctgtaggtgaagaacacgcaggctgcttgcatctccttttgtccttgggcaagccaggacgggcatgttaggcagggatggccgtggtctctctgagataaagctttggcgggatggtggtcccaggtgggtggctctgggagagggcgcaggcccgagagtggccacgttgtcctgtgtggttggtgtgcagccagaaaatcgattccggctgcgggagaaaggtcagggtcacgtccccttcctttcttcttgatggatgagggacctgttctttgagatgtggactccccaaggccagggaggccgatgcccttccaggaatacgtgggcgggacagtgggccgggacccgacggaaggactcaaaggaggccgcagaggtcggagcacaggatggatggtggggccgcaggagctataagtggcccggccagggcccttgcacgggtctctggccatgctactcctcggggtgctgctgctgactgtgctggctggtgcccgcctgctgtggggcaagtggaagctcaggggtctgcacctcccacctcttgtccctggctgcctgcacctgctgcagcccgaccttcccctccacctgctgggtttgacgcagaaactggggcccatctacaggctccgcctggggctgcaaggtgagtctgcctctgctccgtcgccagccccaccgcgtgggaggtagggtccccttcctgctgacaccccgctctgactcctccccagatgtggtggtgctgaattctaagaggaccatcgaggaagccatggtcaggaaatgggtggacttcgccggcagaccgcagacgccatcctgtaagggctggggcggttctcgagggacgtgggctgtcagaggccgggaaggccagcctgcggctcccatggtccgtccctcccctctcctattctcctactcgcagacaagctggtgtctctgcaccaccaggacctgtccctgggggactactccctgctgtggaaggctcacaagaaactcacccgctcagccctgctgctgggcatccgcagctccatggagccgctggtggagcagctgacccaggagttctgtgaggtgaggctgccgccccacagccgccccagctccgctgccccttgcccggcggcgcccggcctgcttagctcctgttcctcctccgcagcgcatgagagcccaggctggcacccctgtggccatccagaaggaattctctttgctcacctgcgccatcatctgtcacctcacctttggagacaaggtcaaggttttcttgccctccatgtgctggggcccttctttagcctctccctggccctctctggtcctgaacttttttcttctttttttttcggcaggaggacaccttagtacatacctttcatgactgtgttcaagacctgatgagaacctgggagcactggtccatccaaatgttggacatcattccctttctcagggtgaggggtgcagcccagactccctgggtcctgggaggggcggtgcggggggagcaggcctccttgccagcggctgcacccttttgccccctgccccagttttttcccaacccaggcctctggaggctgaagcgagccttggagaaccgggaccacatcgtagagaagcagctgaggcagcacaaggtgggaaggccgcgtgggcctggctcccccgcagtctgcccccaggtggcgcacctgctggacgcgctcaggcgggctcctcctccccaccacaggagagcatggtggcaggccagtggagggacatgaccgactacatgctccagagggtggggaggctgagagcagaagagggctgtggacagctcctcgaaggacacgtgcacatgtccgtggtggaccttttcattggcggcaccgagaccacggccaccaccctctcctgggccgtggcgttcttgcttcaccaccctgaggtgcgccctgggggcagcccggctggggcccaggaactcggttcgctgcctccccccgcccccatgggatgcgttcacccaggggcgcttctcccagtgggcacgaaggctcctccactgggttgttctagggaggggcccggggccgggaggccaggcaggcctgggtcagctacctcagggttcccaccccagacaccaggcttgctcccatttcccagattcagcagcgactgcaggaagagctggatcgggagctgggtcctggagcttcaggctcccgaatcccgtacagagaccccacacgcctgcccctgctcagcgccaccgttgccgaggtgctgcgcctgcggcccgtcgtgcccctggccctgccgcactgcaccacgcggcccagcaggtgactctcctaagagctgggcacacgggggaccaaagggtgggggatcctggtgggcctctgactccaccttcctctcagtatctcgggctacgacatccccgagggcatggttgtcatacccaacctgcaaggcgcccacttagacgagacggtctgggagcggccacaggagttccggcccggtgcgtggtggcaggggaggggcggtggctgcggcacaagggctgggggcggcggaggccagtccccaccgctactggaccctggttctatcctcctgcccgcagatcgcttcctggtccccggcgccagccccagagtgctggccttcggctgcggggcgcgtgtgtgcctgggggagccgctggcacgccttgagctcctggtggtgctggcgcagctgctccgggccttcacgctgatgcccgctgcgggcaccctgccctctctgcgaccccgggcccgctgcggcgtcaacctcagcatgcagcctttccaggtgcagctgcagccccggggggcaggagtcctgggacgtggccagcacccatgacaggcaggacacacgacggctgtgtgcttcagtttctccttttatttctcccgtacaaaccccgtccctcccccctgtaaacatggtgctgtgagatcgcagatggagaaggctccctcctccggtggctggatagtgagggtggcccctggctcttctctcagcgcgacccctcagtgctcggcagtcatactggggcgccggagatgtgagctgtggtcagcctccctgggctgctgggggccggtagcttcttggtctgagcttcatttccgtgaagggcacagagaactcgaagcccttccagtagtaccagctcaccccctgggaaaggattgttgagacagagtcagagccagacagacgtcccatctgctccccagcctacaccctgcaccccggcatctggggagatggttcccagaaatcaatcaccctccccccgcacccacttcatgatcctcaactgcaaaggccggaggcttagtctaagctggccctttacatccaataaatcgtgctcatgtctccctcgagatgacctggtgagattagcattattgtttcatttcacagatgacagcccaaggcgccaagcggctctgtcgctcatcccgccaccccgcagcaggctgagccctgagccactcccagcccctcacctggtggtccactgtacttccgtagagcccgttgaggttggcgtagtggcagttcctgtaccaccaggccccgcggtatgacaccgcgcaggagatgagcaggttgttggggtcgcgatcacgggcggaaaagacactgccactatggtagctcatggagtcccctggaccggtgtgaaaggggcagtgagggcctcccctcccctgccccactgtccacgggccccaggtccaccctgacctgctgtgccgtggtagccgtccagatgaaggcggtagtactccgcagctgagtctactcggaaggagtcatactgtgcgaacacggcctcgtccccagcccgcaggtccacacgcatggagtagtcgcccgcttttgtcaggctgtgcagggcctcgttgcctgggggtaaggaggtgctctcaccagagtcccccatccaccggccaccggcccttcccggccccgcccctgcccctgtccctgcgaggcactgacccaaccagaactccccagagatgttgccgaagccgtgggcgtagtcctcccagtccctccaaaagtctgtctgtccgtccatgcggcgctggaacacctggcaagcagggggagccaccatcagccacggctccgggcacagcagcccgtgccccgcgcggacccttgggcgttctgtccgccacccaccagccagccgcccccgtcggtctccatgtcacaaaacacattgaggggccgctcgcggttgccattgaggaagacggtggtggtcctggaggtgccggctccgttctgcatctcttccccgcagtcccgagggaaggggattcgaagtccacctggggagaggagaatgacggaccggtcctgtccccgcgcccggcgccctgctgcccgctcggccccccgccttaggtcccagcgccaaataccagtggtgaaggaggtggacaccggcggcgtgaggctctcgccccacacagcccggagccacacgctgtagggggtggagggaaagaggcccagaagctggtgagaagtggccccgcctgggagcacgacctcctgtggatagatgaggagcaggtcagggccgggcaggggacccactgggggaggtgggggacgggcagcgtctcctggaaccggcggggctggccagtgagggagagaggagcacctgtgtctgtccaccaagggcgttgaaactgagcaggtagctagtcggcgggacttggggctcagtccaagtgagcagggccatgcggggggttacttccttggcctccaagtcctggggggcttccagccctgggaggggaggtgggaagagaagatggagatgcagatggagatggagatagagatggagatggagatagagatgacctcccctgcccctgtggcacacaccacccaggccgtacctgtggtgaaggtgatgctggctggggaggtgaggttgggcccccggagaccacgcacagtcgctgtgtagttggtgtggagcctcaggccccccagagggtactccaccgcgctgccaggggccgaggcctgcagtggggggtctggaggtggggtgagcatcagcctctgccccctcggtgccctgccagagcctctgtcccctccctgaccaagtcccctctggaggcctcagcccagctcaccccctggggctgtgacacggatgttatatgtgtccacgggggcctgaggaggcttccagtgcagcagagctgatccctccgtcaagttcagtgcacggagctgggtggggccatcaggaactgggagaagggaggaggctcagagctgtccccgctcccctctccacgcctcacctccccaagctctacgggcctcctgtccacagtcgaatcctctcacgcctccttccccctcatcctgtcggggacctagcccatctcacctgtggtgaggtagcctgtgagaggctcactctcctcaaagccacggacagagaccacggtcacctcatagtgagagcctggcatcagcccctggagtttctgggtccgggcttggccatccacctgcacactctgtggctcccctgaaaacacacaggcttgggagtttgcccagggaagcaggcaagagccacagggtgagcagactgcagggggcgggagggcaaagggggggcaaaagggggtcacctccatctgccagctggtaggaaactttgaaactgtccactctggatggtggaggcatccagctgacctgggccgatgtttccctgatttccctgaactgaaggtcccgggggctttccagaactgaggggagaggtgtgccgaggaatgtcagtgagggtgccgggcagggaggctcctgcctcgggatcccctgccctgctccttcccagggccccagtggctgcacacctgctcaccaccagccctttcctccagacctcagagaggaagactctggagattcccctcagccccaccacacaccaacctcccctctggcggaggcactaggtcccgccccacaaagtacaaagacctctcacatcagggcagcacacgaatgtgcccactgtggggccttacctgggctgagggtacgggctgtgccctggatgctgtcggccttatggggcccacgcagcccatacaatgtaaggctgtacagggtccccggatgcaggtcccggagcacggctgagcgctgcgtccctggcaccgtcaactcccgctgcagcaggggacgtgagtggggctctagagtgcttggtgatgggaccccaaaacggagcaggaaggagtcaaaggcctcggatggggcctcccagttgagccgcagcgaactggtggtcacatcagtcactgacagctgggacaggcggggccctggctcccctggggtcagaccggcaggagcaggccctgcacagagtgggtgggagacaaaagcacaccacgttggtgggctggagcaggtctctcccaccaccccaccctggccccaagtttctcatatgtgaggtggtggagctcatgcgaggcaggtactcagctggggcccatgtgagcatgtgtgtggagcaccacaggcggctgctgcaccccttcctccctccacactgccctccagtcactgcctctgggcaccccctttagcccttccagtcccagacctgaggtgggtgaggcctagatacggggcccttgcccggcggtacctgtggtgccctcagctgagataggccccaggcgcttccctccatggaggccatagaggaagaactggtaggaggtgctgggctccaggcctgacactaggaccttgttctggttgccacccacgagcaaggcctggggctgcccatctgtgtcctgatactggaccacgaaagagtcaaaggggccctgggccacattccacaacaggtgcagagagtctggggttatgtcgctcactgccagtgtccttaggtggggcccttcagggagctcaggggcctctgtggcggggctccagggggctggtgtgtccacttccggggctgtgtgggagaagcccaggggagaagctgagcaggggtgaccaaggctctactagcatcgcccttctcttgaatctccccttcccctgctttggcactgattcttgccccccacctccaaccccggcctccgtgagcaccagcactgtggccccatcagatacttgcttctccttctcctcctccatgtattctgggtgtctcatcttgaggtgcgtgcacagcctgctccctccccaccatgtctgggtgcctatgctcctggcccaaggcaggaagagctgggcggggcatgtggtccagggcggtggagtgggggtgcatagctgaggacggagctggctggtaaactggaagggcagatcgcaccaaccaggtcggccgatgggccccatcctgctgacctcagctgggtgttaataactcccagctccatcactgtagccacttctggttgctacgcccctcacctattttcttttccagttattttccacttgggaaaaaatgctcctgactcatccacaggagggggtttgcccctatctggcaaggctgcctgcggggaggtaagagctgcctcagtagagtgaggggaacagctggcagtgctgggcagcatgggggctgggagacaggggaccactgccagggcctttccttgtgcctgccttggctgccctggctcctgctttggatggactcctcgggttaccatcggagctggccccactgcacctcccttcctcccaggcccactcatgctcacctgtcactcccaggacggagatggggcccaagtgctgtcttccgtggatcccatagagcaggaatttgtatttcctgccaggctccaggccctgtatggtgacgtcccgctggtctttggccacaggcactgcccggggctgcccagctgggtccctgtactggaccacaaaggaatcaaagaggccctgggctaccgtccatgagaggctcagggagttggaggtctcatctatcactgtcagctctccgaggcggggtgggtgctgctgctccttctccaggggagctgtaaacagagtgggaggagagaccttagttaagagctaccagcagccctggcagcttctcggagacatgagggtctaggaaagggtccctgcactgtggcttcagtctgcctgaaaggaagaaaagcgagcagcttgatctctgctggaggccactgcccctgccccccttccctccctgctgtgatcagggtgcagtaaatgcagagaagatcaccttgtgagacagtgtccctgggggtgtagagaaaggcctcagtttctccctggcccctgatccctcgagcaggaggtggccagagccgagaaaggctcccagagtgtatctgggttgtcagggaaacacccctaaacactaagagctgggctgggcagccagccaagcttgtgggctcccatggcttggccatgacctcctctctcttgctatcagcctgggccatcctcccacccactttccagccctccactaacaccattggaccagggcagggttggcaggggggcagccggggtagaacaaagaggagagcagaacacagaggagacctgccctggcggggacaggcgttagctgatggggtcagaggagaagcctgtattcagtgcccataatgagggtttggagtctgagtgtcccagctgactgtgtgccccatccccatctggccagggtgactcatggtcctgggaaggaggtaagggtcagtgacccacctccaccctttcctcagggggctgagtaataggcacaatgactccagatttttccatagtctttctacagccaaacccttccatattttccacctcctgcctcggctgggacagagggaaggactggaacatttattaagtgctgatccatatttattatgcatatgcaggtatagtaactgtggttcgagggaaagaagtggcttgtctgtggccacaccaccggcaattggaatttgaacatggttctgcttagctctaaagactggattctttttatgacatcagcagtcagtgaatgaagggaataatgcacatataaaatacttagaatagagcctggcacgtgatggaggctcagtaaatgtttgctcttgctgccataaaggctgaaggcagggataggccggtggggggcagctcttggggcttaagtcagaggcaactctagaaaacatggggtgcaaggctggggctcacctgtgctgctgtcggcagagatggggcccaagcgcttcctgcccgccagcccgtagagcaggaacctgtacttcctgctgggctccaggccagggatggtgacctcacgctggtctgcggacacaggcaccccccggggctgcccatccctgtccttgtattggaccacgaaggagtcgaattcgccctcggggaccgtccacgagaggctaatggagtctggggtcacgtctgtcactgtcagctccccaaggctgggaggtttcgtgtctgggcctggagtagagagagaggtgtatggaaagtgacagaaatggtgacagaagctggcagagctttgtcaggatgctagggctctgggagctggttctgagagctgggagggggtggctaggccacctggcaggaagcaggccagcagaggaacagggaaaaagatgaaccaggttagccagcagcatccccaggatgtaggacaagtagggagaaggatgggaacgagaggggtcatggggagctctggacctggtgtttactggacccagtaaataatcaggtcaggaggccccagctttggagcttggagcatagaaacaggacactaattgccaccacaagggggtaaaggcctgtctggaggcacaagcacccatgagggcctccagcatcacgcgtctttgtgtctacagacacaggaccatggcgtttctcatcctggagcccgaagagcagggacttgtacttgcaggtgggtccagacccgaaatggtgatctcgcgaaggcctcgagccacaggcaccacctggggtgcccctgcacatccctgtactggaccagaaggagtggaaggggccctgggccaccgtccatgagaggcgcacggtgtcagaggtcacggtggccatggccagctcccccaggccgggggctgcggggggctctgtgggcagagaggctggaacagagcggaggaggctgatgggtcaatggtgcgacccttcgaaagagagagagtgctttcccgaggctatgaaataaatgtcttgtagcaagctcttctaaagtgcttagtgcatcccaggcgtggctgtgagcgcttcacacacaggcacgaggatcctcccacaaaatatgaagtacgtgcctctagtattgtcattgccactatgtgtggatctaaggcgcagagaagttaagatacggtcggaattcacacagtcagtggttcagagcaggattcaaacccagagacgtggttctgcagccactaaagaccagagccactgcagaccagagacgtggtctgagtcactaaaatacccagtccgggagcctgagaggccgtatatgaatatttcaacaagtttaatgttgctgataagaaaggaaagtggacaggtaaatttatgaagtgaagggtacctgccaactaagcctgaacagtctcctacatccttcatgagtaaaggatgaggaaggatattagtgccacatgagaaaagagagggacctaagggacgatttgtgaggaaaggaggaaagcaagacaaaacaggagacttaggagacagggtgctcgctgtcactcaccggtcaggcccacggtggacacggggcccatgcgccgccccctgtccaggccatacaggtgcatcttgtacttgcgtcccggctccagacccccaacggtcacctcactctcgtcgcccgggacacgcaccacctggggccgcccatccctgtccttgtactggacagtgaaggagtcaaagtggccctgggggacggtccaggagaggctcagggaatctggggaggatcccgtcaccgtcagctcccccaggaggggctccttggggggctctggggcctctgtgctgggttctgtggggctgggggtctcctccacctcggtgggggttggcgtctcttcttctgcagctgagaaagagacacatggagagggtgaggcagggtccccgggagacatcctcaggtcttaggagaaggatggagaagctgtgaccgggtctgggggctcccgattcagttcagtgaagcccatcctcggggctgggtgggcttgctcagcccacatctcacaaacatgctgggagcctccagggtcagccatggggaagcctgtccagccaccagcacagctcacggaggcccgcccttctctgcatgggaggaccccctcggtcctcagggagccccagcgggggagcaccttgagcagaagggcctcctgcaccccactcacccattacctgagagaggggggtcctgccactggcccaaccctgaggcttccactggctactcacctgtcaccccaatggcagagatggggcccatgcgctggccaccgtggaagccatacaggttcatcttgtacttgtggtctggctccaggcctgagatggtgaccccgtcttcatgccctggcaccctcaccgccttgggctgcccatccccattcttgtactggaccaggaagtggtcaaactggccctcggggatggtccaggacaggtgcagggagttgggggtggctttggtcactgccagctcccccaggtgtggcttgatgggaggctcagaggacatggtggatggggcttgggtggtcacagcttcatattctggaggggacagagacatacagggacagatgaggatgtgcaggtcagcctctaagtaggtgtctagaaaaataagatcataaggagcagagcattgccacccacggcggctctaactcatccactcttcccttaatgtcccaggttcctgtgttggccttctgggcgcatatcctcatcttgccctgccctcccctgcccttcccctgcccactgctctcttcagtacccacctcccctgtatcctgggccctagacctcccttccctggggtctccttggcatctcactccctttggctcatgtgtttgctcagaccccaaacacctcacctttccccagccaggacgctggaggcttcctggctctgtctgcgtccccagctgccatcagactcagagtgtccaacccactcctaagtgcctcctgagctccccatacctgtagccccaccagcctgccttggggccaatcccagtgctgtcgcctgccacctgggtcaccacctcccccctgggctccctgcctccctgttctccttgtgcccacccgttcctcacagggggccaggatgagcccttcagtgcacaagggacggcactgggctcagcttaacattgcaacaaccgtctccatccccaggaggagtccctgccttctgaactgctcctactgctctacccctgtctcaggactctttcccccactcagaggatctcacacaaaatcctcccagtccctctcaggggccaccatgatcctagtttccaggccttggcaccagctgtgacgtggatctgactctaacgctgtcaccaagctaacaccttcccaccttgggtcccagctgtcctgtgggtacctggcaggctggctcaagcgtgctgcccggtcctggcccggccccaggacctccggacacacacacacacacagacacacacacacacctctttgcctgatggctggttcgcagcctgactccccatgcccgggagccctagtataataagaactttctctctgccatgatcaggttcactccagtgaactccagtcatgaccttgagatcatgacctgagccgaaatccagagccggaagcttaacccactgagccacccggactcctcttaaatagtcttttttaaaaagagtaacacactaaacatgaagccacgaggtacgggatgaagtatagagcatctgggttgagtttaccaatacagcaataatatatccatacaacggaatgctctttgggcgtaaaggaaattagataggggtgggacaaccctgtaaatagactaaaaatcattacgctgtatacttaaagcaggtgaactttgaggcatgtaaattatatctcaggaaagctgtgaatgaagaatacattccagtggggggaaggcaaggggtgggcggggtgcagaggagccagactggccaggagttaatactaggctgcaacagggcaatggacacacgggagctccttatgctcttctttctctttgtgtgtatccaatcttacatattgggtatttgttgagcggatgaattaatatttcatggcatttcccaaccacgcatacacacacacacacacacacacacacacaaagatctttccagggttcccaggcaaaacagaaagccacacatgggtcagtggatcactgcctcgaaggcttccaccccacatacctctcgggcacatgcctggcacgtccctggccttcggcttccaccccacatcacacctgtcctgacatgttactgggtggagggcaggttaggtgaggctttaggttcctggatttccagtggaggacactctggaggctccaccaatgagactttacccagcccaaccctgaaggtccccgccgtcactcaccggtcaggcccacggtggacacggggcccacgcgccgccccctgtccaggccatacaggtgcatcttgtacttgcgtcccggctccagacccgcaacggtcacctcactctcgtcgcccgggacacgcaccacctggggccgcccatccctgtccttgtactggacagtgaaggagtcaaagtggccctgggggacggtccaggagaggctcagggagtctggggaggatcccgtcaccgtcagctcccccaggaggggctccttggggggctctggggcctctgtgctgggttctgtggggctgggggtctcctccacctcatcctgggggcctgggagaagacacagggatggtggcttcattgtcaagtactgctcatgtcaatagggacaacacagtgcaagcagcagactcttccagctttcaacagaagctggagaacctcggggttaggcaactggtaattaattgatggagagtgctagacaggccccaatccccttcatactggactggccaggaccataaacattcaagaaggcaattcagtcatgtggatagaagccaaaatacttctcatgtcctttgacccaaatcccatttgggcagccatcctacaaaaattatgaaaaagttggaaaaagttgtgccatgggagtcccttatgggatcatccataacagcagaatgtgtcagcaatcgaaatgacccagggatgatgattaattttgttatggcacttttaccacatagcatcaaataaccattaagatgatgattaatgcaggtcgtacagccacagaatagaccctcacaatgtaagttatgtacaaaaacaaaggaagagccaggaattatgcgtacactctgcatttgaaaacatacagggagaggatgtgttttggacattattattaatggcagtttttgggtcaaaaggtattctgatggcagatttttcctcctatttttcaaatattgcttaatgttgatattcatttcactagaataatgtggacttagaaagaaatcctggaatataaaaattaataatttggtgggggctgtggggaagtgccatgcgttccttacactgccctccttactttgtgtgtgcttgtgatttgtgtgacaggtcataaaattgaacagtggataacagttttccttccagttggcagctgttctaacatctattatctgatcattcccctgtcctcctcctcctgccatactcctgtgaacatatgtagaaaaaagaggcccatcccccaggagtcagaggggctgtgtgaaattggtcctctgtgtgaagtatcttcaggagaggagaaggaacctcatagagcctctcacttggtctcgtagaggcggtgagccccacccctacagaaggctctctccagggtgctgggctctccctcacggcacacagagaaactctgttctcatggggcatcagaatcgagctgacactgaatagagaacccagaaatgggccttcaactctatggtcaaataatgtttgacaaagcaggaaaaaatatccactggaacaaagacagtctcttcaataaacggtgttgggaaaattggacagccacatgcagaagaatgaaactggaccccttcttacatcagacacaaaaatagactcaaaatgaatgaaagatctaagtgtgagacaggaatccatcaaaatcctagaggagaacacaagtagcaacctcttcaaccttggctgcagcagcttcttgctagacacgtctccaaaggcaagggaaacaaaggcaaaaatgagctactgggacttcatcaagataaaaaccttttgcacagcaaacagttgcaaaaatcaaaagacaaccgacagaatgggagaagatctttgcaaatgtcttatcagatatagggctagtacccaaaatctataaagaacttatcaaactcaacccccaaagaacaaataacccaatcaagaaatgggcagaagacatgacagacatttctccaaagaagacctacacataaataataataatgataaatttaaaaataaataaataaattaaatttaaaaaagaagacctatatatggtcaacagacacatgaaaaaaatgctccacattccctctgcctgtgtctctgcctctctctctgtgtgtctctcaggaataaataaataaaatcttaaaaaaaaaaaaaagggacaccaggctggctcaacggtttagcacctcgctttggcccagggcatgatccctgggtcccgggatagagtcccacatcgggctccctgcacggagcctgcttctccctctgcctgtgtctctgcctctctctctgtgtttctcgtgaataaataaaatcttaaaaaaaaaagaaaaagaaaaagaaaaatgctccctatcacttgccatcagggaagtacaaatcaaaaccactatgagataccacttcacaccagtgagaatggctataactaacaaaacgggaaacaaatgttggtgagcttgtggagaaaggggaaccgtcttacactgttggtaggaatgcagactggtttagccactctggaaaacacggtggaacttcctcaagaagccaaaaatagagctacctgtgatctagcaattgtactaataggtatttatccaaggatacaaacataatggagtgaaggggtacctgcaccccaatgtttatagcagcaatgtccacattagccaaagtatagaaagagcctaggtgtccactgacagatgaatggataaagaagatgtgagatatatatacatatatacatacatacatacatatatgtatacacacacacacaatggaatattactcagccatcagaaagagtgaaatcttaccatttgcaatgatgtggttggaactagagggtgttatgctaagggaaataagtcagtcagagaaagacaattatcatatgatttcactcatatgtggaatttaagaaacaagacagatgaacatatgtgaagagaaggaaaaataacataagataaaaacagagagggagacaaaccataagagatgtcgaactataggaaacaaagtgagggttcctggaggggaggtgggtgggggatggggtaaccaggggatgggcattaaggagggcatgtgatgtaaagagatctgggtgttatatgaaactgatgaatcgttaaactctacccttgaaactaatttaaaaaaaagagagagagagagagagaatccggctgaccctgacttagaaaaaccatcctgactctcctttttagaatttaattcgccttgggattttgcctccgtaatttcttagggactagaaattatgactttttcagaattaaatatgaaataaattgcaagagcaatgggggaaaagatggaaggggtgcaagggaggaaaagacattatatttaaaagaaataattcctgattataaaagaaatgttcaccatttaagaaattttggaacaacacagaatagaataaaacaaaaaaggctggaacattctatcctgtcctccaaaccatgcatcctgtaagatgtgtttctttccaattttcttgccacgcatgttattttccagtggttatgattagcatccttacaaaatttggaggcccctttttgattgtaatattatcaagtaaattgtcttatgttaaaacattttggtgatggcaaaaaactcatagatgttgcttaaatatttaatcatcccaatgtggttggaagttgtcctctttctttccttcttgtgtgtgtgtgtgtgtgtgtgtgtgcgcgcgcgcgcgcttggccagtgcttgacacatttctcttgtagagacacctagtagctgatcatcagaaggaggttatgctaatatgtatgatgaggcttcaggttagcaaataccaaactcctaggcacaggccacagttcagggccgtggaagaaatggcatgaaatggggaggggaggtgtggattcttagggactagcaaaagaacagaacagtcatctgggttacccatgaaaaaaggtagttctccctgaagatctctgatccatgtcacctcactcaccggtcaggcctatagtggacacggggcccacgcgccgcctcctgtccaggccatacaggtgcatcttgtacttgcgtcccggctccagacccccaacggtcacctcactctcatcgcccgggacacgcaccacctggggccgcccatccctgtccttgtactggacagtgaaggagtcaaagtggccctgggggacggtccaggagaggctcagggagtctggggaggatcccgtcaccgtcagctcccccaggaggggctccttggggggctctggggcctctgtgctgggttctgtggggctgggggtctcctccacctcggtgggggttggcgtctcttcttctgcagctgagaaagagacacatggagagggtgaggcagggtccccgggagacatcctcaggtcttaggagaaggatggagaagctgtgactgggtctgggggctcccgattcagttcagtgaagcccattctcggggctgggtgggcttgctcagcccacatctcacaaacatgctgggagcctccagggtcagccatggggaagcctgtccagccaccagcacagctcacggaggcccgcccttctctgcatgggaggaccccctcggtcctcagggagccccagcgggggagcaccttgagcagaagggcctcctgcaccccactcacccattacctgagagaggggggtcctgccactggcccaaccctgaggcttccactggctactcacctgtcaccccaatggcagagatggggcccatgcgctggccaccgtggaagccatacaggttcatcttgtacttgtggtctggctccaggcctgagatggtgaccccgtcttcatgccctggcaccctcaccgccttgggctgcccatccccattcttgtactggaccaggaagtggtcaaactggccctcggggatggtccaggacaggtgcagggagttgggggtagctttggtcactgccagctcccccaggtgtggcttgatgggaggcttgggagtcgtggtgggtggatctgtgggggctggtatttcatggtcctttcctggggctggatgaggatacaaagagaatttttggatgtgcttcatgggcctccatctaataaaagatgtttagatgtctcccagacacaccaaggccctccagcctggatgccagcttcccagggttaagacgtcatttccctggtttgaatgttcagttaccaaagaacggaccacactcttgtggtgccatcatgatgggaggccgggactgccatgatgctcaatacatgcattcatgcactgagcccttgggagccacagagcaaatctgcatagagagacagagctaagggtttctaacaccaccaagcataccaggcaagtcacatcaggaggtacatctattcaggtttggatagtctactttgtgaatattttcctttaatacctccttgtgtttagaaggcttctgagcatttttttagagacaaatttagctttcacagttgagggcaaagagatgagacacaggagatcaactctgcacctgggtggtttggggcttatatttgctctctccgtaatttatggcatggatgacttctcacacccaggtctctttcagcttttctgttctgcttagggtttcattcttccttcatagctgaattatgaaatcattttgtttcctatctgctctgtttgggaagcaggtcttaagcatcagggggtaatagctccaaaagaacttaacaaaagcaatgaacagccctgttagcatgtaatgaatgaagggaaggtgccttaggaagttgcagatacaacgaatactaactgttgaagtaacagcatccatggtagcaggattcagtgctcatttagcataaataaggatcagtttgggagttgaagaacacatacgattttacccattgaaatcaataattatgagaattcatcctaagagttcagaaattaattttcttcctctttcttctttacagatgaagaaagggacgcacagagatgttgagtaactctcctggggtcatacagctcaaatgggctgaggctagggttaactccaggtctgtctgagtctcttacttctctggttccctgcctcttcaaggaccaaaaagcctgtgtgtgtggtcacctgactggctagaacatgtggctcttggtcttggggttgtgagttccaggcccatgttgggaatagagatttaaaaaaaaaaagaaagaaagaaaaagaaagcctgtgtgtaaaaggtaagatggctggggcaacactgaaggcttgggatagacataagcagaactgttctcaggaacttgggaggctcagtctcagggacagtggggcaaaaacacctgaatactgacatgaaagagaaactgagtccagctggagcagggactgcatactcaccagttgaaccaacagctgagacagggcccacacgctggccaccgtggaagccatacaggttcatcttatacttgtggcctagctccaggcctgagatggtgactctgtcctcatgccctggcaccctcactgccttggaatgcccatccccattcttatactggatcaggaagtggtcaaactggcccttggggacagtccaggacaggtgcagggagtcaggggtggtgtccatcacggtcagctctcccaggtgtggcttcagaagggtgctggtaaggggctccccttcagggtctggggatagatgcaaacagaacttttcctgttgctggaagaagtagttgaggccttggctctcctggattcagaccagaaggtgggccagctctgtagacctaacttatgatccatttctgcttatcatcgtttttttgtggcctcctcaggtctgtcaaacttaccaggcagcctcctgcctcagggcctttgcactgattattccctttgcatgaatgtttgaccctggatgcctgcatggctcatgtccacacttctttaagttcattgttcaaatgtcatctcttcagggccaatcttgaccaccctatttaaaattcattttctcccaacttaaatgtattctcctttttttggacctgaccccagcaacagattgcaaaacaacacttaagagacaatcaggaaactaacattacctacatacttaatgatactaatgaatgattgttctttttttaaaacacaaaaaaaaccaaaaaactcgatcctgggtttccaggatcagaccctgggctggaggcaggtgctaaaccgctgagccacccaaggatccctgattgttcatttttaaaggcaaaatagggcagcctggggggctcatgggtttagcaccaccttcagcccagggtgtgatcctggagaccggggattgagtcctacattgggccccctgcatggagcctgcttcttctgcctgtgtctgtgcctctctctctctctctctctgtgtctctcataaataaataaataaaatcttttaaaaacggaatgcctcggtggctcagcagttgagcatctgccttgggcccagatttttagactaaaagtcattacgctgtatacttaaagcaggtgaactttgaggcatgtaaattatatctcaggaaagctgtgaatgaagaatacattccagtggggggaaggcaaggggtgggcggggtgcagaggagccagactggccaggagttaatactaggctgcaacagggcaatggacacacgggagctccttatgctcttctttctctttgtgtgtatccaatcttacatattgggtatttgttgagcggatgaattaatatttcatggcatttcccaaccacgcatacatacacacacacacacacacacacacacacacacacacacacacacacaagatctttccaggttcccaggcaaaacagaaagccacacatgggtcagtggatcactgcctcgaaggcttccaccccacatgcctctcaggcacatgcctggcacgtccctggccttcggcttccaccccacatcacacctgtcctgacatgttactgggtggagggcaggttaggtgaggctttaggttcctggatttccagtggaggacactctggaggctccaccaatgagactttacccagcccaaccctgaaggtccccgccgtcactcaccggtcaggcccacggtggacacggggcccacgcgccgccccctgtccaggccatacaggtgcatcttgtacttgcgtcccggctccagacccgcaacggtcacctcactctcgtcgcccgggacacgtaccacctggggcctcccatccctgtccttgtactggacagtgaaggagtcaaagtggccctgggggacggtccaggagaggctcagggagtctggggaggatcccgtcaccgtcagctcccccaggaggggctccttggggggctctggggcctctgtgctgggttctgtggggctgggggtctcttccacctcggtgggggttggcatctcttcttctgcagctgagaaagagacacatggcgagggtgaggcagggtccccgggagacatcctcaggtcttaggagaaggatggagaagctgtgaccgggtctgggggctcccgattcagttcagtgaagcccatcctcggggctgggtgggcttgctcagcccacatctcacaaacatgctgggagcctcagggtcagccatggggaagcctgtccagccaccagcacagctcacggaggcccgcccttctctgcatgggaggaccccctcggtcctcagggagccccagcgggggagcaccttgagcagaagggcctcctgcaccccactcacccattacctgagagaggggggtcctgccactggcccaaccctgaggcttccactggctactcacctgtcaccccaatggcagagatggggcccatgcgctggccaccgtggaagccatacaggttcatcttgtacttgtggtctggctccaggcctgagatggtgaccccgtcttcatgccctggcaccctcaccgccttgggctgcccatccccattcttgtactggaccaggaagtggtcaaactggccctcggggatggtccaggacaggtgcagggagttgggggtagctttggtcactgccagctcccccaggtgtggcttgatgggaggctcagaggacatggtggatggggcttgggtggtcacagcttcatattctggaggggacagagacatacagagacagatgaggatgtgcaggtcagcctctaagtaggtgtctagaaaaataagatcataaggagcagagcattgccacccacggcggctctaactcatccactcttcccttaatgtcccaggttcctgtgttggccttctgggcgcatatcctcatcttgccctgccctcccctgcccttcccctgcccactgctctcttcagtacccacctcccctgcatcctgggccctagacctcccttccctggggtctccttggcatctcactccctttggctcatgtgtttgctcagaccccaaacacctcacctttccccagccaggacgctggaggcttcctggctctgtctgcgtccccagctgccatcagactcagagtgtccaacccactcctaagtgcctcctgagctccccatacctgtagccccaccagcctgccttgggaccaatcccagtgctgtcgcctgccacctgggtcaccacctcccccctgggctccctgcctccctgttctccttgtgcccacccgttcctcacagggggccaggatgagcccttcagtgcacaagggacggcactgggctcagcttaacattgcaacaaccgtctccatccccaggaggagtccctgccttctgaactgctcctactgctctacccctgtctcaggactctttcccccactcagaggatctcacacaaaatcctcccagtccctctcaggggccaccatgatcctagtttccaggccttggcaccagctgtgacgtggatctgactctaacgctgtcaccaagctaacaccttcccaccttgggtcccagctgtcctgtgggtacctggcaggctggctcaagcgtgctgcccggtcctggcccggccccaggacctccggacacacacacacacacagacacacacacacacctctttgcctgatggctggttcgcagcctgactccccatgcccgggagccctagtataataagaactttctctctgccatgatcaggttcactccagtgaactccagtcatgaccttgagatcatgacctgagccgaaatccagagccggaagcttaacccactgagccacccggactcctcttaaatagtcttttttaaaaagagtaacacactaaacatgaagccacgaggtacgggatgaagtatggagcatctgggttgagtttaccaatacagcaataatatatccatacaacggaatgctctttgggcgtaaaggaaattagataggggtgggacaaccctgtaaatagactaaaaatcattacgctgtatacttaaagcaggtgaactttgaggcatgtaaattatatctcaggaaagctgtgaatgaagaatacattccagtggggggaaggcaaggggtgggcggggtgcagaggagccagactggccaggagttaatactaggctgcaacagggtaatggacacacgggagctccttatgctcttctttctctttgtgtgtatccaatcttacatattgggtatttgttgagcggatgaattaatatttcatggcatttcccaaccacgcatacacacacacacacacacacacacacacaaagatctttccagggttcccaggcaaaacagaaagccacacatgggtcagtggatcactgcctcgaaggcttccaccccacatacctctcgggcacatgcctggcacgtccctggccttcggcttccaccccacatcacacctgtcctgacatgttactgggtggagggcaggttaggtgaggctttaggttcctggatttccagtggaggacactctggaggctccaccaatgagactttacccagcccaaccctgaaggtccccgccgtcactcaccggtcaggcccacggtggacacggggcccacgcgccgccccctgtccaggccatacaggtgcatcttgtacttgcgtcccggctccagacccccaacggtcacctcactctcgtcgcccgggacacgtaccacctggggccgcccatccctgtccttgtactggacagtgaaggagtcaaagtggccctgggggacggtccaggagaggctcagggagtctggggaggatcccgtcaccgtcagctcccccaggaggggctccttggggggctctggggcctctgtgctgggttctgtggggctgggggtctcctccacctcggtgggggttggcgtctcttcttctgcagctgagaaagagacacatggagagggtgaggcagggtccccgggagacatcctcaggtcttaggagaaggatggagaagctgtgaccgggtctgggggctcccgattcagttcagtgaagcccatcctcggggctgggtgggcttgctcagcccacatctcacaaacatgctgggagcctcagggtcagccatggggaagcctgtccagccaccagcacagctcacggaggcccgcccttctctgcatgggaggaccccctcggtcctcagggagccccagcgggggagcaccttgagcagaagggcctcctgcaccccactcacccattacctgagagaggggggtcctgccactggcccaaccctgaggcttccactggctactcacctgtcaccccaatggcagagatggggcccatgcgctggccaccgtggaagccatacaggttcatcttgtacttgtggtctggctccaggcctgagatggtgaccccgtcttcatgccctggcaccctcaccgccttgggctgcccatccccattcttgtactggaccaggaagtggtcaaactggccctcggggatggtccaggacaggtgcagggagttgggggtggctttggtcactgccagctcccccaggtgtggcttgatgggaggctctgaaggttcatcctcctcttcccttgcgactgaacacagacaggagagagagagagtaggacgtgagagaaagaggccaggcgaacatggggactttgctctcctccaggctctacagccatttggcaggaagcagatagagtgaagttctcctcactcacctgtcagggcttcgatgtgggcaggacccactcgctgctggccatggaaaccatacaggttcactaggtatctgtggtcagattccaggccagagaggatgatgtcattccggtcaccatctaacctgactacttggagttgcctatcttcgtctgtgtactcgacttcaaaggagtcaaattcgccctctatcacagtccaggagagatgcaacgtgtctggggtggcttcctccacagtcacctcccctaagcgaggctcaggcctttgaggacttagggcctcggctttcataggttctctgggcactgtacagagagacaggtaggtatgggtgactgggctgctgctacaagactctccaaggagagggaaggaggggagtaggtgaaggctagaggtcagtaataaaaatgaccaactatggaacagggggatgaattcccaaagcattatgttagaaacccagtgcagagtgcttattgtatgattctgttaagtgagaggcttacaaaggcaaaaccataaggagagaaagcagttagtggctgacagaggctgggatttggggaactgattgcaaaggggcaaatgggttctggggtcgctggaaatgttttatatttcaactgtggtaatggtttcatgacttatacatctaccaaaactcactgttcacataaaattttatgtgaattatgcctcaatagggctatcccttcccctaaaagaagggaaataggaagctcagaaatcccctggctcggtcagaccaggagagctgacaccagaaggagggacggcgcattctggtcacagcctcactcaccagtcaaggcgatggtagagatgggacccacacgtttcccttggtgtagcccgtagagaagcagcttatacctgcgggccggatccaggcccgagatgctaacctccctgaggctgccctccacaggcaccacctggggctgcccatccttgtccttgtactggaccacaaaggagtcaaagtggccctcagggactgtccatgcgaggctcacagagtctgctgtcatgctggtcacctgtagctccttcccaagatggggctttgggggatgctttgttctagcatcatccacatcactccagggctctgagatagagacagagacgaagcggctaagctgtttctggtagcttgggtgacctgaaagggcaagactgagaggtctggggacagggctttgccatggctgagtcctacagggctagtactatgtgaggagagtaactactgcgatggcagccatctccctccctggcctggctgtgtgctgccaccttccccaggggagccccaggagcagagactggccctgacagagacaccctcacctgtggtgccctcggcagtgagggggctatggcggctcttgcccaggagcccataaaggaggaatctgtacttgcggccagcatccagaggggtaattgtgaccgagcgcttgtggccctccacgggcaccacccggggcccatccctgtccttgaactggaccacaaaggagtcaaagtggccctcagggactgtccaggagaggcgcagcgagtccagggtgggatctgtcacccacagctccccgagccggggtgtggccccgaggctggcgtcaccttgggaagctgacagagagaaaagattcttgtgtttattttttttccagaatgactctttgactgcttcccactagagttggaaaaacccagggctgtccaaatgatcagcgcttccccaaaatatttccatcatcctcccatctctgtcaccatccccagccagcccatgcctccctccacttggccaatgtgacatctctgggggaaaaaaaagaacccctagcttcctgcttatcttattcctcctgctgtccaggctcttttcctagcagggtgcagcttggattacttctttccttttaccaaggagcctaccctttatgatctgactgacccttggggacatcagaaggggcacaggatccctgatgagtgtagacagcagatgggaaagcagggtattgtgacggaggtggccctcatgggacctggtggagaagtgggggctgcctacttggtggggggaagagcgggagttcacatggagaaaggatctggtgtctgccctaaagccatcctgaggcctgggaaggagctggcctgctgccttcttggccagggaggatgctgacagcattgttattgctagagttttctggcatcagggaacccctaggggcgggggaaggcctggactgaaacccagaaaaggggcacagctgtgctgggcccgacggggcctggctgggcagtcagccctgggctcctctgcttcccagtttccgagcctccgggaagagggcacaggaagaacagggccctctgggggaagcagacaggggacctgacaggcctgagatggtagaatgagaaggtggtgacccaaaactcccaggaggtgagggctgcgtaaggctgagggctgcaaggcccaggcagatggaaagggcccctggctccctgtactcccacacccccagtctcccatgtcccaccttctaggaagggtcctaaagaggtttcccccattcaacaggagtggaaatgagaagagagaaaaagtcagtgggggaagcagacccagggactggccccatctttcactggccttgaattggggcaggcagtgtggctttccaaacgaaaccgaagagatggacaaagggaagcctttgtcctggggacaaaggaaggggaagcctgggaaagggatgcctggcagggaagcctggcagaaagaaaaagatcaggcggtgtgaagaaaggtgggaaggctgctgggggcccaggcgggtctcacctgtctttgcctccacagagactggactgcgtctcttcccattctgaagcccgtagagcaggaatctgtacttcctgctgggttctaggccagggacggtgacctcacgctggtctgcggccacaggcaccccccggggctgtccatctctgtccttgtactggaccacgaaggagtcgaattcgccctcggggactgtccacgagaggctaacagagtccagggtcacgtctgtcactgtcagctcccccagctgtggctcttggagggactctgtggctggggctggtgggaggggagctaggatccaggaaaacagaacatagctgagatctcgggcagaagaattcccccaccccaagggctcctgggctcccaaggcctcaaggaggcctcgaactaagatgagacacaggcacatctactttttctctgacctctaactgaaatgtagcatttccttcaatgatgaataaaggcagccagtcactgtgatgccagcagtacttgtgacatcaatggatgttttcacgtcaccttagaatgactgcaaaaacttcaaaataccatttatactcatcctgcttctaaatatggggaggttatgccactagcctcattatttaacggataatgaagaagttcctgtattactaaatcataaatttgaattaaaaatattttagcaggaggcacccaggtggctcagtccattaagagtctgccttcagctaaggtcatgatctcagccactcctgggatcaagtgccctgagtcgagtcgggctccctgctcagtggggagtctgcttctctctctccctctgcctgccgctccctctgcttgtgctctctctgtctctaggtcaaataaataaaaactctaaaatctcaaaaaaataaaatattttgataattgaatatcaatataattgatttcctctctaaccctatgcattcatgttgtagattttaaagcactgccctgagaggagtccatgggtttcatcagccaccatggcagaaaaataatggaaacctgtgcccatgaagccaagagcaagggtcatttccagcagaaaggcagactataaccccagggcactgagggcctctgagaagagactcaagggatgcctgtactgtaagcccaaatgaaaaagcacttcaggagaagtccaagtcacagcagggttttgagagaaacgaagaaaacagctgtggacagtcaggggagacagcgtctgccagaggatttaggtcagctggaagcaggacattcctgcctggggagagggcagtatggaggggcactggagggtagggcaggttctagcctggggagaagccaaggggtcagggaacagacagtgcctgtgacctcagtgaggacccatggaggccacccagacaggacctgcgggagggcttgtggggtggggggattctgggtgacccgagaactgcctcacccctgctcactcaccagtcacagctaccacagagagggggcccatgcgctgcccatcatggagcccgtagaaattcatcttgtatttgtgtgcagggtgcaggccagggatggtgaccttgcgctggtctgcggccacaggcaccacctggggctgcccgtccctgtccttgtactggaccacgaaggagtcaaattggccctcagggactgtccattcgaggcccatggagctgggcatcacatctgtcactgtcagctctcccaggcgtggctccagagggggctctgtggctggagtctcttccggttgtggagctgagacagacggtggaaggccgtgaggaaaagctcctttttccctcattagttattacatctgttgtttttgtggtgcccatgaggtggctctgaggtaaaactacactgattggcaacatctgtctggccacagcccctccctaagtccctgtcaggatctggggctgtgctggggttgaggaggggcatccatggtcactgagaccctgggacggctgctgaccctccagctgtatgtcagtggctccaagtccctccctcgggccctgcagactcgtgtttgcctggtgttttcctcgggtgcctcctgtgtctcaaactcatgaagtccacaaccaagttcccctagggacacctccccacacctacactgtcacagcctccccacctcagtgaagccaccacttcattctgggcatctcccatgagtcccctcccaacctacatcttgcctgggagtaagttctgtcagcaagaccttcagaagctgaacccctcctaactccactccactgccgccatctccaagcaccactggctcttactggatgacaagggtctcctaaaccctctccctccaccaccctcaccccccctccaccgttaagacatgagtcagagcctgttcctgcaatgacttccatctcactggggcaaaagccaagtccttacatggggctttgttcatctcttacatatcatgccccagccattccaaacattcctggcttgtctacagatggtcagggccccttcctctgcctgggatattcttcccaaagtgccttctcctttccctccttcaggtcttccttcggagaggccctttccatcctccttcccaccattcactatctcacctgttggactttgcttttctccaggtctcatcacagtcatatacagtaccacagagagatgtgtagagtttgctgtctctttccctctgctagaatgtgagctccacagggaggggctttgccttgctcgatgctgtgtgcccagcacccagtgggtgcttcacaaatgtttgttaaatgaacgagtggtctcggctgggaaaggccgagttcaggtcctggcgggcaccacaccccggaatcagctgagcctgagaggtactcctcaataatgaccaaagctggaaggtggtcccaagaaataaaacagtggaggaggtagctgggtgggtgggctcccaatagccatttggcttctgtgggaggataaagactaggctctagagagataaaaacctgttttaaaaatgcgctgttttggaggcctctgaaagacacaaatgagtctgagtggggagggcagggacggagggggagtaagagtggctaacacgtacagagcatctactaggtaccaggtagcaggcctgatggtgtttcatgccccttctagctctgatgactcctatagcatctacttcctgctcacttttgccctctccgtacttcttcccatgaaggagaataactgtcgctctgccatcaaataagcctccttgttgtgccttggctttactggaaaaggtggaattataaccacccatgagcacagctgtccccatgcagcacttgacacaatgtttttctaatttagaaatgtttaaaaaaaaaaaaaaaagaaatgtttctaataggccatatacacctcttctggcaatggtacagcatgtgccacatggtacctcgggcagctcagcaagttccagctacccatcaccttcctgctctgataatgaacatcatgcttgatcacaaagccaagaaccaagaaagccataagcagaactctgtcaaattcccaaacttaattttccttttaccgcactgccttagccagctcagtcagtgcccaacacagtctcttcttacccagggaccagggacagagactcacagagcccagtgtggctgcctgggacagacagcagatggagggtcacttaagagaaaccttagcagcatgtctgggctgggcacgagcctctaccctgctactttaggcctgcaggacagtaactggggtggctttccctctccctactctcagtgctaactgaagaacaaaaagaaattaggagtagaaggttctggaaactaagccagccaggtcactgtgaggttgggctgtgtggaaatagaggaaccaggttctgaaaacctgtttttctgcttttaagtttttaatctttccccctatagtaaaagttggttttgaaaaaataagtgtcattgtttcagtgagtgaagggaaaagagacaccccttctgagaggcctgcctctgttctggcccctggcgctggggctctggagagaagatgcctaggttgggtcctctgtggtgccagacggccccatacctgtgcccaagagaagggatgggacggatgtccctctttcctataaggtcactgactggatgagtggcacagaaagtttccagctacagtgatgaagaagccatgcctcatgcacatctgtcagctaaaggggacagagcagaccccaggctaagggtaactataaccatcattatggcaatgctgatagcatgtgcactctgtactcgaccctttcttagtgctttgtgtctgttaactcattaacttattcactctttgctacagctctgtggggcagctgttcctatcctcctcctacacatgaggaaacagagacacagaaaggttaaaaatcgcttgaggtcacaaagctggtgatagcccactccccagtgagctgctcttctgggtcttccccaagcagtggggggcctcaagcgaccaccacagcaagggagagccatggcctggggaggatagggggcactggtgggaggaaaaggaaataggccccaccctcactcaccggtcaggcccacggtggacacggggcccacgcgccgccccctgtccaggccatacaggtgcatcttgtacttgcgtcccggctccagacccccaacggtcacctcactctcgtcgcccgggacacgcaccacctggggccgcccgtccctgtccttgtactggacagtgaaggagtcaaagtggccctgggggacggtccaggagaggctcagggagtctggggaggatcccgtcactgtcagctcccccaggaggggcttctcggggggctctggggcctccgtgctgggttctgtaggtgtgggggtctcctccacctcggtggcactaggagtctcctctacaatgtcctgaggggctgagagaagagatgggggatatgggcttacagcatgacttgctttgttggtcattcagcaaataaagtcctcaagctacaggctttggggtttgggtagcttttgcattagccattcagtagctcattggagagagtggagacagacccctgacccgtcaggtactgctggtagaatggtgctggcgggttctgtcggggtgggagtctcctctcatgtctgagaaaggagctgagatgggaagagaggaatctctgaggaatttcctagcgtgtccatggacagtgctgagctctggggattgaaggacattaaggcctcttcccatctgccttcctccctttcagctccagcacctccccagggatttccagtggcccccaccccacctaccaggacaccagacagaaggtgccctggctgaggcttccctgggcaaccctgtgcctcctttcagataagagcgggagagagatttgagggtggagggctcgggagggccatgcccttccttggctgagtctagaatcaccgccccgagggcacctacccactttctgacaagtaggtctttgctgaggctccttggagaagggagactggcttctgtgacccactccctggtccttagagtactactcatgagacaggagactgaggaaggagcaggcaaggataggcaaggcagggagataaggagaagaaaaggaaactgggaaggaagagagctagggatgaggagcaggtcactcttgaatagcagtttggtgtgcggggtactgctctaagcacgtaggtttgtacactgactgttcattatcctcactggacagatgaggaagccgagatacagagaggttcataattcacacaaggtcccacaggcagtacattgtagagctaggattaaagtctaggcacttggatccagagtctgtgctccaaccacaaggctacacaaccacagaaatggtgctgaccagggagagggtggacaggtggagaagtgcagagtggtgggggaatgaaaggaaggcctttgccccattcccagttgcttgggagtcagggatgtggggtctggaatgaggccttttcatgccagaaagaagctggggaaatgagggactcttgtgccttggagctgtgagctctgagcagagcagcagtggtgggagggtgcgagcagttgccaatgggagctcagaaatgacagcagctccagccaggccagcgtaggggaaggaacacagtggctgaggatatctgtgggcagggcagcctggggtggaggtgttccaggtgctcagagtggggaaaatgagacctgtttttggagatggagaaacagggcccagaaaaaggtcaggggctggtggctggatgagaagtcctgggatgtggggaagtagagggtagaggcttggcagacatgcagcccagaaagagaaggcagagggaggtacaaaggagccccggaccaggtcctgctcagaagacagggctggtggagggaggcctgagcaaccctgacttacctgtggtggccaccacagacacaggccccacacgctgcctgccatgaagcccatagaggttcatcttatacttccggtgggactccaagccagggatggtgacctcattctcatcccccctgacaggcactgcctggggctgcccctgtgcatccttgtactggaccacaaaggagtcgaaggagccctgggtcactgtccaggacaggcgcagggagtctggggttgcatcagtcaccgtcagctcccccagcaggggctgctctggggactctgggtagagggattcctctctcttctccgatgctgtaaataagaggatccagtgagggctgcactggcagccccagattggggcttggggtttggatgggctgccatatctgagtggggagggagtcactattcagtcagcatccattaggagtgctgaactcctgggaagtctggcacagtcagggtatgacacatcctctgggccttggggagcagctgaatgggatggaagggacccagcagtacgggggaggctggcttccctcagcctgggagtggggccaggtatccaagtcagccatcacactgggaagccccagctggttcctagctgagggcaagtgtggggaagactgggaggggtcacagggagacttaggtagttgccacttactagtggtgccatcagctgtgagggggccatgctgcttcttgttggcaatcccaaacagagtgaatctgtacttgtggttagggtccagggaggagacgatgactgagcgctcaggcccctccacgggcatcacctggggctgtccatccccgtccctgtattgtactacaaaggagtcaaactggccctcggggacagtccaggagaggtgcagggagtctggtgtaggatctgtcacccacagctttccgaggcggggtggagttgctgggctgggatcactcagcggcactgggaagaggggtgggaagagaggaggacacaggtcaaaggaagggggggactctgtctcccacatatggatgttgggtgaggtggtacaggctgttcactgcacaaaggtacatggctgagggagcacggagggactgaaatccagccagcctctgcttgccaagctgtgcgccctggcgtagagctgtgctcacctaaaggaagggtgccaagttctagatggcacagaagcactgtatggactggtgtggccctaactatctgcagcgtagtggacggcttcagagagaagggagcccggccatccctttctgtgcctctacagccaaggaagtcttccaggacaatctctactgcttccaggcttaactaccagttggtttttcctcaagagagggaagcaccatctttggagtacttgaatgcgggagagcctcccacctccttctctcccaccctgcaccaccaaccctcccctccctgccactgtgccctcagcctttgcgggagctcctctccttggctgctagctccctccagcctccacctccctgcttgctctctagtcctagtccagcttccagaaagagccgtctacactggttgtagccatgtcctcacctctatctccctcttaatccagctccaccctccactggcagctctcaccagagtcagtggtgacctggtcattgctaagtcctgtggacactctacagccctgaatcactcttatggaatctgatatgtctaaccgcgcccttcattttggcatccaggacaccactgtccctggctgtgcccccgtctgccagtcactcccttgggctactctgcatgctcctcttcctctgcccgtgctctgagtgttggccaccatctcttctccaccaacaccctcaccctggctcctgtccccccatgccccctttcaggccttctctctgctctccagacctgtgagggcagcagtgacaaccccgtggccctgccacttctgctcaagtgccctgtccttctctgtgccttgactctcctcatctataaacaggcatgcctcgcggggccgctgtaggcagtaagtgtgttgatacacttagaacatcttgttaacctatgctccgaagaggtttatctaagtgtcccatgctgtgctgttcatctcctccactgttcctcgcctcagggaacaggactgtctgctctagaaacatgggactgcctgggcctcctcattgtcctccacctccctcatccagcctcactgccaccatcctaggcgggccagtatcatttcttgttggctcttaactcacttctccagctagcttctgcaacagcctcattgttattggtaagataaatattaaatcatgtcattcccagttaaaacccttcagaccgcccctcctcccaaccgcccagggccctcaaatgagctctaagctcctcagtcctacacaggcaagctcagtcccctcagctgccctgatctccatcgtgaggtaacagattctcctccagggccacattggctcctgcctctccatggctccctctgttggcactgtcctcctcaacctctctgctggacccaccactgttttcccttctggattcatctgaggccccactgcctccaggaagccttcctggtgttcccaaagcacagggaagacccccttcaaggttgtgcagggggcaggggcaggggtgtgtgtgaccatctcactcacaaatcttggcttcagccaccagggggctgtgcctcttcttgcccaggagcccatagagcaggaatttgtacttgcgtcccaggtccaggttggtgatgagggctgagcgcttggacccctccacaggcaccacctggggtccgttcctgtccttgtactggatcacaaaggagtcgaactcgccctctgggactgtccagcgcaggagcagggagctagaggtctggtcagtcactgctagctcacccaggcgtggtggggcagaaggcttcccaggcttcggcccatccctgtctggaacgtgggggcggaagttgagcaggtggactcaaccgttacctttgtccctggtctccttccctctcctcagccggctgggtccctccttccttgacagctccctcccccagagcctccacttccccacctcaagcctctgtgagcagccctcctctgttctggagtgacagcattagccctccccttgtgctagtttccccacctctcacaaaggtcccagtccctctccacatcaagaccactgggggagtttccagtcatccctggttcttccggagtcagaacctcctccttgccactctggagcagctgaagactcctctgtccacttttctctccctctcctccctctcttctagtgctgagcctgacctggagtggcagggagtatgctaccctagtcataaagagggaccaggagggaacatgagagccaggaagtccaggccctgggcttcactgacaccacaaacctcacctgtctctgaagccctgatccctgtggagctccctaccctaaagaacctccatcccccgcagaaactggctgctgggaccatggagcacagcctactacaggccaggctcccagaatgggggctgctgttctaggctgccccctgagggggtggtgggggctatggggaagggaagggggagagggggctaagggtcagtatcatcagggctgaggccttcccatgcctaccctcagagatctgtgagtgaccaggaactggggaggacacaggacaaagaacactgtaagtggaaagccagagcctacagcccctctcttgactcccaggcccaccctctgacttttctcttcccatctcccccctgcacctcatccttattctgagactccctccattcctctttcccctgaaccctcaactccaacctcctctctccttgtttgctcttaccactccaacccaaacaccagcccagccccacaatccccatgccacctctaaagccccaatggcccagcccctccccatccccaggacactgattggaacagagttcaggatatacccataatgccttggtagatgagaggggcagagggctcgccctccggggggaccccacgcagtgacagctcataggggactccaggagggggcgagggcaccagagcctggcggacatccccgggcaggagctcctcatgtggccctggcccctcaggcacccggaggtgcagctggaagtgggcaaacgtgtcaggctgagcagtccaggcgacacggagcttccccgtcttgtctctgcccagcaccctcaactctcctagctcctgggggcgctgctgcagttcaggggcccgggccccttgcgttgttgaagggcctgagggaagaggctcatcagtggcccccaagaggcctgagggagaggaccctgggaaagggcagggtgagaaaaacaggagagttgggaatgagagcaagaaaggaaatccagcccccaggttctgccttctagcctctaagagcccacagagcctccctcttctgcttccaagtccactccctgggctactgcatcctcccaacacccctgtccaccacattcctgaacagacaggcctgcaggcaataaatgaaagaaagaaagctgaccatccccccctcacaaggctcctgtggcctctagcccccacagacttccacgtccctccccaagcacatctccctgcccacggggtggtggtcgtagcttccattagtgctgcagtgagaagcctggaagaaaggaggggatgtggtgttagggaaggcagatgcaaggggagagtgggtagtgaggagagagggaaaagagggtgtgcgtgggtacatccagctcaggtggcatctgggccctaggtggggaagaacaggtccacatccctccccagggcagcccgagagcaccccttccctgggcctggcatcattcctgtggaagagataagcatgaagtgagccaggaggtctggaaagacagctcaagaagcagtgggttcaccgctcacagacacaagctgcctgatgacttcaaggccagccccacactgttctgatgtgtccctttgaggtccaggccaaatcgtggaaaactctaaccactgaccagagcctttggccaccctcaccacagtgagtcagagtggggaagtgatggtttcactctggtgccccactcccactgctccagtgagtttctgcaggcccgccccgtccgttcccgggatggcaatccgggcaagcgtcccaggaaccctgaagaccaggtctcgccctgggtatcccccctgaggctcctggggtggagatggcttctaggcgcccagtagggcatgctctgctgtggggtcccctggagtctggaccgggcttgagggccccggggtgtggtgcgggtggggtggtggtccgagcagcgaggcggccagaggaactctccgatggggactccagcgtcgggcgaggctgggcaggggatgggtgctcccgcggccccagcgcatgctacctgtggtggtgacgaacgcgtaggacgtggaggtctgccctgcccgcaccccgtggacctccacgtggtaggtggcgccgggcgtgaggtcgggtaggctgacggcgcgcgcggtgcccggcacggtcagctccccgccggggccctccgcggggggctggggccgccagcgcagcaccacgcgctcgaagtggccgcggagcccgtcgagggacacgagtagcgcgccgtcggcggaactgcccagcacctcgggcttggggtggcgcggcgcggcctcgcggtccacgccctccggcgagaggccgtcggtgccgggctcggaggcccccttccaggcgccgggggcggggctcgcggcgggggcggggcgccgggccgggggcgcgggggagccggggggggcggcagccgcccgacgccgctgcaggtactcgtggacgcggcgcgccaccgacgcgtaggtctggttggcccgcagcgggtagccgtgagctctcaggtggcgctccaggtctcgcacgctgccgcggaaccggcccagctcgcccggcaggttggcccacggccgccgagggggctgcggcgggctgggcccgggccgaggctcctcctccccctcctcctcctccgctggccgcgagggcnctccccccaatgtggggctcacaccatcaacgccaagattgagtcgcacactcttatgagagagctagtcacgtacatcaacagtgttattgtttaaaatgaattagttatctttatttattcattcattcattctttttgaggattttatcggtaagtgatcgctcctccgagtatctgtagtggcctggcgctgccgggggcaaaagaggggggaggggagagccggtcagcggcagccccctccgtcgcgcccctccctccgtccctcccccgggcgccgggggcctccgcctgcgccccagccccacctggaaagagaaccagaccgaacagtcagtgtcccaggggcccctcccgctcgccctccaagcccgccactcctggtgccctagaaaggaagagaagccagcaggtggggccctgtgtctgaaggagagaaaggggaggggcaggagacagtgtgagcgtccctccgtccctccgtcacaggaaaagaaaataagtatccatctgtttagagaccttgagggttagtgggaaattactgctctgagacctaactccctccaaccccaatcctaaagtcaacaggaatgcggatctgcctggttccaatctttgcaagagccgaccactgtgagctcagggccgtccttgtgcctgtttcaagcagaatctgccccacctaggtgggtcagagggcgtctctcgcgggggcaggtcctcccggagtcgcacctgcagcctccctaaaggcctccaagcaccctaaggctctgtctccccactgaggcagttacagagcaagtccccagcaggtgctttgggactaccacacagcctgccaaggtgcattcagaggagcccgtgaatcctagatgggggctcccaaggaagcggctgctgcacaaagaaactgggctcttctctgacccctggccagccgtacctgtgttggccctgacagaagccgggtagcttactgcccggccccgctctgccgtgacggtcacgacatattccacgcctggcatcaggtcagttagcagcgtcccatctgcctcaggaggcacttccagccgcaccctctggttgccagcactgacataggacaccacgaatcggtccacctcagcctggggtcgcagccagctgagctccagtgtggttggtgtcacagccaccactcggaggtcttgtgggccatcgatcactagccaggttagaagagggatcaggtgggagtttggtccttcagtccccagctttccctctaagaggtctgtccccaccccacccctctcttctgccttcctggggcaggggggatgggggtgggtgaaagattccctgccattcctctcaaatctaaatctctaccaggaccctgcccacggccccagctctcactggtggtgatggtcttggaggcaggagggccccagctagtccctcgaagagcacggaccgtgacctggtactcctgaccgggagccagtcctctctggtcataggttgaggcagagctgggtacccgagctgtgaatggggggctcaccccctcggtctgcaagaaagagagcaccaaggggatcagggctggcactctcactgctgctgttcaatctcccttatcgcttctttctccagtccatgcacagtcaacatggaactgtgtagaacttggtcctgcacagctggggaacatgggtgttagccgcaaacacatctaaaatgggtagagtgtcccaggtgctgttcaaggcaacttacatatatgaactcacttaatcctcctaagacccttatgagggaggtcatgttattcccattggacagatgaagaaactgaagtacaaaaggattatgtagggcagccccagtggcgcagctgtttggcgccacctgcagcccaaggtgtgatcctggagaccagggattgagtcccacatcgggctccctgcatggagcctgcttctccctctgcctgtgtctctgcctctctctgtgtctctcatgaatgaataaataaaatctttaaaaaataaaaattaaaaaaacaaaaaacaaaaggattatgtatcttgcccaaggtcaccaacaccaagaaagtggcggggaatccaacccaggcagtgtgacctcacagccacctctcacagggcctacctttttagccggtcctcaggtgtctgccaaaatctacccaacatacccaggattctccctctggcttccccaggcaaccctgcctacctgggtgcgagggagcttctcccaagctcactcctgtcataagagaggaagtaactgagggatgcacctttcaaacctcacttcctccttacagcatctgccctggcccaagcctgcccacagacacctgctcctggttgggcaacatggctgtaacccttgtcatgatatttccctgtaggtgcttcccttgtctcctgggcaggattataggcccctcaaagacaaagcctacctgctctaagtctcacaaatatgattcccaatttcatacctggcagtatgctgggtatgatgaaaagatggtctcctgtcctcaccttgtgttctagtagctaaatgtatggccacatcttaaggtgggttggatccctacccaaatctgtgtcatacatgcctgtgaacaaacaacctccctccaagtgcacctggaaggtgttatgagtatctgtggtgaccccacaggaaatatgccagcctctgctccaggcagcgtctccttggagggccagctactggggaaacgggaggaatggacatctgtaagcagcctaactgccccaaaattcactgggctgtcgagctggggcagctaataaggacgctctgttctgcttagctatgttggctgtgatggggacacctccattcagccaagtaggactggaaatttcaaaaggtactctcctaaaccaagaaaattgtggggaaatcaacacagtaaataccaaagtataaaaccagatgagaggccatgtagagatttctgggttgaggatgaaatgaagctttgtcagttttgttggctgaaaagttttcctgggcacacaggtcccctgttctcctattcaccctgccctaggataccccagcctaggaacccttgggtgggcatccactaaaggcctgtaaagtcctcatccttgccagaactttctctctctttgttcccccaatccaacacatatacacaccctcaacccccaccacacccccaggccacacaacccctgggtgctccttgatgatgtctggtcctttcagtgaaagcacatcttgatttctcttctcccttcagaccacctacatgagccttgtagacacctcttagtgcctcctaagatccactgggcactagtccccttaaagtcccactatccgtccaatggacatctctcatctgtctggtctgaggcaggctctctaggcagatgctggctgctaggcttcagaatacacctggacaaagaatgcctgaccctcctcttccagggctcacctccctcagttaccttttgcttcctctcacattcagagaggtactggcctcttgagcaaaatgacaacattccttaagttagtggtcctcaggcttggaatgtagcagaatcacctggagtgcttgttacaatgcaggtcactgggctccagccccagagctcctaattcagtagatctggggctgcagtctgacgttctgcatgtgtaccaagcttccaggtgatgttcctgctgcaggtccaagaaatatgctttgagaaccactgagtcagagtactgatgccacgtatgcaggaagaaggaggaaagttcctcttctgtgttctgaagatcattccagtgactaggtgtgtccctttgccaggaacagcaaatggctgggctttgagacagaagtgcttctggaaaagggaaggaggtaaggtggagataggcctctaagaagatggcagcaccagaggatagctggctaccaatacactctgtgccaatagaaatggatagagagcgctggccaggacaagaggcgccactccaggggctagccacagaaagcttagaaagcaatcagagggccagtagcacaggctaatgtgtagtccaagagaggtgtctggggaccaatttcataggagcattttccacacccaggttcaaagagatgagctgaaccaggtgcaggccagcttgaccccacctggccccatggtgagggaggaagcctagagcttcagctgggaagacgcacttcttgaaaacacccaaggatggattatttacttagagcagagaacaatgctaccctgcaagctctttctatcttgagtgcttattttaattctttttccctgaagtttcttaggacagttccttttaaaagtcccatcctctcaagatcagaactatgtcaataatatacacataggaaaagagagtgggaaaaacacttaaaaatgttaacagtgcttgttttagtgtgaagcagccaagaattatttgtttttttctctagttgccaaattcttgtcttgtgattaaactccttttacgacaaaaaacaaaaatgtttttaacagaagaaaaaaatccaagccaagctatattggtgcactgcaaaggagggatttctgcctctgcttctaccagacagtgaggagagacagagcatggccggggtctggtgtcataagaagacttagaatgcccagaccaatgagggcagggatgagagccagcacctctgagctgtctcttctgtcctagccccttcctagggtctagtccccaggagttatttattcttccagagttttggagattagggtaaatggcctattcacccatgtcatttcttggaagatgcaggaaaacatgagttaaacagtagaggtctcaaagtatttggagctgggaggccaaacatgtcataaaaggccaatctgcataaaagggggtctctaatgagaggccacaaggctttgtccttcaggtgcccccaaatattttaagagtgagacagatacaatgctttgcagtgcactgatgacacagaggcgggagaacaagttcacagactcaaatcattgcaacagcctagacagcttggcccaaaccaaaaaagataacactaaacagagccacatgcaaaaatgtactatatttagactaaaaaagtgcatatagttgaatgtcatcttttttcccttctttttatctcctttccctttctcttgtttatattttcttgtttctatattgagcctacatgacttttataataaaagttactttaaaaacaaatatgatcaaaacagctgccagtttttgtgaccacagttaatatacatcaatcctgagaaaaatgccagtgtttttagagttagccagaacgactggacccctcctgctcccacattttgggggcaaatacaaaaagcacaaggcattagaggagggaatccaggaagaattgggagaacaaagtcttagggaaaaggagtgaagaaaccagggggtttgccctggagagaatggagagagcagtcttggaggttgaagtctccaaatggagaatggaggttgaagtctccaaatacctgaaagcctgtggtggaggaaaagcaaagacaacattctgacaatggtggaggcccagctagggccaatggatggatgtacaatgggggatgtacaatggggcagatttagactcaccaacaacagaaagaactaccaatgattaccaacaatggactgcacagcctcaagaagtcctgagctcattgtcaccagacgtagttccactgcagtgaactgatgctgcgaaggccttctggacccagtgtggagtaggatgagaaggtctttatagcagcttcaggaacctacccaatctgaactcaaccactgaccacctagaacttcctgactgaggtgagcactccctctcctgaatcctgcccactcaacctcctcctgcaagcttggctctcaccgtgggaatgaactgaatttcataggcatccacagtgtcaggagcccgggtccactctgtccgaaccgtcgtttcctccaagaggtgcatcctcatgccctcaatggctggcacctctgcccaggagaatgagatacggaaagatggttagcccaaggcagtcccctaccccctacccctatcatcaaagatccctgtactcagggccacaccaaaagatcgatccagttcctgctcctctctggaggtggggcaaaactggcagaggcctgcacaagccctgggatctcctttgcgccccccccatctccaaaaacaaagattcccctaaaagcaactcgaagagccccaacatgctcatcagacatctgaaagcaggtcctgcctgcaggcatgcccctgtggctctgctgcccctggtgacactggctctctggctcctatgactgccttccaccctaatagttgacctcctttactcttcctccaggtccctgggccactgccacaggctcaggccttccccctggctctggttcccagtccctgccccagcatattggggaaggcggcatactcaccttccccacagtcttccccggcatagccatcttgacagacacagctgccctcacgacactctcctctgccacggcagtccccagggcacacctgaatggcacagtccggtcctcgaaagccctcgacgcacacacactgcccggtgcggcacagctcccggggcccgcagcccccagggcaggcgctggcggggggctcttcctgcccacagtccgggccgctatagcccacgtggcacatgcacactccctgcacacagcgcccgcggccccggcagtcggcggggcaggtgcgggtggcacaggaggggccagtgtagcctgggtcgcagatgcagcgcccatcctcacagcggccccgctggtggcagttggaggggcaggtacggaggccgcagtcctcgcctgcgtagccctcccaacaggtgcacacaccgtcctggcacacgccttgctggctacagtcgcgcgggcaccgccttacgctgcagtcctcgcccgagtagccatcgtcgcacacgcagcgcccgtccaggcactggccgcggccgtggcaaccacccgggcagctgcgcgcgccacagtccgctccctcgtagcccgcgttgcacacgcacacgccatcctcgcagcggccgctcccgcggcagtccccagggcaccgacgacttccgcagtcctcgcccgcgaagccagggttgcacacacagcggccgtccacgcagcgcccgcggccccggcaatcgccagggcaggcgcgcgtgccgcagtcccggcccgtgtacccgggccagcacacgcagcggccattgtcgcagcggccccggccgcgacagtccccgggacagctgcgcacgccgcagtcctcgccgctgtagcccgcgtggcacacgcacacgccgttctcgcagcgcccgcggccccggcagtcgcgggggcaggcgcgcgcgccgcagtcgggccccgtgtacccgggccagcacacgcagcggccgtcctcgcagcggcccctttggttgcagtcccccgggcagctgcgcacgccgcagtcgtccccgctgtagcccgggtcgcagatgcactcgccgtcctcgcagcgcccgcggccccggcagtttcggggacacgtccgggcgccgcagtcctcgcccgcgtagccgggccagcacacacagcggccgtccacgcagcgaccgccctcgccgcagtcccacgggcagctccgcgagccgcagtcgtcgccagcgtagccggggtcgcacacgcagcgcccgtcctcgcagcgtcccctctggctgcagccccgggggcagctgcgcttcccacagtcgtcgccagcgtagccggggtcgcacacgcagcgcccgtcctcgcagcgtcccctctggctgcagccccgggggcagctgcgcttcccacagtcgtcgccagcgtagccggggtcgcacacgcagcgcccgtcctcgcagcgtcccctctggctgcagcccccggggcaggagcgcaggctgcagtcgtcgccccagaagccggcccggcacacgcacacaccctgcacgcagcgcccacggccgttgcagtccccggggcaggagggccagccacagctggggccgctgtaaccggggaagcatacgcagcgcccccggacacagcgaccctgatcgttgcagtcatctgggcaggacccagaggctgagggtggggaggatggcatagggcctgtggggtctgaacaggtgggcccaccccagcctggctcacaggagcaggcacagcggctcaggtcaaacacgccatggagactgcagagagtgcgaacatctgtctggcctggagtaagagggagaggcaggcctcagtgtttctggggaaagagaccaagcccatacagtgctctcctaagtcagcccctccagcagggccaggctcacttcataaggttgtctttgtttccaggtactactactggtggatacctgtggccttccaaagccctagcatatgcgtggggacaggggagggaagtgctaacatctctagcctggtggattctctgagttgtgccctgggctgtactcagtactcctaatggggaagaaggggtgccttcttctaattcctaccaagctcctttatggactagtgatacccacagaaccctgactgacttccccacttcctcttttcctgtgccctctcccatgatcacctgctcacctgtgcctgcctgggccgaggcaggacaacatcccccagtgcactgctccttgagccccttcaccagctcctccaggatctctagccggaccttcagggcctgcacctctgaagcagagactgggggttctgtgcccgggggacaaccacagccagttgaagggggcaggttgatgcggtgggtaaaaaccacctgcttctcccctccttccacagtgtgctcataaagctgagaagaggggcttccccctatggactccactgtgcggcctcccggccggggaggaggacgtggagctgggagagtcacattggaccgtggagcgaaagggcctgctctgactgtgcccagcagtaccaagaggcccagtctggagattaggaacaactgggctggcatcactcaggaggctgcagggagagatggcacatgtgagcaacttcacagagaagaaggcaagattgctccccaccgcccctgatacacacacccacagtcccaacacctacaactaatctaccagctcacatgcatgtgaaactccaccttcagcccaacactaacggagaccctccttgggcagatttggtctctaccttgctttctgacgtcatttgattacccagctccctgcacttaccactttttttctttaccgttccacctacaccggtcttatgtttgttttacagatactacaagctttcattactttaaggtctttttagctgtatgttctttctgtctgggatgctggctccttcatctcacatgtcatgcatcccagaagaccttccctggtgccgggtcaggatggtcttctgttactctcattgcagtatcctgcctatgttcttcatggcatttactgctgcctgaatcacctgttcgtgtgggtacttgtctgttatctttctcccatgactaaaatgggaactccatgagaatagggaccctgtctgtcctggcactgccatacacctgtgtctgacatgtgggggctactcaacacattcacgtcgagtgaattagcgaatgagtatataagggcaatcctacaagcacctggaacccaattcctactgtcttttttgatgaagattatcctctctctcccttttattcatttcctcactcttcactaaatctctcctgtcagcttttataagacctcaaatatctcctgttgtttaaaagaatccttctccctcagtacttatattaccaaatatcaaaacttattaggtgcaaagatagatagatagaacagagtagtgtccagatacagacccacatgtatgtggtcactgtgtaaattacaatggtggcactgcagttaaaaagaaaatggatgctctttttgataaatgagaaaatatccaaaatttatctccaccttatgtccacatacagaaattaatttgaagtgaatctattggacataattatgaaaggcaaagcaatacctttcagaacaatattgtatagaagaaaaataggagaaaatctttacaaccttagagtaagcaaagatttcataaaacctaaccacgtaaaatttatttttttaaagatctcatttatttattcatgagagacacagagagaggggcggagacataggctgagggagaaacaggcatcctgcaaggagcccaatgcaggacttgatcctggacccaaggatcatgccctgagctgaaagcagacacttaactgctgagccacccaggcgtccctaaccacataaaatctaatcataaaaagtttcacacaaaacttaaccataaaaaagagacagacacattaggacttctggtcacccagagacactatctagagaataagaatagaaaccagacactaggataaaatatatgagaaatgccgagatgttgctggggagggagaaagataaagataggtgttgattgagagtgtgagagaggattaaaatttaaataagggatccctgggtggcgcagcggtttggcgcctgcctttggcccagggcgcgatcctggagacccgggatcaaatcccacatcgggctcctggtgcatggagcctgcttctccctccgcctatgtctctgcctctctctttctctctctgtgactatcataaataaataaaaattaaaaaaaaataaaatttaaataagaacccctgcaaaacaaaaacaaaagacgcaggcaacccagtgttttaaaatgactaaagtcttaaacaggtactctagaaaaaatatatcccaaaaggccaataaacatatggaaaataaatacatatataagtataacaaaaccagtaatccgggaaatgcaagttaaaactacaacaaggtgccattatatagccatcagaatggttaaaattaaagggattgtcattgcttgattatggcaagaatgtgaagcacctagaactcctatcaattacaagcaagagcataagttagtgcaaccactttggaaaactgttatgcagtatctacaaagacatatagcctacaactcagcaagtccactgcttggtaaatatccaaccgaaatgactgcatatatcctccaaaggatatgtacaagaaagttcatgagattttttttcatattagccaaatgaaacaagtgtccattaatagtggaacagacaaacaaattgtggcacaatcatacaatgaaacactacccagcaatgaaaccaccttcttgctacacggaacaatatagacaatttcacacacataatgctagcaaaagaaaccagacacaaaaggagaatgctgtgaatgatgctattttacatgaagctcaaaaactggcagagttaatcttcactattagaagataaataggaagggcgcctgggtgactcagtaggttaagagttcggctcaggtcatgatcccagcgtcctgggatggagccctgcatcaggctccctgctcagtggagagtctgcttgtccctcttcctctgcctccctcttgtgctctctctctccgctccccgccccaaataaataaataaataaaatattttatttttatttttatttatttatgatagtcacacagagagagagagagaggcagagacataggcagagggagaagtaggctccatgcaccgggagcccgacgtgggattcgatcccgggtctccaggatcgcgccctgggccaaaggcaggcgctaaaccactgcgccatccagggatcccaataaataaaatcttaaaaaaaaaaaaagaagataagattactggaaatattttgtactttgatctgggtggtggttaaacagatgaatacatattcaaaaatttactgaactatacactttaggtttgtgcatttcacaatatgaaagttaaacaacaaaacaacaacagggtgcttgggtggctcagtcagttaggcatccaacttctgatttcagctcgggtcatgagatcaagccccacttcgggtctgctggagagtctctctctctccctccacccctccctccccctcacacttacacacttgtgtgtgctctctctaaacaacaacagcaaccacaactaaaaccttccccaatctcatactccttcccaccagcacatatttccctcctctacttcatggcttcagttgacaaaagatttataactgtacttgctatttccactcgccatattccacgtacacctcagtgcactcccatctggtttccccacttcctttcaacctatcaaacagctttccctaagatctcccaaagactcagtgtcacaaaatctgagagacatttattttcctcttacttgacttgtctcaaaagtcattggacacactgttgaccacatcttccatcttaaaacattctatatctgtgctgtcaatacagtagccaggaaagccatgtggctcttgaacacttgaaatgtgtctagagtaactgaagaactgaattttactcagtacatttgaaaagtgccccacgtgattgtaatgtacagctaaacttgagacctacttctctagtcactcacctagatactttcacccagacccaggattttaatttccaaactataccccaatttataaactagcccagtcatctcctctggactccaagcaatatatccaacttggtgtctcttcttgggcacctcagattcaacgtgtctgaaactgaactcatggtcacctttcctgtaccccatcccctctccactgtgttctctgcttctgctcacggccccaccattcatccagcactacaacctagaaacctaacccccatcaacatcaccatattttgtcatttttgcccttactttcataaacatctctttaatttgcctactcctctccctcttaccattgttagagttcaaggcatcatctaccttttgcttgacaactgcatttgcctcctaggtggtcctcctgcttccactcttgccccctacaatctcacaaagacaactaggatgttccatcccctaaaagctctccagtgtctcccttcaatcattgacaaacagccccgcctcatctggcccctgctagtctctcccactccatctcccataacacttccctctctctctctactccagtcccattgaccttacatccctcacacccttcccaaccccagacttttgtatatggtgctccctccgtgtgaaatgctcttccctttccttgtggcctccttatcccttatatctcagccccatgttgcctcctcagggaatttttcctgcccaggtccccctaacatgtgatatcaaagagccatgtaactcccacttgtagcatgtataacaagcaggtccatgaaggcaggcatggcacccaatttttcccctggctgttgtatccttgcatcttgcacatattagatgcatcacaaatattgacatatgaatgaatgaaaagttcaatttaagctgaggactagcatcgggggctggaaccaatgacaggaccaaggtcagggctaggaccacggacaatgtctgggacagaaagctgggcagcaacagcagcccaggccaaagctgggctagagagagggccaggtgtggatcctggcagggccagatagtacaagcactttggaagaccttagcagaatctacaaactaccagagctatatgctgaccctctgatcccccagctccacccccaggaatacacccaccagagcagtaccaggcataatggccccaaactgggagctacccaaatatcccacattggtagaatggattaaataaggtgtgatttattcatacagtgaaataaaattaagcaatgggaacaaaccacaactatatgcagtaacacggacggatctccccaatagaagaagccaaacacaaaagagaacacactgtaaagttctgtttatatgaagtctgaggagagataacattaatctgtggtgttacatgtcagaagtgtggtgctcctggaggagcagtaaccagagggacatggcagggaaattctaaggtgctaagaatagccttttccttgatctgggtgctggtgcccagttgtgtttgtggaacccattgaggcatggattggggaacaaagggaaaccagggctggagaggcattcagggtgagccaggacatgggtctgtggtaagcaacagaatgtggaagggtcagtgcaggtgaagggttaaggagaggtgtgggcaagcgcccagctctttgcgaccagagagggtggagagaggagggcagggtgagtgtggaaacactgactggtgagaagggaagagacagtgcctaacacacacacacacacacacacacacacacacacacacacacacgtttcctgtgtttcttaaacttctcctctgagtccaggaaaaaaggagtttcagggctaccagtcatcacaccttgccaccagcccaggagagactgaagaaaagctggacaagagggaaagagcatttccacactaagacgctggagaagcccaggcagagaggcctggcaggcagacagcagccctcccctgggcccctcatccctctgtcagcttgaagtgtagcccaaggtatgaggtgggctccgacctaccctcaaatcctgtcactctgtgtctaaggccatgccaaccaaggggtgcatgtatacatacaaatatgcccgagtgtgcacgcatccacaaatacaaatatgaacacacttgtacacagatacacatatccatccaaataagcctgcatctttacaggcacacacacacaatctcctcttcatggttcctccacttgcattcactgggtgatacctaagcaagccaatttctcactggctcagggggcagctgtgtgagtcagagaacatagctggagtgaggggaaccaaacagaaggctcttctccagagggaagcagaggatgcctggtgtcccacagctctcgcggtctttgcgagtggtccagtaaccctccccaccattggatccaggatctttcctggggttggtggggagggggagagagtctctgcagtagcaagtgagaagctggaaagtagtgaggcaggtctgagaggagaggagtagcctccaccccacggatcaagacccagagcctccttctccatcccctctcctgccctgtcatggccacccctccagctcctcacttccaactcttggaagacttcccctcttctctcggcaccagaagaggaaagaactcaggtgtctcttgcatttccccctcattgtcaccactatcactgtgtctgaggctctcttctgcagtggggagggggcatgcggcctcagcctcttggcgtcctccccatagtggagggctggcagaggtgggggcaacagcccaagctgtgactcagcctgtctgacattcatgctgtggccaactttgacacttggctcatcagggactgctggtcccaagaggtgtggagacaggcgggcttccatgagggatgctccagagatggggcatctgggccccaccctgtgtctccctctaccgctcgtgccacaggaggggggaaaataggagtccaggggcatgagaggaaggaaggaggggagggggttctaaatactgggttggaacccagaggtaaggaggccccagggaggggagatctgggggatccagaggcccctcattctggggagctagtgggccagaggaatagaaaggattttccagccctctggtgggaaagaggaaggaggcaatgagagacaggaaggcaggttctggtcctgtcctgagtgaccaggactccaggggaatggagtctgaggaactgaggtgccaggtccccaagagagtgggggcagggaggggggggagggagaggggagggagccggggattcgggaagcgggcaggactggaagcagacagccagcagctgcggtgtttccgacttgcttcccagtagttcctctcagttccatttccagttgtttccaagccatcaaattctttccaggcaagataaggggtgcgcccaccccacccagggcgtgtcacgtgtagtgggtggggagaggctcagacgggcagagcagggagagcctagaagggggacgggaggaagcctgagcccctgcgcccctggaggtatctgtccatcagcccaaccgtgagtcatgggtgcagagctcctggccaagaacaagctttaggatcctctctgcaggctctgtgcccttcccagacctgggaatcctgactctgctccatttcaacatttctttttttttttttttttatgatagtcacagagagagagagagagagagagagagagagagagaggcagagacacaggcagagggagaagcaggctccatgccgggagcccgacgtgggattcgatcccgggtctccaggatcgtgccctgggccaaaggcaggcgccaagccgctgcgccacccagggatccccatatcaacatttcttaaaggcttaagacccctggacctccctctcagaccctgcaacccacatgctgagagactgcctctggcaccttcctggagctccagctccagccgcttggatcagagcacttggggtttcatcaacactttcctcctgaggttcagctggccactaactagctcagcctctagtccctttggccaaccacctctgagtccgcacacccaccccccaaacacacatacactgacccatcctccagacataccctccatggggagtctagtccccagtgcaacctcccatttcctctgtcctagcacaaagtctctgctctgccaggctctcctgagagctctcgggctacacctccgcctggggtgtagggaagggatagaaccaccactcccagctcttcccttgttttccccagagctctgttccttacctgggcaacaagctgttgcagtgcctctgcacctgcttggtctctgaccttgggaggggagctctcaagacagggcagggctaccgtgccttggcagctccgagctccccgaggtccccttgcttgtttcctgcagtagggtctcactgagctgagacccaactgcagaccgtggatctcgcagacagtaagaaggagggagtctgcagcgagcagggggaggagaaggggaggaccagcatgaggtcagggaggggagcggagatggggcaggtcctcccactcctccagtccctgccaggccctcccaacgtcattgcatgccccctctccccgcctccccgtctgggatcactgagtcccacaatacagtcgacttgcccctgcatccttggggcatccctcccacatcctttccccatcgcatttggactcttcctttccaccccaatttttgcccaacttgacatccccaaaccttatgccatttctcttttctccccaccatttgcccacctgctgctcctgctctctcactgggttctcctctctaccaacacccttccacagtggccagccctctccctcctcggcacctcctctcccaccactctgctccagctgggatcttgccccacctacctgttgcccagcaccccctttctcttccggccattatctcctggcagtgtgtatgtgtgtggggtgggggaggaaacctccctcccaagcccaaatccctccccggcatgaggccttctctggaactccttgtccccacccatccctcctgcctggtcctattgctcccacctcagcctcatctcttctatcttttctacttgccctgtccctgtactgcctctccccctctgttctgtttagtccactacctgttttcagcttgggatcactgcccccttttcattctctcacctcagcaaattctagagaaatggcagatgaggaggcttgggtaccggccaatcaagggttgggctcagcaccaggatgtagaagactggggaaggaggttgggttcagggggagacagggaagaggagccgaaaacttaggcagagggtttaggagagaggtttagggatgaagccagagctagaggcagagggcagatgtgggggtgggcctgtgaatagctgggctaagtcagtggaaggctgaaaggtgcggcaggggagcggcaggggagcagaagcgggggtaaggagagctgggagctgagagaggaaagcactttgacctcaggcagaggcaagatgactgacactagaagacaggacatttgaaatatccctgtgtggccccattttcctttgtgctcactgtcttgaccaggggctaaagagacttttgccactgaagagaagtatccaggctgaggcatccctgccccaggtttcacaaggagagttcttgctaccccactaccaacctcaccattggggaatagactggcccagtcataggtgatgggtgaaagggacctgaagaagcctttgtgtgtctgagtctgtcacttgggttggagcataggggtctgcaccctagattggatccccctggttgcagggtgtgttgatcctgggtcaaagcacactggcacatgtggctgccacatgcccagtcagtgacctctggctgagggcaaaagcttgcacagaccctcgcatgggtgtccccgtgtgtctgtatgtgtgtgtggctgtttttttcctggctttgatggggaggatgaagtcagcatcttggacggaactgggctcagcttccttcctgtgccttggcccaaagcctccagagcctggagtaggtaacaatttccctctgatctggggggctgggggccaggggagcacatgaaagggtgagggagggtctgaaacaggattacttggcgagagcagactgcacagaggatggattttcccttatatccccaggtttcagtaattctgtcccatggtcatagccactgtttgccctatgcattaatcttggtcttattatttactaagtatggtcaccatgagtatacttggcccaaggagtggccagaagaccctggaaacgtgagagctcaaagaacggccacggggtgttttggaagcccatggcaagtggcaaatgggacaccagagtctcagagaacagagggggattgcacagggttacaaggcatctgaggaagccactggaagctcaacagacagaattccaggttctgaagtcatcatggtctacaatttgacttagcccctggatttaggctcttggaggagctctcatctcacatatgtttgcatcttgttggggaagtaccagaccttgcatagcacaggtgcctaataaatgcttgtcactaaggaattgtgagggcagccctggtggcgcagcggtttggcgccacctgcagcctggggtgtgatcctggagacccgggatcgagtcccacatcgggctccctgcatggagcctgcctctctctgtgtctatgaataaataaataaaatcttaaaaaaaaataaaataaaacctttaaaaaaaaaaactaaggaattgtgagaggactgggtgcgaaggatggggaaagggagtctggtaggatccctaggcgtggaggcagggaggcctaattgtcagagccaggcgccttcacgaaggtgtttcaggcagtggggagaaaggtcggagctgttgacagctgtccacgtgctctggctgatctcagaatcctcagtccagggtctcgtctctgggcttccatctttgctcctatcctgacctcaggaggatgagggataaaaggtacagagggaaggcaaggagggcaatcaagggcaagaccctgcaggtgcagacagcgagcgaggagaggccaggggctgcgggccaagggagcagtcctagggagggggacaaggcagttgtaccgggctcccattgacaaaacactctgcagcacagcgcaggccttggattcatctggccttgtggctgaggaaatggaggacggcagaggtcaggtgacctgtccatgggacttgccaagggtgaaagtgggcctccacccgggttttccaattcccaagcttgtattctctcccctcccccaggaagagccatggaaagatagaagactcagggcagaaaatctggatttttgaaactcttttctgcatccagttattacacagattcagtaagaaaaaatcaccaagtctaagccaggagactcaatgttccactattgaggagatggtggggcagggggctcagagagaagagacggcctgacacaggacatgggaaagaaccaagagcccggggctgggaagggacaacagagccacagaaggcaggctttggacccttaggacctcctctgccgggagacacgggtgtggggagaagggaggagggaggacatttctatctcgtgacaaaagaaagtcacacaattgttttgttctctgctctggggcgggtgggcgcctatatttaccagagggactgaggttgctgtggcaaccacacatctgggccctggaatccagatgtgctgtatccagaagccatagcagaacgatgaggcaaacattaggctctccagtcctggcccctacagctgggaagaggacgggggattgaagaggggaagggtgggggagggccaaagcagcagttggggagaagagaagtggacaaaggggtgtgaagagaactagggagggggtggcatgaggaggggagaagccagagcacagagtcagcagtaggaggatggaagaacagaaggaacagaaaagagtgaagcagcagggaggaagggcaaaatacaaaaaggagtgaggaaacaaggaaggaggaatggagactagagtccaaaagaagaggtgaggttgaatagaggaagtgaggactcctggctgggtgagggcaaggagaggcagagaggaatccagagcaaagaggcagagccaatgggtcagggatgataagaggaacaaaaggctggatccagagaaagactgggtgagcctgggggtacaggagcggacagcagccctgtgctgaggtggcctagtgacctgggctacacgtgggcctggtgggtggcagccacagccagagattcacctgccttccccttcccagccctcctccctccctccacgcccctcctgagccttctgccaccccataactcagccagcagtcagccgactgtgccagctcacagcaaagtgccaggtgtcccctgccactcagtcagaggtgcagcaggccccaccccagggcccccagtccgagatgccagcacttgggaacatccctgtgctgcggtcaggagcgatgtcaccatgggatgatgggacgataggacggtgatgcacccagttggggtaggagtagaacagaggagaaaggggcaatgtaaatgcagagagacaggtgtgagggacaagggacaggtgtgcctttagtgacatcgttcatcctcacaccatccctgaggagtaggcaggagtattccatgctactgatgaggaaactaaggcccagactgtgtaagttacatatcaaggacatccatggatgaaaggtaaagcagggaatcaaattcaggcgatctgcttcacaaatccctgtccttgcactcactgcctggatgaggctcaagggacgcaaggacaggaaggcccagaagccagggctgggctcctccagagggaggaggcgcctagttcctgggagccctagttccaggttgccatagttactcagtgttttcaccccaaacacagtaatgggaagtgggggagcctggctggacacgtgagtttctcccctcctcctttaggcctgggctcaaggcctgggcggcccctgtcatctgggcattgagcccaggcccagcccacaccctctagctgacccaggacactcctgcagggccaggccagaggtgctgctggacagaagccactgacaggatccccccaggtggagtgagatttggcccctcaccctctgtcctgtcccccttcctcctaattagaaccacagcctttcctgccagatccgttctcatccttttctttcaactaggctctcaagtctcagtgtcctccagtttggggctgagaagatgctccttaacatcccccttccctccaaacaccacccccatctccagtgtggcccctcctttctggcttgcagccctctggccccagctctgctgtttgttcaagctgctcgtcctggaaatcaaggggagggagggagaacctgctagaatgcagggggcccaggctttggtaaagggaagacagggtgtggggccccctgtccttcctgtttactcagacacattccagggatctgtatcctcaaggctgtcacgccatgagacatcccaccctcatcccctggctagacagacataccccagtgttgtaggggtggggacaaggggatgacatgaggtctgggatcccatacccactccacccctgagtcggctacgtcttcagtgcttgattctctgatgtactggccctacagaagccaatttcccccaaattctccatcatgagccaggaaggcagccaccattccttcaactccctccaagttgtttatttaataataaaaaagaagattgtacatatacataaacctgatctcccactaccacccatcctttactcccagtaactagctccaaaatgtaaaaatgtcccttgtccctcctggggactaaattcccacctccacccccacccctcaaatagagaaacaaaagaataaagagtgtgtaggagtccacccatcccaaaacttcatctcactcaataccctcgaagaaagaagcaggaattaggggttcagagaaattagaggagtctatattccaaaaaggggtaagaagagaggtgaactgcctcatctccaaataagtgcttaaccccacaccctgtcttccctttaccaattgccccaagcccggggatctgagaacttaggaaagccacactgggttgcgccaccccccccccccccaacacacaaccagctctaagtcagtgtaagttgcaaaggtcaggggtgattgaggtagaagggctggtgggaggcctggtgggcctggccagctgcagaagctggcaaggggccacctgtagcattgcccggggtcgaggacggctgttttcggagcgaggggggcactgtggaggtcttgatgtgaatcaccctggtgtccatgacctcacattcgatctgcatcatctcctcatagtcccctggggccccctggcctgacagggtctctgtgagaaggagagagttaagaaagagcagaagggcaggcaaacagaggagaaaggtagaggcagacagggatggaggggcaatggtgaggaggcagatccacatccacaggtcaaggagacggcagggatggagttggtacagggagaggagaggggtgagaaaagaagatgacgtggataaatcacagagaacacatatgagggagatcgtaggggagaggacatcaagagaaaacaggaggtgagaatctggcagttcccagcccacctcctctgcccacacctactcaaggccctcaccaacagatggcctacactcttgcctcctgcactctgtcttcctctccacccatttccccgcttctcatccaggagtctagcctctctttgaaatggcccactcctctctccatttcccccttagctcctcatgctggaccttcctagcagaaccttcacctcctcaatttcagccctccccagccccggcaaggagagaattaccattgggagccatggcaggcatcaccagggacatcttgggccgagacgtcttattgtggctgatggcaggaagcagcaagtggtcctgggagacagaagggccaggccaggaggctggaggcaaagatgtggacaggttcctccatcctactctagagcctcagcctcaagatagactgctggagaacccagggtgacagggatggggcaggggaggaactcacccttcggaaagacacaacataaaaggtgtcctctcgtcggtcaattgcatccaggaactctggctgtgaacggtctgggtggcgatacagctgcagttggcccacaaagtccctagccaagtggagaaacaggatttgggaggaactaagcccaatgctcaggtcccactggggaaggtgggagaggatgagggagaaaaggaaaagagcccccaacggatgaggaaggcacaatgccactgatggcaatgacaatgggcacaggacagattctgggggtttagcttttttttttttttggtttagctcttgagagtgaaacctcccttaataacagacaagcacccccatacactcacctctctgggggcaccagggactgggtggggactgccttaactggaggtgacttcttccgtagctgagacttctggaaggagaagtatctaaggatgtgaagagggtgaaggcaaagggaaagagagacggcccctggaagctgatgtcacctcacccctccactcaccccaaatgatccctcaaacctccacaaagagatgctaactcaaaatccctaagacatctagtcttccagtgggccttcctggaaccagccctagccccctcctacctgtctctcctgggccctctgggggatcttccgccgtcctctctggtggcgctggacccagccgctcagctcatcagcaagcctaaggaagcagaggccaaggctcccatcttccctgcccgcaagcagcaggaagaagagagggcagggagaactggtgctttagcacagcaggacagccaggccagagaggatgtgcctcagctggcaaccgcacctcagagactcggtccggttgaagtgccgacagtcagaggagaggaagagctggtccaggtctctcaggagcagctccttggcacccccggggaaggctgtcaggttcctggagtgaggcaggaagggggaaatgaccagaggctgaccagcaccccttgaccagcagaacaggcaatgatggcaagagaactctggctcccctcaaaaagaaaaggtaacttttggggagaagatacacttggcaaagtgtacttcccaaaagggagagggccctctcctcacctgaaacctggtcggcctggtgggctgggatggagctcctcagggcccagggaagaacccctaaggggttccactccctcaacaggctcttgtgttgagaactctagcaagtgtctccggggctgaggttcctctctgctcatccgaggagacagaggagctggaggaggctcactgatgctggggataaggaaggacggagagtgaggggttctggctttatcaaggggcctgcttaagatcctaggctctgcagacagcccatgtgggttccagtctactccacaagagtgaatctcttcacatgtaagatgggaatgagaactatccctaccccctaaagccaggaagcatgagaactcggtaagcgctttaaaagtgactattttcaccaatattattagcactatctgctccaggtgaggacctaccacttgagaaaaatgatggaatgagaagggactggctggatgcatcactggtgctaaggacaccagcactgtctgtgtgtaagcaggatgaaaggcactatgccaatgcatgccggcaggcagtggtgagggtggccttcaccctgaagcttgggggtgggtggggaaggtctcacctgacaggtccaaagttgaaggcaatgaagagaaggaagaccatgatgcagaccaccttcctgtttccagaacctaacttgagctcgctgttctaaggtgcagagaaagggcagagagagagagagagagagagagagagagagagagagaggcataagtcagcccaaaggagcaggtattcccattggccccccaaggttgaccggtcttacctctgccagcagggcctccagtcgccgccggagggcagcattctcccggcggagctgctggttgtccgccaacaccgcctgcagccgggcctccagcccctgcaaatactctttcttcttcctcctggactggcaggctgactcccggttcttgatcattcgctgctgccgcttcagcagctttgcctagggtccccagacggtcggacggtcgaacagtcaaagaaaggaacgacagatgggtgggagaggggaaccatatctcccaacttcagggactgatcagccactgctcacactggccactctcctgccttcctgtcctctacctacttggctggagaagggccatccctctctgctaaaacatttcaaggaagagcccttctctcaccactccatctttcctgttcctcagagctgggagaagtcagactgtaggaagaacttcctccatcctagctcctggtggaaactccgttcctttccctggttggggggcggggtgtcttccttcctctcaattctttttaagggcccacagcttaactttgctataattaaagaacactttacctggttttctgttaggagcctccctctactaactaccgccacagtcacaaccactgccttagatttactgacaccattccatttctctgcctgcagtgatagcaaaactaagtaaggatcctaaaattatacagatttgatgttgacatgcaaatataagctgttatccatttgaccttcaggatcattttatgtgttcacttcttttttgttccttcctcaatccacaattctctttcccatgacagacttccctcctcccttcctattactagccttagccccctcctccccaatacttacatccacttcaggtgggcaggagttcccaggcataggagctggaacaatgctcttcctctcaggccttggagcagcgggggctggcccctcaggctggacccgaatagcaccttggatgaggacaactggggacactggggcaaatgattagggggaagtgagacctgtaggtcaggtggagttatagtatacacacccccacctgaggacccaaaggttgggagcctcaatggctatgagctcgccaagaaagtcaatccagcccggctccttctctccttcttcagtacctgggggtggctggacaaggggctgcaacaggatggtggtgctggggggcacagctctgggtggcattgggacggtggttatcaccacaggtttgggctgcaagggtggcttccgggtgggcagggctttgcctgatggaaggggaaaggaaggaaggaaggaatgtcagactcaaggcatcttgccagggatcccaaggtgtcaggaggccctattacctaaggagccatcggaggatgggcccatgctgatctggacacctccaagtggggggcctagaacatcctgcaggagacacccttgaggtgacagtgactccgtcttcacttcagtacctctctctnnnnnnnnnnnnnnnnnnnnnnnnnnnnnnnnnnnnnnnnnnnnnnnnnnnnnnnnnnnnnnnnnnnnnnnnnnnnnnnnnnnnnnnnnnnnnnnnnnnnnnnnnnnnnnnnnnnnnnnnnnnnnnnnnnnnnnnnnnnnnnnnnnnnnnnnnnnnnnnnnnnnnnnnnnnnnnnnnnnnnnnnnnnnnnnnnnnnnnnnnnnnnnnnnnnnnnnnnnnnnnnnnnnnnnnnnnnnnnnnnnnnnnnnnnnnnnnnnnnnnnnnnnnnnnnnnnnnnnnnnnnnnnnnnnnnnnnnnnnnnnnnnnnnnnnnnnnnnnnnnnnnnnnnnnnnnnnnnnnnnnnnnnnnnnnnnnnnnnnnnnnnnnnnnnnnnnnnnnnnnnnnnnnnnnnnnnnnnnnnnnnnnnnnnnnnnnnnnnnnnnnnnnnnnnnnnnnnnnnnnnnnnnnnnnnnnnnnnnnnnnnnnnnnnnnnnnnnnnnnnnnnnnnnnnnnnnnnnnnnnnnnnnnnnnnnnnnnnnnnnnnnnnnnnnnnnnntttctacccttgactgctcccctatgttctgattcccactttctgagatgcctgctgatcatttcctttctcataccccacctcggggctcactgcctgtcccttcacacaaattccctctctactctgtcagcctcccaggccccaaatcgcaaagactcagtcctctgagccttcctggcctctgttaaatccacctgtgaggcacagtgatcaccccacatgggcaaaataaaactcatccaagggccagattcagctccaaggtcaacagtctgccactacctttggtccataccactcatttatattcttaattatataattcctaagactgctatattaaaatttcaacttccatttgtgaatagttagcacaagcatatgatataaaaccccaaaggaccaagggtaattcagtgaaacagatcttcttcccttccttgtccaccagccacccagatccctcctcagaggtgaccactatttgattattaagcatgtgttatgaccctcatgagactctccaaaagcaaggattacgtctgatgcttcctgtctatcaaagtgatgggtgaagcacaggccctcaagagacctaatttgtttagcagagaatctgactccttaaagtcaccaacaatcaatttgctgtgaaaaggttttcaatcctcatcttgtttattctctttgtaacttttaataatacgtggatatggtctgtttgtctctctgggcccactctgtatccttcccagcatcgctctgaggccagagaggaaaacatgaatggactgaatcactgggctcccttgccctatagcttctggttggagttcaaccaaagagaggcagtgacaggaaaccctgaagccactttgcaagccacactcaacatgtccagtactgaattcatcatcgtccctgactggggagctcttgctcttaccatacctatctgccctggcaagaaacccaggcatcttcttcaaatcctatgtaagaagtcactgcaattcatccattctactttattctttctgtttctttttggcatccacatatcctacttgattaaatgcattcagtcctgcctttccatgttccattccctctacttgccaccagagtcacctttctaatcacattgctctcctgcttgattcttcagaggctcccaaatgtccacaggataaaagctaagagtcccttagcagggttcccacctggccctgcagcctctgcaacttcttgccatttcccactccctccccacatccactctcacaggatccaagttccctagactcacacacaacacacacacacacacacacacacacacacgaatctccatattcatctattcatcttctggctaatttctatatgtctttcaaaactcggctcaggaaaccctgcctccagaaacacatccctgatccagcccccatcaggtgagctgccccttatgagctttcgtggcaccctatgatgtctatcctggaattcccacaccttcagcaactggcatgtgtcttttccctcccaccacactataggattcttgggtcagtgtggtgctcatatcttcgtctttgcacccctagcaccctgtccagtatgtggcatggagtaggtgctcagtaaatgcttactgtagggacacctgggtggctcagcagttaagcatctgcctttggctcagggtgtgatcccgggtccttggatggagtcccacattgggctccctgcagggagcctgcttctccctctgcctatgtctctgcctctctctgtgtctctcatgaataaataaattaaaaatctttttaaaaaatgtttacgtgtaaattggtaagaggaaatgaacttggtaacacttaaaagtagcacaaatagtgttcattgtagaacctaggagttgggtatatggtatttcagctcttttttaagtttgaaaaactttataataaaacaccaggagagggatccctgggtggcgcagcggtttggcgcctgcctttggcccagggcgcgatcctggagacccgggatcgagtcccacgtcgggctccctgcatggagcctgcttctccctctgcctgtgtctctgcctctctctctctctctatgtgactatcataaataaaaaaaaaaaaaaaataaaaaaaaaataaaaaaaaaataaataaataaaacaccaggaggaaagaataacataaaattccctaatctatccatacttttttattttttttaaatgcaaagcaataggaagttaaatcacacaataggatactagggatgagaaaaagaaaggaaaactattcccatctcttcagtgcagtttttgctgtggtttcctaaaactctccctccccttcccggcctttggtcatctaccatttcctctccccgccttttcctctgtgtcctgcatccctcccccatacacacacacacacacacacacacacaccctcactctctctctctctctctctctctctctctctgccttgggaaagcctgggggtggtggtaggctgttattacctgaggggtcatcagaggtgggacccacattgatctgcacggtttcaaatggggatgttggatcatctcctaggaggcagagtgggggtgccaaggattctgtcttcacaactagcacctcccctacaccaagggcctaggtgagagtgagagggaaggagacaaagaagaaaacaagagttgagagcaagaccaagaacaaaagcttcacagcttactaaatatttgatattctgctttgaatggtgctgagcatctccctgagctgtctctggtcccctgttttctctattttattctgggatggtcgatgaagtctcattatttcaaatattgtcttaaagtgaacaacttgggcaagagcaattctagactcctcagcagttaacaactctcttcttcccagccccaccacggctggcacataactgtatattaaaaagactcccggcagcccaggtggctcagcagtttagggccgcccttcggctcagggcgcgatcctggagacagggaattgagtcccacatcgggctccctgcatggagcctgcttctccctctgcctgtgtctctgtctctctctctgagtctctcatgaataaataaatacaatttttaaaaaataaataaaaagactccatcttcacttctagacaaccactgcagagacatgtaaaaaaaaaagacattaaagaaatctgaaggcaccaccactactccatgacctgtagcacggaaaatagtctctcagcacctatggggcgaagggaatggaactcagtctctgccacaaacaggagaaggtgtcagatggctctcacctggctggagggctcagtggaaagatgggatgattcggagctgagggaggaagaggagcagggggaggatggctcagacttcacctgaagatctggaagaaaagttggggaataaacaggaagttgagtctgaggagtccaaaaagtgtccaaagacaaggcggtgaggatcccctccatcagggcaaaggggaacacatataagggccctaaggagagaggagtgcacaggacttatgaagaggaggtgtgaggatacagggagtcccgcggttcctgggaaacagtggaaagcgagggttttggaaggatgagcgagtcacagaggatatcttacctgggaagataggcagggggtcccaaggtggttcagggggactgacatccatccccacgtccagggagctgctgccaaactgaataaaggggagcattaaacggcgggaatgtgaagaaggcaatggctccaagagctccggcctggggctgagtcctggttcgggggcaatcccacccgccactggttagaaagacaaggatgggggcgcgataccgggacatcctgctctgggcaacggaagagctgcgtaagctcctccgccacatcatccaggccggtgtacaaggtgctgtctgcgagggacacagagcgtcaagggtcgcccggtggcccaggctgcggagccgcacagccgcacagccccgggctggcccctcattggctcggctcagccagacctaccgcccgcccacttgaaacctgatgccgccaaggaacttcggtccctccttcccccaccccggaacaccccgacttttccgcagggaacagaggtcgtccccaactcccgcatccccccagagcacgacgggcgccccgctccgccctcctgcgggtgatggagtctctgttcgcccggccttcttccgtagccctccgcttcctccctgcgtgcctcaggatcacagcaggacacaacccccctccctccccgaggcctcactccgcagaccccagtcctccgggctcagcaagttgtcggtgaaaaaacgtgtcgggtccgcgatctcgctgaggagcatcagttccgccatctttccctcccgccccccaaccatgagacggttcccaaggcccgcctctccccaccatcgactaatcagttgagtcttaaaaaaaaaaaggcgacgtcccggaagctctaccgaccagtaagagaggagggtgctgagtacaggaggtggctggacaggccgggccaatgggagcgcggcgggaggacgacgctcccacgcacaggggaccacacggcgtgcgcatgcgccaagcgggagccacggcgagagcgcctgggagatgtagttcccggggcttaaaggcctgccacctcccccggtcctggagaagatatggataaacaccccaaaatgtggtacacgtactcatatgactccccccactttttaaatatggcttttaatggtaaaagagggaaagaggcgccctgagaccactgctacctctccaggaaggcaaacgttgggagtgggccacgagctgaaaccctccctctgggtctcctcaaaatctcacagcataaaccacaattcacaggtgcctgtcacttttaagatttagcttttaatcagccaaacatcttgcgcagaccctgagccagccctgcatcttgtttcttcccctgaatgatcacttttcccagctcctcctgggctgcgcggttttttgggtctaccgccaacaccttcctgaggtcagcagttgctttgtcaaggttcccaagggcagcctgggcaacccctcttcggtacaaggcctttaagtggtcaggctcccgctccagcactcggtcacagctctgggcagccagctggggctgccctagtagcaactgacaggcggccaggttggcgtgtagaacagttcgttctggagggccaggtgggggtaaagtcagcagcagccgaagagcccgtccgtagcatctggcagccccttcagggttcccagctctaaataattctgtgcccctcgtgcgttctttcttggccagggcttccttttcactggcctccagctcccaggagtccctgccctgcgtgaaggaggccagtgtgagcctgaatggagattcagggtgctcggagatctgaagctgtgcctcctcaccttgacacatggactccaagcatttctctatgagctccccccaagtcccttccctccacggtcctaaccccatagttatctctgtccagccctctggcaggcctgacccaaaaggaaacccaaaagccagtacccggcagcaggagcctagcttgggtttgtccaagccatggccgcggattatgatcttcttaacaaagcttccgtcgggacagtaccagagatcagaagctggaaggggctctggcatcccactggttgatccaggagacttcactgagtctccttcaagtccagcagccagtttttcagtctcttgaggtttctctagaactcggctggccagagctgagctcactctcagctcgaggatttcagtaggacagtcttggggctgctgcctaatctcggtggttgacttaaggttttcctgggggttctcttcccgtcgttgttgcggttgagaggtgtccttgtctcctattagactggccggtggcgtctccatttggtcgaccggttccttccaccagtgagtgaacggtgttggtcggggtgggatggatcaatttcaggtcagcacctgaaaagaaaacccaaaaatgataatggcaggattatttcaattcccttttcgtcgtctcccgtcctgcggggacccaggacccccagtcctcaaagtcgtttttgtttttgttttcctcccaagatctctgtccggctggagcgtccagtcccccgaagagctactgtagacctcctccagaactatacatcccacaaacccctgcggctcgggtcaccgcccagctacggacacccggcggagccaaaaactacctgggcggccggaacgcctggcctggtagcaagagccagaccatttgaatcacgtcttctttcggagccaagtgctttgagtactatcctgggagtcttgctccaggcggagaggacggtcgagggccaggagcacctggggacaatgacagctagcgctggagcccgccaggctgcgagtcgaatcatattcccggcagccaatccggaggactgagaggcctggtgggcccgccttttgtacgtgacgtcatttcccccgcaaccggaagctccaggccttagcaaccgatcctggccgaatcaaaccgagcttggctgggtccgactggcccgattattgagactggaagcctgaagactgggcaactggggtccctagggggagcgagggaatgcggagctggtggtgaaggagagcggtagcagtcctttccttttgtctgaggcctcaggcccacctgtgctgttctccttcctcccggtgttcgagctccgagccagagccgcgcagcccgctccttcgccggttcagcgcaaggtgctgcaagagaaatcctcaagcttctttcctccaactgcctatcttcctttgcggggtcacctgaagcttctcttccctcgtacgcattcattgccattcaagtctttttcctcggaaatattagtgcttttcaaatcttcttgtgcatgcatatcaccgggggaacctgttaaatcccaggatttgatttaggaaggatggggtggggcctatgattctgcatttcatttctccttttcttttctttttcaagattttatttattcatgacagacacacacacagaggcagacatacaggcagaaggagaagcaggctcctcgcagggaacccgggacccagatcacgccctgagcagaaaccagacctcaaccactgagccacccaggcgccccctttcttttttcttttccttctttctttcgtaaactaaagtctgctttattcagatttcttactttttgcccagtgacttttttctgtcccaggatcttacccaggataccacatgccatttaaccatgtttccttagctcctcttggctttgagttttctctgccctatttttcaccctgttttgaactacttttcaagagatgctctttaactcaaaacaattttcgggggtgagggagggtgggggactcctgggtggctcagtggttgagcatctgcctttggctcagggcgcgatcccgggtcctgggatcaagttctgcatctggctccccaaagggagcgagcctgcttccctctctgcctgtctctgcctctctctgtgtgtctctcataaaaaagtaaataaaatctgaagaaaaaacccaacaattaaaaaaatatttaaattcaattagttaacagttacgttagtattattgttcaagggtagaattgattgattcatcagttgcatataacacccagtgctcatgacatcatgtgccctccttaatgcccatcacccagttaccccatcccccacctacctcccctccagcaatattcagttaagaatctcttatggtttgcctcctttcttttctctttttttttttttaagattttatttatttattcatgagagacagagagagaggcagagacacaggcagagggagaagcaggctccatgcagggagcccgatgtgggactcgattccggggccccaggatcaggccctgggccaaaggcagatgctcaaccactgagacacccaggcatccctcttctgcccatttcttgactggattatttgttctatgtgtgttgagtttgataagttctttatagatcttggacactagccctttatgtgataagacatttgcaaatatcttctcccattctgttgtcttagttttgtcaactgtttcctttgctgtgcaagagctttttattttgatgaagccccaatcattcatttttgctgattctgtatttctaacaagctcttgggtggcgatgctgctgatccatgaaccacgctttgaatagtatgattctagaatacctgtgcccctcagtttgtactatattttgcctctataactggttaaacctgttccattgggtgtgtcagtggaaaactggtcctgctcctcctaataaaagatgtaggtcccttttattattcaaccttgcttgaccagctctgagcatgggcagggccaccacagctcttcagggaaggagaattcagttctcagtacctcattttggctccttcctcagtttgctctctaataacctgccattgtgcctgactataaggaccatcccaggacagccagaaggagagatagtttcatcagtaggcacagaattgtgtcaaaacacttctctctctgttttgtattgagactcaagtcactaacctagacttctcaagttttatttctgggttctgtgtcacaataaccttagtccactgccacctcttcccctatggctaaatattctgatttttgtattccctgggctcctgttgaaaattaatccaccttttctccctcccttttcctctttctaatttcaaggatttttggaaaaggcaggacatctggaatgagtaacgaaaagtttgattacaccgtagtccctggacaaagttggctgatttgtattgtgtgccttaactgagagggccactctgatgacccttcaaagatcaacctctctcagttaaaagaaactgtagtgtgctacaaatgtattgttttgtaatgttctcttattttgcgtgtcgatttcagttctgacagactctacaaggcagaggccttgtctctatttcttttgtgtcatctccttcattcattcattcaacaagtacttatgaggacctgctatgttccaggcagcatgctaggaaatggggatacataaatgaatgaaactgacacagtctctgctttcatggaacttctagtctggccaagggaatactaattacagtggcatgaagaagggtgagatgctatgagagcggatgaaggattaggagacatttttgctgccaaagaatgaattagaactgaatctcaattctatatagaccccatattgaaaactattcaattaagtggttgactttgtctcttcaggtgatcccttgtcaccactgtgactataaaaatacacatcaggctcccggcatggaacctgcttctccctcctcccgtgtctctctctctctctttctctatgtctatcatgaacaaacaaacaaacaaacaaataaataaataaaaagggggatccctgggtggctcagcggtttagcgcctgcctttggcccagggcgcgatcctggagtcccgggatcaagtctcacgtcgggctcccagcatggagcctgcttctccctctgcctgtgtctctgcctctctctctctacgtctatcatgaataaataaataaataattttttaaaaaattagaaaaaaacatacaaacataagcacataaactcctaaaaaaatccaaattatccaaaatgaaaatatttctattttttaaataaaatttgaacttcatcaaaatgaaaatacagattttaagttttatgaaagagggctcagaatcctcagaggagaaatccatgaatcttttgcttcccccagatctcagcttgaagagtaggaaaggaccaagatacgaagacaaagaaatggggaagagcataggttcttccacaaaatgttgctgcatgaatattaactgattcacctcttgctctcttctggttccttgccctggaagcctcgttatgctggggctcagctctctagggatagtcaccaaggagtcaggaagaagcagagaaataaactgggaggattatatacccaggcctaactagggaacctgggatctgagaaggacacaaaaagaggatgacaagtgaaaatttgcttacctattggggtagaagcttggactgcagagtgaggaaggagcaatgtttctctcctttctctttcccctaaagatttgacaatgaactggaagaagagcagccttgaggggaagagctgaaaaggaacattcttctccaagtgactagattcaatccaaacctaccacgagcgtcctctattctctctcttcttttggtgtttcaaggactaaccttaccaacacctaattgtatggatgctgtgggatttcccctgcctcaggttagagggatgggggatggggggtggggggtgtgggtgggtagcagcacgcagcaacctctggaaagaaagtgagattaagaaagagtctgtgttaaagtcaaagtcaaagggacatctgggagaatggaaggacttcggggatggactgtcatttctgcaatctgtgattatggacaataaaccctattctggaacaattctccatctaagtcatagggtgcatttaatgccttgttgaagattgttctcagggaaatacccatatatgacaaatttctgaggattaacctataaataattgtttttaaatcctatctggagtcacttccatctgcccatcttctttcacgtccttccaaggtggctcagaggatctggccatattctgctactctccttgccttatcccttaagggcattgtttatgttggtttctttctttttttttttttttttaatttttatttgtttatgatagtcacacagaaagagagagagaggcagagacataggcagagggagaagcaggctccatgcactgggagcccgacgtgggattcgatcctgggtctccaggatcgcgccctgggccaaaggcaggcgccaaaccgctgcgccacccagggatccctttatgttggtttctaattgaagtatagttgacacgcaatgttacattagtttcaggcgcgtgatgtaatgattggacaagtccatacattataccatgctcaccacaagtgaaaaagacatctgtcacccatacaatactattacaatactattgaccatatccactatgctgtaccttttatccctgtgacttattcattccataactggaagccaatattcctccctctctttcacacactttgccaaaccccctgcctcccacttctctggcaactatcagtttgctctctatatttatgggtctgtttctgctccatgggggcattgttttgccttcatcaaagatttaaacttatagtagaagcctagaagaggttcaggagctggtgcaagataatttgtgagctggtggttgtttcctgttgtctccacacacacaaagcatgtgacatctgccctccaaatggaaaacccagggatccctgggtggcgcagcggtttagcgcctgcctttggcccagggcgcaatcctggagacccaggatcgaatcccacatcaggctcccggtgcatggagcctgcttctccctctgcctgtgtctctgcctctctctctctctctgtgtgtgtgactatcataaataaataaaaattaaaaaaaaacaaaaaaaaacaaaaaaacaaatggaaaacccaaaagactccccaaaatttctggagctcatacaggaattcagcaaagtggcaggatataaaatcaatgcacagaaatcagttgcgtttccatatgccaacaatgagacaaaagaccgagaaattaaggagtagatcccatttacaattgcaccaaaacccataagatacccaggaataaacctaaccaaagaggaaaagtatctgtactcagaaaaataaagaacactcatgaaaaaattgaggaagatgggatgcctgggtggctcagctgttgagcctctgcctttggctcggggcataatcccaggatctgggatccagtcccatattgggctccctgtggggagtgtgcttctccccctgcctgtgtctctacctctctttctctctgcctctcatgaataaataaatcttttttaaaaattgaggaagacacaaagaaatcgaaaaatgttccatgctcatggattgaaagtacaaatattgttaacatgtctatgctacctgcagcaatctatacattcaatgcaatccccatcaaaataccatcagcttttttcacagagctggaataagtaatcctacaatttgtatggaaccagaaaccagaacaatttgtattccctgaatagccagaggaatgttgaaaaagaaaaccaaagctggtagtatcacaattccagacttcaagctctattacaaagctgtaatcatcaagatggtatgatactggcacaaaaacacataggtcaatagaacacaatagagaacccagaaatggaccctcaactctatggtcaactaatctttgacaaagcaggaaaaaatatctaatgggaaagacagtttcggggcagccaggatggctttagcaccgtcttcagcccagggcgtgatcctggggacctgggatcgagtcccactttgggctccctgcatggagcctgcttctccctctgcctgtctctctctctctctctctctctctgtgtgtctctgtgtgtctctcatgaataaataaaatcttaaaaaaaaaaaggaaaagacaatctcttcaataaatggtgttgggaaaaattggacagccacatgcagaagaatgaaactgaaccattttcttagaatacacacaaaaacagactcaaaatggatgaaagacctaatgtgagacaggaatccatcaaaatcctagaggagaacacagacagcaacctttgtgacctcagccatagcaacttcttgctagacatctccaaaggtaagtgaaacaaaggcaaaaatgaactactgagacttcatataaaaagctttttggggatccctgggtggcgcagcggtttggtgcctgcctttggcccagggcacgatcctggagacccaggatcgaatcccacatcaggctcccggtgcatggagcctgcttctccctctgcctgtgtctctgcctctctctctctctctgtgactgtcataaataaattaaaaatatatttaaaaaaataaaaataaaaatctttttgtacagtaaatagtcgacaaaatcaaaagacaactgacagaatgggagaagatatttgcaaatgtcttatcacataaagggctagtattcaagatttataaaaacttatcaagggatccctgggtggcgcagcgggttggcgcctgcctttggcccagggcgcgatcctggagacccgggatcgaatcccacgtcgggctcccggtgcatggagcctgcttctctctctgcctgtgtctctgcccctctctctctctctgtgactatcatgaataaataaataaaatctttaaaaaaaaaaaaaaaaaaaaaaaaaaaaaaaaaaaaaaaaaaaaaaaaaaaaccttttcaaactcaacactcgaagagataaagaatccagtcaagaaatggacagaagacacgaacaaacatttcttcaaagaagacatacagatgcccaacagacccatggaaaaatgctcagcatcactcagcatcagggaaatacaaatcaaaaccaaagtgagataccacctcacaccagtcagaatggctacaattaataagccaggaaatgacagatgttggcaaagatgcagagaaagaggaaccttctcacactgttggtgggaatgcaagctggaagacagtatggaggttcctcaaaaagttaaaaatagacctacgctgtgacccaacaattacactactgggtatttaccccaaagataaaatgtagtaatctgaagggccacttgtaccccaatgtttatagcagcaatagacaaactatggacagagctcagatgtccatcaacagacaatggataaagaagaagaggtggtgtgtgtgtgtgtgtgtgtgtgtgtgtgtgtgtatgtatatatatataaaatggactactactcagccatcaaaaaatgaaatcttgacatttgcaaagatgtggatggaactcgaggatattatgctaagtgaaataagtcaattagagaaagacaattatcctatgatgtcactcatatgtggaatttaataaataaaacagaggatcataggagaagagaggaaaaagtaaaacaagatgaaatcaaagatggagacaaaccataggagattcttaatcataagaaacaaactgcgggttgctggaggggaggtgggtgggggatggggtaattggatgatgaacattaaggagggcacttgatgtaatgagcactgggtgttatataagattgatgaatcactgacccctacctctgaaaccaataatatgttatatgttaattaattaaatttaaatagaattaaatagagaccctgggtgactcagctgttgggcctgggcatgatcctttggctcagggcatgatcctggagtcccaggattgagtcccacattggatccccgcagggagcctgcttctccctctgcctctgtctctgcctctctctctctctctgtctctcatgaataaataaaatctttaaaaaaataagtaaaattaaataatacataaataaaaataaaacaaaaaattagagaaaatgttaaaaaaaagactggcaaatcactgatctctacctctgaaactaataatacaatatatattaattgaatttaaataaaaaataaaaataaataaaaatttatcaagagggtagatatcatattaaatgttcttagcacaataaagtcaatttaaaaaaaataggggtgcctatgtggttcagggggttaagtgtctgccctctggtcaggtcatgatcccagggtcctggaatcgagccccatgtcaggcttcatgctcagccgggagtctgcttctcccctttgctcctgccctgacttgtgtgctctctgtctctctcaaataaataaatcaaatcttaaaaaaaaaaaaaaaaaaaaaagggaagaaagaaatgagtgaagtaagattcttattcattcaataatctttacaggttacttactttactggttactcagaatttgtcaatgaaacatggagataaaaaaaaaaaaaaagaaaaagaaacatggagataaatataggatccccaccagtagtctgataaggtaaggtgtcatagttaacaaaagctccaggtgcaagggcaaaagtgataagtggcagggaagttacttcccactggtgctaatctgaaaagtccagagtccagagtgttgagccttggatcatggccataattttgacctaaagagattgaaaggatttcttgcaggtgaaggaagcaaggcagaagaggtaaggaaatgaaagccactttacattcagtatcattcatctctgacttgtcaatctcagctttctcagagtatttcaataccgcttacaggctgccctgtcaccaggatcaagctggttagaattttttttataccctcatatccctgtgcattccatactcaccacatggaaccatatgctgcacttactctctgccatttatcatcagagcgagagacaaaaattctagctttccaaggctaaataaattttcccttctgtttagttttggtggtttctgtggttttagttctgctgggatgtatgtcaaaattattcctccctcctctttgttcccaaagcgtttttgcttatatatcccttataggcagggttttcaggcagaatgaaggtgtgaaaggcagacttttccacagtgaaatatttaattacaagagccgctcttttctgaatcttgaccatgcattatgaccataataccaggcattgtgctgtttttttttttttttaagattttatttatttatttatgatagacatagagagtggcagagacacaagcagagagagaagcaggctccatgtggggactccatcctgggactccaggatcacaccctgggcctaaggcaggcgctgaaccgctgagccacccaggaccactgagccacccagggatcccccattgtgctgtttttaatcaagtgatgagggaaagcctccttgtggagtgatatttacgcaaagacataaatgatgtaaaggaacaggcgtgcagatgactggaggcagagttcaggaagagaaaaacaagagggcaagggccttgaggcaggagaaattggatttttatgttaaattcatagcagttaagagaacagctggaggccagagtgggtggagcagagtaagcaaggcaaaaggtgggaggagatgaagttgaagagatagggaagaacaagatcaggtaggcttcacaggccaatgtgagtattttggattttgttttaagtagatatatggtagccatcagaaggcttgagcaaagtgagcaatatcatctagtaatttaacagatcactctagtttctactcagaggaaggactgaatcagtcaaaaatggaagcagaaaatccaattaaggagctagggatccctgggtggcgcagcggtttggcgcctgcctttggcccagggcgcgatcttggagactcgggatcgaatcccacgtcgggctccctgcatggagcctgcttctccctctgcctgtgtctctgcctctctctctctctgtgactatcatgaataaataaaatcttaaaaaaaaaaaaaaaaaggagctagtcaaggggcaatgatagaatgggagcttggattacagagaaggaagaggtcccgaggctgtctttttttaaaaaagacattctcctctctgtttttttttttttttaacgatttatttatttatttatttatttatttatttatttatttatttatttatgagagacacacagagagagagggagagacacaggcagagggagaagcaggctccctgcagggagccggacaggtacttgatctggggactccaggatcacaccctgggtcgaaggcaggcactcaactgttgagccacctaggcgtcccctcaccccaggccgtcttaatatggaggagtctggaagagaagtaggagccgtcagtgaagacagaaggaacagcaaataaggaactggggcatacaaatacctcctttagaaagagcattagggatccctgggtggcgcagcggtttggcgcctgcctttggcccagggcgcgatcctggagacccgggatcgaatcccacgtcgggctcccggtgcatggagcctgcttctccctctgtctgtgtctctgcctctctctctctgtgactatcatttttttcatgaaaaaaaaaaaaaaaaaaaaagagcattaaaggggcacctgggtggctcagtggtttaagcatctgccttcggctcaggtcatggtccctggatcccgggatccagccccatggattcagccccatgtctgagctccctgcccagcggggtgccgacttctcctcttgcccttctcgtgctctctctcttttctctctctcactctcaaataaaatctttttttaaaagaatttatagggatccctgggtggtgcagcggtttgccgcctgcctttggcccagggcgctatcctggagacccgggatcgaatcccgtatcaggctcccggtgcatggaccctgcttctccttctgcctatggctgtgcctctcntaatttttatttatttacttaagaaagtcacagagagagagagaggcagagacacaggcagagggagaagcaggctccatgcagggaacctgaggtgggactcaatcctgggactccaagatcacgcccggggccaaaggcaggtgccaaaccactgagccacccagggatccccctcaaataaaatcttaaaaaagaaaagaaagagtatttttttttcccccaccccccggcccgggcaggcgccccaagaaagagtattaaagtgaagaaagcatttcaaggaggaaggaatattcatctgtgtcaaatgttgttgatggtctagtacagggtttcttaatcttggtgcatatatattacaaagtaatataatgaacatcatgcagcttaagaaaatcttcctggggtgcctagggtggctcagttggttaaatatctgactcttaatttccactcaggtcgtgatttcagggtcttgggatcaagccttgcattgtgctcctcagtcagcagggagtctgctggagagtctctctctctgcccctatctctcactctctctctctcaaataaatcttaaaaaaaaaaaaaaaagaaagaaagaaaatcttcctcctattgttagaattccctgtgtatattcttctccaattgtaactcccctcgtgccaagggatatccactattctgaatgttgtgctttcactgtatacatgggtgagtagaaaatgaggtggggttttttcttctgaaaggtgagctatattagtacagcatctttgtatgatgatggggatgtttccgtgaagagggggaaactgtgcaggagaaatagcagttaatttcaagagtcccatttctgagaggtgagaagggacaggatcccaatatagggatagggtgggggctgggagcaggtcagcttctctgcagtaacaggaaggcaataaatacagccaagatgcaggtggcctcgtagatttggggatgaagccaggagagagttctcttctgaaaatttctgttttcttactgaatagaaaggaaggtcatcatcttgtgaaactgtggtctcagactggggaatgtgaactgcctggggaaatgtgagcttgcaggccatactgagggctgaaaggaagtgagaccagtcaatatgactgtgtgttttttttcctcagacacattcagctgttgagtgcgggtgtggaacaggcatagttgggtttaactggggctaacctgtgtctgaaggagagaggcaagggctgagaggtgagaagggacaggatcccaatatagggatagggtgggggctgggagcaggtcagcttctctgcagtaacaggaaggcaataaatacagccaagatgcaggtggcctcgtagatttggggatgaagccaggagagagttctcttctgaaaatttctgttttcttactgaatagaaaggaaggtcatcatcttgtgaaactgtggtctcagactggggaatgtgaactgcctggggaaatgtgagcttgcaggccatactgagggctgaaaggaagtgagaccagtcaatatgactgtgtgttttttttcctcagacacattcagctgttgagtgcgggtgtggaacaggcatagttgggtttaactggggctaacctgtgtctgaaggagagaggcaagggctgagaggtgatgatagtgtggaaccttgggatctacaatgggtaatgaggggagtgaaaaattgaggtgatcaaatatcaaagaagagtgagagatctgatggatgaaaagtgtgtgtgggattgaagaatttttggaatggggtgctgaatggaggaggaggtgacaataaaagaatagatttgggaagggtggcaggtattgatggtaaccaagttgaaggtatgacacaggaagaagaatggctaaggagtagggaaaaacctcagtggaagtgaggaaggccaggaactgttcaggatgctacaagatattgaagccaccaaaaataatgaaatgacaaaggtggtggtagagaggaaggcctagatacctcggaagaacctaggtgctaaattttcaactaatgatggcccagaaccaaattatggggggataagatcttccaagaagatattagaaggggctggagcctctcccagagaatggactctctcagtccatagtggtgcaaaagccaagggcaccatgcagggagggaattgaggtaaagtgggaggagaatcaaattggaatatgccagggtagccccagtggtacagcggtttagcgccgcctgcagcccagggtgcgatcctgaagaccccggattgagtctcacgtcaggctctctgtatggggcctgcttctccctctgcctgtgtctctatctctctccctctgtgtctctgaataaataaatttttaagaaatggaatatgccttcactccaggagtctgagtgatctggaggaagtcactgtcattcgcttcttcctctgccaaattctcttccattcaattgagttcaaagattggtacaagagattttatctgatgaggatctaaaaatcagacataagccaaagttgtctcctgcctttcagtactcataattatagtaatgtacgtcaagatctcagtaggaaagatgggaaaaatgcagataaagtgaacggtgtatcggttttagacctgcatatctttttgtcaaagaaagttgttctagttgaagccatatcctttgggctcacctcttctatctttgtggtccctaagcctgtaattcttaaccttagctgccctttggaattacctggggatgtctaaaaaaaatattgatgcctgagttgcatccctagagattgtgatttaattggttcaggatgtgatctaggctttgggatttttaaatgctcccaggtgactccactgtatagccagggataagaatcagtgctccaggggggatccctgggtggcccagcggtttagctcctgtctttggcccaggacgtgacccaggatcgagtcccacgtcctgcgttgggctccctgcatgagcctgcttctccttcctcttgtgactctgcctctctctctctctatcataaataaatatttaaaaaaaaaaggggggatccctgggtggcgcagcggtttggcgcctgcctttggcccagggcgcgatcctggagacccgggatcgaatcccacatcaggctgccggtgcatggagcctgcttctccctctgcctgttgtgtctctgcctctctctctctctgtatgactatcataaataaataaaaaaaatgttaaaaaaataaaaaaataaaaaagaaaagaaaagaatcagtcctccaaggaatacctggagctctgcctagaaaccactgcagggtaggtaaattttggccaagtagagatgcagatgtgaagggaagagaacattgtgagtacaagctgagatgtggtctaaaacacatgacaagcgtcaaacaatttggtttgtaagagtctagagaaagaggtctaagatttgaggatagctgggcaaggacctggggacgggggtgggaatgatgagtagtaattcagtttgcttggagattaggttgaaaagagaaatatggatggttttattttatttttaagattttatttattcatgagagaagagagagagagagagagagagagagagagatgcagagacacaggcagagggagaagcagggctccatgcagggagcccgacgtgggactccatcccaggtctccaggatcacgccctgcaccgaaggcgacactaaactgctgagccaccggggttgcccatctggatggttttaaatggtggaaggggttgaaggccagattacaattttataaataattgagtaagcaatagggaatcttgaagggtttttgagcagtggagttataaaagaaatgtatttagggaggataacctgacagcagtgttgagggagacctggagctgtgagagataggaagtggggagattatttatttatttatttatttatttatttatgagagtgagagagcatgagtagggggatgggcagagggagagggagaagcaggctgcccgctgagcagggagcacaatgcatcttggggctctctcccaggaccttgggatcatgaactgagcccaagacagatgcttaactgactgagccacccaggcaccagggagaccttttagaggagctgttgtggcaatcctagatgaggtcatttttcaggcaagggctggggaaaagttactggttcaaaagataacatgatgatagaattgatttggcttgacagcacaccaaaagtaaaggcaggagggagatggaggaagcatcagattttcagataagggtgatgaggaaatggtgccattaacagggacagggaaacagattttcagtggcatttcatcattttggtttggaacatgctgagtttagaggaccagcagcttggtccatgtggccatattccacagtcactggaagaatgcctacatataaatatataggttggagaatgtctcagtcaactcagactgctgtaacaaaataccatacactgcgtggcttaaaaataacagaaatttctcacagttttagagattgggaagtccaagatctaagtgctggcagatttggtacaaggtgagagccccctctggtacatagaaagcggtcttctcattgtgtctttgtgtggtgaaaagggcaaggcaactttctggggtctcttttataaggggactaatcccattcatgaaggtctgtcctcatgacctgattgcctaccatcacactgaggattagacgtcaacatatgaatttggggaggaagctaacatttggtctatggcagagaaacatttagttagaagtgatatctgagtttggagtagatgagattttcaagggaaagtctcagaaaaggaaaagatctagagatagacacttagggaagggaggagagagaaaaaggggaggaagagggggaatgattagaaaagtgtgtggaagtagagaggggaaagataacatgtccttgaaccagcacagtggagaatctagggtcaagggacaaacacaggagggttcagaaaggcagtgtgcacctagctatgcaaatattgattttggctcctggtaacttctggtcattgggtattatttgacagagcagtttcagtagagtagggagtggaagcatattttaaagggttaagaaatagaggaaaaaaaaggttaagaaatagtgggtatgaaagagagacaaagacacatccctgacaaagggggtgggaagtgagtagctggtgaggaagtggaagctgcaaatgtgaattcttttttcaagttgtttggtgagcaaagcacattaaatctgaaatgtccaaaggagaactcacaatgtccatacaccatcccatcctcctcctatgtcccctgtcttggtgcatggcttttctcctagatcataaaccccatgaggtcagtattcacatccattgttttggcagatgtctcgccagcatcctgcatggtgtctgcaagttgtacggatgcatagaactttgtcctacagatgtacagctgaagtctactgcttatacaccccgcccccaccagaggcctcctggttgacgtcagggtaggagaaggcaactggccccagctagacttcgagagcctagtgatctccctgggggtctgctgtgatctgaatgtttgtgctccctccaaaattcatatgttgaaattgtaatacacaatttgatggtattaggaggtgggtttgggaggtgcttaggtcaagagggtggagttctcatgaatgggattagtgctcttataagagaccctatagatctctcttaaccctttccaacaagtcaggatacaatgagaagtgtgtaactcagaagagggcccaggctcaactgtgctggcagcctgcttttggacttccagcctccagaactgtgagaaataaatttctgttgcttataagcaacccagtaaatagtatttttgttataggaacctgaatggactgagatggcctcccgctccccttgcctttgttatacaggtacaacataccacgcagggcagtaatccaagttgttttcagccctctggccagaaggcaggaatagctgtaggcagttggcatcttttccctgtcatactgtctctgaccaactttttcagaataatcagtccctttctcctgatttcctggagttctggggtctacttgtaaatcctctcttctcaaagccctaaacccagtctggtagaaggggaaaatgtgtgctgggaaaataaatccccaccaagaatggacctcagaccagattcctgctgggattcctaaggagccctcccaacccccatagttgtatctgtctttccggtgtcttgggggatctgtctcctcccacttttgtctctgtcagttttctttttctttttttctgttttcttttatctttctttccctaggaagggaaggtaaggggaaagaaaaggggttaacaaaagagggtctttgcaaggctgcagtcttcggaattgagggtgataaatccacttggtttctttaatgttctttcagaaattcatacacacattcacacagaaatcagaacaaggtgtggactgccgaggggagcggggagcgggccggctcctcccgacgtggggaggtcggtacccggggtcactttctgccaggctggctgcccaccggttgggataggtggaaaggaaatatttacagagaacgaggactttcatcatcctagggtgaaaggtcctaaactgggaacctcccaaatctcattctaaaaataccaaaagtagaggttctgggattagcaagaaaataggaagggggtggaggagacaaaactgtactaggaagaaatgagcgcgtgggggggcgtggctaccccggggctcgggcccagcgccggcagaaaggcaggggtgtcagcctggcgcccgcggggaccagaaaagggcggagcctgccgacctggaggcggggtcgtgtaggggccggggcggagcctacggaggaggcggagctttggggacctcgctctcgccgcggagcggaggcggacggagctcggcggggggcgctgcgtgaagcggctgcgggggactggagtggctgagggcccggcatctggcggggatgtcgggaagtggtatttctggggctgggtttttttggggttcctgaggaactggattcggagcgtgcctgccaggcgagaagttccgtggaggcagagtttaggacgtgtcgacatcgggcggcccccgggacaggtgtgcggggcgcctgctggatccgcggcgtggctgcagaacgcgctggagaggttgaggggcaaggggtggggccgggccgggggggtcctcacggatcccagtagttctcgtggtgctgcgcggcaatgatgatgactacggtgaggatggtacagagcaccatggctgcgatgcccaccgccagggagataaaggagaagttccgggcctcgcgtgatgcgatctcggcagacaccatgtctccgcgggccaaggccgtgcgcacctgcgggggaggggcggaaaaagaggattggagtggctgctccgtgggtgatgctccccaggacagccagcaccccttagaataagaaaaaccaaaagaaaaagaaaaaaaaaaaaagaaagaaaaagaaaaaccgagcgaggccacccttcccagacgccgccgtctactccccttccacctgcacggccttgaagatggcgatgatgcccgtgggccagaagcagcagatggtggtcagcaccgcgatgggcatgtagtcgtgcggcgggcgccttggctccagcagggccagccctgggccctggggcggcggggggagtgtggaggtcactcctgtgccccccggggtcccgcctgcgtagggctgtggaaggaaggttgcgggagaggacagagaacgtcattcgggtcctccctgagcccaccaacattctgcgtctggcagagtagtttttaaagcagattcttgcatgttgcttctcaaagaaacttgtcatccactacccttccaggacacccataaattccacctaggtccctctcctttcttcattgctgcccttaccctttattcttaggggtcgccacactccctccccataaggtatgaccgcaccagtgctgccctggcctcacttcttctctccaaatatctgcttggccttccctattgagtcagttctaggtttcttctcccttatcctccttggtccccaggtttcatttctccttccccctctctccaggctgttctttccttctatcaagcctcctctggacttccgtgctccattccccttcccagaccctgatctctgaccccaactgctagacacacacacacacacacacacacacacacacacacacacactcccaaggctttccttagtccctcctctctgtaggcctagtcctagggacctgcctggttccctagcccagtttctctatcccaccagcccccagtgcgtccccactccttcctcccaggccctcgtcagcccagtactcaccgtgcccaccgggtagaccggcacgtaggcagtgcaaggctgcagctgtagggggtagccgggggctacgtagccccccagtggcagcgtgcctaccgcacccgtgtgcgtgggcaccacgaagccgggagcctgggcagtatgagagggcgccggcgggggcggagcggcggcggctggcggcggcgggggcagcgggccctcgaagcgagtctcctgcaggtaagggtcgggtggcatgcggggcaaggtggcgcagccgggtgggggcgccccggcggccgggccgggcggggcgtggtgtggtggtcgcggcagagtggctgaagatgaggggccgcgctgagcagtggccgcggcggaagccaggccgcctgcccctaggcgcgggagggtggccgtcccggactggtggtagtggtggtggtggtgatggtgagaggaaggggctgcctgtgggggtggggcggggggttcggcggggggctggggggcattatagggtggcggagaggtgtgagggactgagtccgaaaggcctgggggtggtaagcagaggagggggcatggggagagagaagaggtgaggaagggggtagggggagacacagagggccagggatggaagaagataatgtgagagacagaggagatgggtgagaagccatctcttggtctcagggcaggaaaggggttgaatctaggccatctgtcccccctcccttctttcaatctagttttgaggtcgcaactctcctccattcttctacctcttcagcaacatggccatagctttcacctgcacacccaagccatggctgccttgggcttgcccatctgagctggtcctgtatgtgcacgtgtgtagacatgcaacactgtgttaacatgtattcaaaccaacagttgcataaacacatgtaggatgacatattcccttctgcctccttgccctgggaaggggcaccctagcctctctgggaatcccagtacctcttctagggcagataaagaaggctgttctgaattttactccctgccaacctccatctgatcatatcattgtatttctccactgaatgtctccatgagagccggtgtcatctgtccatctgtcactcccaatgatgctatccttgctgtacttggctgatgctaggccactctacttccctcaccctttcaacctgtcccctttccatgttgttggtaaggggacgaagctgcgattggaaggaggaaaagaagagaacagagggatagattaaaaagagaaggaggatggggggttctgagagctggacagaaggggaatgaaacaatcaacccgcctccagggagggggttggggccaagggtggggggagagtctggagatggtggaaagggcaggtttttatttttttatttttttatttttttacctgacttttccgatgacatgcctgcagtctcgctgggacagggtccctgtagtgggagtcggggtccctagctggcgtcggagtctcggtgtgcggattgcgcagccggcagcacagagatggagagatgaagacagcggcggggggcggagggagagcagggaggggggatagcttaaagggaccgaggaggggggaggagtttccgaggtaccgtcactcggtctctcctcctctcaccctggcatccaagcccccagtttgggctcccttggagttgtcatggaaacagggaggcaagcaagacctggcgaggcggttgggactaagggaaggaaggcgggagggagaactctctagagtcttcccctctaagactggctgtagtgatgacattgtgggaggaagggagcaggtgcccagtggattctgtaccccagtccccacaggatctggttcaccctagtcaggaccccccccccaacttccctcacagtccctgcaagttctcaggatcttctccccagtctttagcttctgtttctcccgctttaggaaggataactgtatatgacagagaactgcagagttgagagctgcgatggcttgaagagcccccagggttatggcctgcggtgagctgcaggtaaactggggggcttggacctatagtaatttagcgggagtctggcttgtgactggggggggagagggcgtgggagaagattggagagaaggcttgggggatacggagatacgttcttcctgggagatatgttcttcctccggggtgcaggagctgagcactttggaaggaggggatggatcagctcatttctggcaacttcgttttgggaataggtgatttccctttccccctttggtaattaggcctcttagagttccccagtgcatccatgttcagatctatttcttaaaatcccagcacccacccaccacccctgccaaggccagccgccacctcctgagttggcaggatgtgtgtgtgtgtgtgaggaggggggcgggtgtcggaacacagctgtaattgcggtcttttcatttgttcattgtatcttgggagcacgtatgcggggatggaaggtgcagtgggcagtctactgagacttagaggatagaggagttggactttatgcaaaaacacagtcagggattctttaaccctctgctacctccgccttcagattagtcctccccaacccccgcccgaggcagtggccgtgccgggctgcgtcctagcggagcctacagagctgtgcagaggccccgcctggccgggtcccagggcccagacatttaggtcaggccccaaactggccattctggtttccgaggcgtcggcgtggttccagaccccctaccgccaccccaccctcacatgacacacctcagagcacaaatcgggtttattgagagactttagaccggccaagaccttgtgaagagagggagggattcattccgacaagcttcgaaatcctttcctctagggagacgccttcaaacgctaagtaaaagcccgccggtgtctggtgtctcgccaggggtgcagggcgcctggagctcgggggtctggccgaggggggcgcccacatgagttcccggctcagggcaggttgcgggggtccctcaagttgaaagactggcgggaaccacgcgggcgtgagtcagcgctgccccaggggccctccgccccttggaggtgggtcgtgtcccgggagcggaggagaggaggccaggagaaactgggtcaggctgcacttctagctccgggggcctcgaggactcttcgcggccctggagacgagggcagtacacgcacttgataacgaagagttgtaagacgctgacccggggccggcgggcaggcgcggggcggggcggggcggggtcctcccggtcctcccggtcctcccggtcctcccggtcctcccggccctcccggccctcccggtcctcccggcgccggcgtgggaccgactgcggagacggtctttctccggtctcgtccccagcgccctgccccctcaccccgcccccggtggaggggggagaacttcgtgttccgcggcggagccagagttgggaagtgggacgaaacaggccagaactcagcccctcagggcgccggtgcagcggggcccgcgctcgcctcctctcggctcgcaggctgggcccgccgcttcttcctctccccacgactctaaatggattgctctgcctgtctgctcccccgccctcgggacgcagtggaatgttccacggcccctccggtcccggcctgcgatacaggggacgcgggcacggttgtcagggaaagccccggacgtgacggcggagcgcgacccctggcagcctcccctctcccctcggtcactgccctgcgcgcgctccggaccccctccccccgcgggctccggtctagggggaagtaaacagcaggcgcagcggagtccgcggacccaggccaggtgggagcttgcgtcctccaggagcctgcgctgccgctcggggtctgccttacaacacccggggtcgtgcagcgccgggacgggcctggggacagtcccggccgggctgggggcggggctccgggtgcgcgtcgctgagtctgcgtgtagggggtgtgtttcctacaacccccgagtgcgatcctagtaggctgcctggtgagctggacctagtgtgagcgcgggcggggaggggcctctcggtggccgggcgtctgctcggaggggagcgtgtcgtcctctctctcacaggcccccatcgccccttctcaggcgggagcatgctggggcgccggggcctgcggctccccccggtggggatcctgctcctgctgccgttcctgccgccgccgctgccgcccgcagcccccgcgccccatcgcgctgcctacaaaccggtcatcgtggtgcacgggctgtttgacagctcgtacagcttccgccacctgctggaatacatcaacgaggtctggccggggacgcccggttgtggggcattggaggcgtctgtggtgactggggaaggagaatggggaacggaaagctgccctgctgggcttgctccgttcctggaggagctggtgctggcgttgggagaggcaaaggatgagatccccggttctagcagggcgcagtaggagtgcggacgctggccagggggcgatgaggtgggcgggctttgtagtgcaccccctgttgcagcattgcccctttcccacagacacatcccgggactgtggtgacagtgcttgatctcttcgatgggagagagagcttgcgacccttgtgggaacaggtgcaagggtttggagaggctgtggcccccatcatggcaaaggcccctcaaggggtgcatctcatctgctactcgcagggtaggtgccctccccctcccaagttctaagccctatctgaggcttgatccttatctgagggacacctgctagtgtccccttttctgaacaatattgtcccagccagagtcctactacctgagccctacttttctgacttccctcagtacctggatcttagctctgtatcctgagtgggagggagactccctgcactgttgcccccttttgccattactcatggctcttgcccatatgggataatggggctgtaaaaagcaccctacaaggagagtcagaagatccagaatccagttctggctctggcactttggagacatataaccttttgccacaggtttttgctttctctgggcctcagtgtcctcacaagcattgtggtggtggtggtggtggtgacaaggagtgcctgtccctaagtccctgcctaatgtgctggtctgcctccagggggcctggtgtgccgggcgctgctctccgtcatggatgagcacaatgtggattctttcatctctctctcttctccacaaatgggacagtatggaggtgagcggggatggtgagccccatagggggctctgagttttggggacacaaaggtttgggggccacttgacactgctgttctcttgtcagatacggactatctgaagtggctcttccctacctccatgaggtctaacctctaccggatctgctatagtccctggggccaggaattctccatctgcaactactggcatggtgagtaggggatgccacactgggatgtgcatggagaggacacctgggcgtagggcctgcggcttccctctgtaccataaccagcagcagcagtggtaaggatgacttaccatctgaataggcactgttcaaaatattttctgtctattaccttattgcttcagagtatggtgtggggcaggggtcagcaaagtttttctttaaagcaccagatagtaaatatttggttttgcaggccatgtagtctctgtcacaaatataattctgccacagtagtgtgaaagcagccatacaccataggtaaatgcgtgtatctgtgttctaataaaactttatttatacagacaagcagtgggctggatttgccccatggttcatagtttgcaaacacctagtatagtttttaagacaacggatgctgggtccagactacttgtgtttgaagcctgaccctattgggtttctccggacaagttacttaacctttctgtgactgttttctttatctgtaaaataatgatatagtactaccctctagggggttgtgaagattaaataaattaacaaatgtaatgtactttgaacagtacctggcatagaaggtggctggataaaagtgtttgctctcgtgtttacaattattattactgttactattatattagtattcactttgtctattaccgtaggcccctgattggtcctctggcctctggtcttgcttcttttccttgcttctctgactgtatagttctaactgctgtttatatctagacccccaccatgatgacttgtacctcaatgccagcagtttcctggccctgatcaatggggagagagatcatcccaatgccactggtgagacccaggctcctatccggtcctgtttttgcttctctgacccgctatgtttctctctctctccaacctggcctgacccctgtgactgactcttcttttcttttctcttcttcccaattttcagcatggaggaagaactttcttcgtgtgggccgcctggtgctgattgggggccctgatgatggtgtcattaccccctggcagtccaggtaataaggaactgtgtggccggaagattgactaaggacactccccacccccagcagtttttatctcattcctgaaattggcctgtatctcccactgttcagttcatgccctaccctctatgtatcctgtgaccagaacgtgggagtcatcccccaactccttgtatccagccagtcattaagccctacagactctacttcctctccatccctaaaccgctgctttgtaaaaactcttaacttacagataattacagattcacaggaagtggcaaagatagtttagagaggtcctgggtatgtctccttctcccggttcccccccatgattgcatcctatgtaactacagcacgacatcaaaaccaggaagttgtcctactaagtaggatatgtgtgtatagttccatgccattttatgtttcctaccacctctttttttttttattaaaaatttttatttatttatgatagtaacacagagagagagagagagagagagagagagaggcagagacacaggcagagggagaagcaggctccatgcaccgggagcctgacgtgggattcgatcccgggtctccaggatcatgccctgggccaaaggcaggcgccaaactgctgtgccacccagggatcccctcctaccacctcttttacatacctggacttctataatatcctccagccccgtcccctccatcctgttcctcaggaaaatccatggctccatcgtgctatgtgttggcctatgttgcagatctcatgagtggtctgaaatgtcacctaagctactttagttgctcagcagatatttattgagcactgtatgtattcccaggcactgtgctaggccactgggatgcagtggtaaatgaaagagaagtccctgctattatgtagcttatgatctcgtgtgggagacagataataaatgtaaatataaaaaaaaaaaataaatgtaaatatatatctcgggtggagataagataaggtaggggaaggggggttggaggatgactgaggcctgtgtcagatcatggccagataagtcctagacgagatgccatttgagtagaaacttaaggaagtgaaggaaggagctgtgcaacaatctgaggggaaaacgactcagggaaagagtagcacgaacaaaggtcatagggcaggcatgagaaatgaagaggccagtgtgtttagagctcagggagcaggggagaaggtgggagaggagatgaaggaggtagcagggagccagtgatgtggagcctttgtggggtaaagtcaggcccttgattccttttttttctaaaatatacatgataaaaaatttaccaatttttaaaaaagattttatttattcatgaaagacacagagggagaggcagagacataggcagagggagaagcaggctgcctgcagggagccccatgtgggactcgatcctgggactccaggatcacaacctgggccaaaggcagatgcttaacggctgagccacccaggcatccctcaaataaaccttatttaattcttacttgacatataagaaaatttaggtgcaaatagctgaaataaggtgtctctattcagagtcagtaactggtgaagtcaggctatctaacttaaccactgggtttcactacctctctgcaagggaagtattctcgtataggacaaagaggataagtactacgctcagccacacacatttgggagtgtgtggcagagctggagctcacatccaggtctgtgtgcccctatacatgatgagatatagcccctcaacacagcctccaggccaccaaccagctcccccatgcttgcagctgtgcctcacctctgcacctttgctcctgctcttccatttgcctggagaacagccttgcctagtggagagtcctcactaggaagccctttgctgatgctctaaaactagagtagtggcctctctttgctctgtagcctattggactaaacactattagtgtttgttgtttgtggctggggcccactcactgcccatgccagttatcagtattactttttaaaatcttaaggcctttttattttgaagtaagttcatatttaaaaagttaccaaggtattataagacaaccttgtgtgctcttcccctaggttttctaaatgttaacatttcaccatgttaatgtcctcatccattctctgtaaatatatatatggggcataggtgtgtttgtgaaccagttgagaggaggttgtagacatgtctctttatccctaaaacttcagtatgtcagtgtctgtttcctgtatattctttacatatccagtacaattaccaaaaccaagaaattgacattatcctacatggatagggtcactgtatagaccttactcaaatattttccagttgtcctcctggggaaaaaaatccaatgcaaaatccatcctgggatcatgtgttgcatttacttgttatgtctctttttttcctggaatacttcctcagtgttcctctctgacatttatgtttttggagcgtatggtctagccattttgtagaatgtccctcagtttgggtttgtcagtggtttcctcatgagtaggttcgggtgacacattttcgaggggactctgcagaagtcatgctgtggcctcagtgtatcacttccataagctacatgatatccagttaaatatttgaatgtcttccttgctgcctgtttcaacaggctgtgaattcccgaagtcctctggcctaccttgattttctccagctctcttgataacttcctcccctgcccaccctcaatctctttgtagcttctttggtttctatgatgcaaatgagaccgtcttggagatggaggagcaactggtgagccccctgggatttcttcccacttcttcatgccctgtccttcctccctgccactgacactgaaaggttcaccctgtggggaggggacggggacagggacagcagcaggagctcactttgtttctccctgtctttctttgaccctttgctcactttgaaggtttatctgcgggattcttttgggttgaagacgctgttggctcggggagccatagtgaggtgtccgatggctgggatctcccatacggcctggcactccaaccggaccctttatgagacctgcattgaaccttggctctcctgaggatgtcctcagggaccccccaggaactccccagcccagagaccaagcggtggccttggaaagcagatgtcaggctctggtgtgcctctgatcacccattgctcccacactgcctgcaccaaccagggctcccaggaccccttcctcttctcctaaatgacaaatcctggtttcccccacatcacgtctggggtttgctctgtgctctctcaccgtcccaaagcagaggttgggaagagagaaaccaggtttttaacttgtggctgctcctgctgctgctgctgctgctccgtctccggccgaacaggaggagaacccagtccctgctcactacggaggtctccttctaggccactcaggacatttttagcttctgttctccccatattcccttttcctcagccctcccaactcccaggaaggactacccatgagagtggggttctgaggctcccctatggggacggttccgttcttgaaatgtcagtgttggggaatatctatggcccgtgaggcccatctcaggtttggggatcccccagtccctatgttcagtgttggggtaccccctgggagcctagtttctttgaggccccagcccctcttttagctaccattgaatgggtgttaaccctgtattaatggaaataaagttccatttcttcagtgtggcttgactcatttccaggtgaaggggacccggctccccaaggagggtggagatggagagcctgaggtctgggtgcccggatgcctggtctggggtgggacccccttggtgtttccgctctctaaatgcccattctgtgtgggttcctgattctctgtgggttctttcctgcagaggacaattctcttcctgtcccagcctaagcttgggggactgagcccagggctccagtggcttgtgcctcagcctcatgggtggaatgtgcctgctacccccaggctagatgagggggctaagggtcagggtgggcatttgttgcacccctttatgacctttgtaggccagagttgggtgaggggctggacaatgagcctcctcttccttgaaagaaggaattttggtggagacaatagggccctgtctgctctggcttggggggcggtggcagactcaactcgcccccaccccaggtcctaacaaatgtcatcaaggaatggggggcaatttccccataaggcattgggcacctccccgcccccctcttcctttctttcttcagctgatcttgcctcttctcccatgacctgaccctgctttcctctgccagctctgtctctctccctgcccccacttctcccccagcctgtgttgggttgaggggtgtggcaagggccagggggaccagtggtgtcatagagccagtggcctctgccgatttggggagtgtaggaagaaggagcctcggagttggaaatttacttctgggggccctttgctggggcggttgtgagcgttgtgggacttggatcccactgagcagttagagcaggagctatggaggacgcttgtgggagggggcggggaatgggaggattgtctggcccagccccttctctccttcccagcctgccccacccacccaccagtctgagctgctgctgctgaggctggtctgctggagtctccggaggaaaagacaggtggggagaacatgtcactggaggatgagccttagaatgtgcgttgggaagtgttgtgtgagtgaggggtgctggtgagagaggcagcagggataggtgcagtttccaggtccatggtttggggtgcaggatatgagtattcgaggctttgaatcctgtagaagagttaagatagaagagggtgtgttacagattggagtgttgtggaggaagagttagctgtggtgtagaggggaggggagggagtgtatgggggcgtgcacttgcaggatgctacagggaccgtgtgtgctggatgagggggtccccttccatatacacacaggtgtagacaatcctggtggctagtgtaaatgtgtacaaataagcatgctgacttcctcagagcgcactatcagactgctcttggaggggctggtgctgtagcagtcacaggagaggggaaggacctccgttaacctcttcttgccagcagcctgcagtttggagtcaaggagaatcatggcgtccagggatgagctgtacaatctcttaggtggactctcatccctcctgctgctgatgtcagtccagggggccaagggtggatccctcaaagagaggtgataacacagggggcagggccaggggtgagggctttggaaaccctgctgggggtggggggaatggcaaaaccatggagtatagaatgggggtgaggctgtcccctccagggaggggggggcctcggttgagcttgagggtagtgggattcctcacccccagggcctggcccacttagtgtctctcccctcctctgcatgggtgcagtcagggggtctgctccaagcatatgctggtggtccccctccattacaacgagtcctacagccaaccagtgtataagccctacctgaccatgtgcaatggaaggcgcatctgcagcacctacaggtgagagatcggagcctggactctggagtctttcaagaagaagttcaagaacccagaccaaagcccataaaccactgttcagaaccaggcctatgttctaggaccacatatcgagtggcatggagggaggtgaagagggaggtgcagcagacccatgttgtgtgctgccaaggctggaagaagcggcatccaggggcgctcacctgtgatgaaggtgagactgggtcttcccaggcctggggacaggggtgcgctgcggggctggggaggctggctgttggtcctgttttgaactgcccttctgcacccacagccatctgcgccaagccctgtctgaaccgaggtgtctgcgtcaggccagagcagtgccagtgcgccccaggctggggtgggaagcactgtcacgtgggtgagttcccttcctcctccagtggtgccaggacctcactccccttggggcaccagctcccccccccccctcccgcttcagccctctcctctttctgttaactagacgtggatgaatgtaggactggcgtcaccctctgctcacaccattgcctcaacacggcaggcagcttcacctgtggttgtccccaaggtctggtgctgggcccagatgggcgcacctgtgcagagggcaacctggagcccccaactggcaccagcgtcctcagcgtggcgggtgagtgggtggcagtaggggtgtcagtgagggcccgggctcaatggcagcgggtcacgctgctcccttttgtcccagttcgggaagcagaacatgatgagcacgccttgaggcgggagatttgggagctgcgggggcgcctggagcgactggagcaggtaagggtagatgcctgggccaagccccctgggtggggtgtgccccacctccaatactcttgaggtgtcttcctttgtagtgggcccgtcaggctggggcctgggtccgagctgtgctgcccatgccacctgaagagttacagccagaacaggtggcggagctatggggctggagcgacaggattgagtctctcagcgaccaggtgctgctgctggaggagaggctaggtgcctgtgagtcctcagtccctctctgcttgaacccccatccccctatggctgcccccagctctcccagacacctttccctagttcacttttctttcccccaaaccctttctcaacacttagcttccccatactgtccccagatagctacacttcatccctttctctggtaccctgtccctaatctatttattgctgggtaagagtctctgcagtaccctggcagccccaaaagtccacagccaatgtgtctgcctgcctccttgtcattcaccaggctcctgtgaggacaatagcctgggcccaggtctcaatcggcagccgataaggaacctctccagaaccctggccctctaatttatacagaaactggccctgctaatcctctgggatcagccagctggggaagtgcagataaggttatctggcaccaagaagcaatgagcgatggaaacttccaagagctgaaggcaggggggaggatgggtgccttgggcccacccgagtcttctggctggggcaggttgcctgggcgagaaccacttcaacgccttaacaaatgcagccagaaagtgcccagatctctctctctctcaatctttattctgtttcttgctgttatccagataattaataaaaaccaaccacacaaaactgggtctcgccctctccttttgctcccagcccacctccccagttgtgggcacaggtctagggtgggaggccagagtggttaatgccacagggaggaaatgaaaactggctcagagaggggaagcctcaaaagaaagagaaataaattaaaagccctcccaccccctccagccagggttcagttcctttccccaattccctagggagcagaagtgagtacagcacctgatgtctgcctcttcccttgtgtctagttacaatggtacagcagggctgcaggggactggattgatgccaggaccactgaagaactgtaccacagggacagggggaagcagaaatgtggagaccaaattggcatctaggagtatgctcacccctgggcacctgggtatgggcaggacgagacctctgagtaagaagagtccagcctccactgatgggaggctccatgggagggagggtgagggtgctgaagagtgttcccaggataagccaggaatgttccaggcatcgcttccagccacaatgtgaggagtcctcacaaatggataagtccactgaatccatggacttgtgggagggtattgttccatagcatggacgagtccactggccaatgtggggtggagagggagagaagatcacaaaggaagagggtccactggggaaaggatggtgtgttcactcccttgggtaggtgagccactggagatgagggggaggcaactgtcccacagacaagatggcacaggaggtgggtgggggtcagagtgtagactgcactgaggcaagagagtccatggagggagctgggaaggggcaaggagtggtgctgtatccacattcacttcagaagttgaagattccaaagagaagaacagtggggagaagagaaacaaggaagagggcttggccctgctttagggcccactgggctgggaggtatgggtggaagaaggggatcattgggaggggagctcagagccgggcctcgcccacccctccagacttcttcagatagtcaccactgccccggccatcagtggagatttcccggaaaacggtgagcatggagtgtcggactctgtcagccagagctgggacgtcatctggtgtcagcccttctgtgggcactgggggcagcacccgtacctgacatcgtcctgaggggggtggtgagcaccatcatggcctgtctgcctaggcctctgcccacaggtggggcacaatttccgagctctcctgccactccctccccaacctttctgttcgcttctccctaccctggacaactgcccctgtttgccagctgctacctgagctgaggccctcctgcactaagccgcccccgccccccccatccagacacctcagcaccctttctgcccccgttgtctcaatttcacttttactgccaagtgttatcatagccttgcacacacaggccttcctcctcccactggacagtaatggcccctcttgcagggactgagctttacccatatagcagggtatgttgggtgcttaataagtatttattagttggtgtggggtcacactggtgatcctttggacatctcagtcctggcactgaccaatcctccctctcatggggacatccccccagcctttctccctcatggcccttctggccacccccagccccaggtctactcagagccctcacccgaagtgaagcggcgctccttcttgcaatagaagtcttgataggaggacatgactatggggacaatgggaacctggggaaggggagaagcaaacagcccacagttcccttccaaggccccatgacaagcctctgacagaaagagatggtgggagccggcagcacaggggatgctcaggagcagaaggggaagtagtaattacctgggcctgaactgcaaggtggaaggcgccacgtttgaagggcagcatggagccattgtggtttcttgtgccctcaggaaaaacccagacccgcacctggggaagacagagaatcaagacatacgggtgtgtgtgtgtgtgtgtgtgtgtgtgtgtgtaatagttgtgacgctgtaatgggacctctgaggcctgctggccctgcatctcagtctatttacaagtgctctactccacaatgccccgaccctcctgttccacagggtgactcacgtcctgggtgagcagggtctgggcgacttctgacatgacactgatggcatccccagtgcgcttccggtcgatgaagataactcctgccagccagcaggccagtccagcggagccagcccacagcagctcacgcttggcaatgggtacacagcggcctggcagtacctccatcatccctagggcaaaggtaggatgggtgaaggccatagtggaggcaaagtattatgggaagcaggtcatcacccacactacgaaggactggagataaaggaagaggcagactgaaggaggggggtgggaagacctgagtggtggaagaggtgattaaacatatattagcctgtatatgagggtaagaagtcctgggggaagggataggggagccagggggcgacgtttagatgcgaggtaggtgaggacccccagaggagattctggggaaggaggaagggcatggctgggggaggtgtgccctatgagggatctcaccaagcaggtcgagtgagctctggtggttggagaccacgacgtagggctgtgaaggagggaagtggtgagccccacgcacctccactcggatcccgtacaggtatttgatgtggagcagcatcaggcgcaagatcctgtggggtcatggcaaggggttccagcaggacccactgacgtccatctaaataaaatgccttggttccccctactccactgtctttgcagtcctctccccttccttgtccttgggttctcttcaccttccctacaaaccccacatcctccccgtccactgctcactttggactcttaggttttctcatcacccaaaaccctttggccctcacttcatgttctcaacgttgcgtcctcgcacagcacacacagggatggcgagcacagccaggaagaggatccagccattgtagaaggccatcttgaagaagtatttggcactggggctgcagaaccacagggcaggcagcaggagcagcagcagcaggaggagcagcagcagcacagtccatacccctggccacaactccattctggccacctgcaggggacagggcaagggacagtgggccaggttcctggaggggaagtggagtgggcaaggcacagcaggcagggtttggggagctatgaggacaagggccagagatacaggaaggggtcagggctcccatctagacctgcccaggaagcctctctgggataggggtgggaggaagaggagttcaggactgcttgcctacccctctcccagaaatattcacaaagacaagagacacaagacatggacatctacaactcacaaatacatgataaggggacaataataatagcaacagctaacactcatagctggtaaggtcttaggatggtctacacctgactgtctaatacggtagccaccagccatatatggctcctgagcacctgaaacatggcctagtttgagtggagacgtgctggaagtgtaaaaatacacattagatttcaaagactctgaatgaaaatgtaaaatattcccttaataatcttctgtattgattacattttgaaatcttaacctttcagaatactgggttcaatagaacatatcattaaaattaatttcaccttgttacttttgaccttttttgacatatctaccagaaaattaaaatttacatgtggtttgcattatatttctgttggcttagggctggcctatagactatgttaaacccttaaaggggcgcctaggtggctcagtggttgagtgtctgcctttggctcagggcgtgatcccggggtcctgggatcgagtcccacatcgggctccccgcagggagcctgctctttcccctgcatgtgtctctgcctctctctatctctcatgaataaataaatacaatcttaaacaaaacaaaacaaaacaaacaaacccttaagtatgaactacacaatttacattttataggagagaggcccaaagaagttaaataacttacctgaggtgatatggctcccctaagaggcacctcctagtttaaacctaagcggcttgtactcctaaccacggtcacgctgctgcctgtatgtatacacacaggtatacgcaacagcaggtacagtgaagggccaaaacacccagacattctcaagaagactggcaagaataaagggtctgtcactaatgcaaaaacaaacacatacagtcatgcagagactgacctgctcacaccagaaggcaaacttaaaatcacaccttggtaacagctaaaggaatgtagtaaatgcataaccagaaaaccccctctccaccaaggtagctacctccacccctctcctgttcccagataaacccatggacataccagaagcagctacatctatcaatcctgcctccacaggcaggcaaacaaatccttctgctccctttcccccttctgcactggaggcaactgggtcaggcagatacaatatgtaaggcctgaccgagggggaaaaaaaaaggcagagtaaaagagacatcataccacctgctctgggagaggaaagaattcaggaggaagaggtacgggcacacagaactgcctctaggttcttcctccttcctccactctgccccactattgggggcagggtcagaagtcacaaaatggtgtttaggcaaatacctgtcactcccagcaaggctactggcactcccttccaatgacaagaaagtctgtgttcaaagtcccttgccaatcagtgaagggtaataggcaagagaaaacaggaaactctgccaactctgaagctgtaggctttgagctgttctagcccactgcccctgttaagtctggaccagcatctctcccttggactatttgcaatgggctcctaattctgctcttccaattcatcatccatgtagccgccacagagatctttctgtaacacagatccgagcatttccctgtcttgtctgcaggccccttagacaagttgacttctgcttccatctttggccccgcccccacaaaagccttttgtgctccaactccagttcctcaggcataccaagatctttcatgctactgtgctgcaaacaggctgctcccttggctggaatgcccttccgcctcttcacttgcctcacacagctgagcgtcacgctttggaagccttcttgaacccctcctggcctgagttttcattacacttttatcttgatcactggttctcaaagtgtagagatgcgtattcttggacctcgcccccgatctcttgaatcagaaattctgggccttgggcccaacaatctgtattttaacaagccctccaagtgagtctggtgtgcacacaagtttgagaaccactgatcttgacaccacagcgtacataactgctcactggcacttttgtttccttccctagtctgtaagcagcttgagggtagtaacgcccaatacctgggacagaaggaggcagagagggtgctcaataaacatttgctgaacagattataaggctggatacacacccacacagccataattaatgacagaaatgatcaggaatccgatagctacactctgtgaaaagataagtcactgagaaagcaatgaacataacaagcctaacagtaaccttctctgaatatacacatacaatacgcagtcacgttgaaggggaagcaccaacaatcaagatggcgcatcccatctcacacaaaagagaaacatacggaatggggattaacatgccacaggggagagatgctactgtcatcaataaatgccaacacagcaaaagagtgggggaacagaggaagtgcacagcagagctgaccctgtggcatgcactgacctccatgaacacaggctgtccacagccactggagagatcaggccaggaaggtcagcaaggtaaggcacatggggatggttctctggggaaacagaggccccgtcacctttttctctaatgtataacattaagtgacctcctctggagcagaaatgtccaaggacttataagcgcatggagtgccaaatgggttaatgtgcagatgactcacaaaatacactgccaataaaattatgaaataaatagtatgtgtacccagaagcacagatgctgtggaagggccacatcagtgtaaacatgataaatatgtaaaggagcatgcataggtatggtgtgaatcctgactgggaaaacacatgcagccaataggccaacccaatcacaacagaagtgtgcactagtccactaaaccacaggatcccccacacgaagactaccacacatgacaggatcatggacataataatatatgatacatgaaacaaaacaaataagggataacctttacatgcaaaagtaaacatgcaaaagcataaaatgtgcaaaaaacacaaaaccacacaatggatgcaatatataaaaactcacatttgaacaatgtcaagactggacaagagacatggacataaagataggagaatgggcaattctgatggacaataacatcgtttgtccacagtccacggagagcacagggagaggctagccgcacataagccactaaacatgtcaaaggcacacggactcaatgtagaaaacatggccccccacaaagcatctgtgtcagtaaggatctagtccagtgtggatggccactgaagaaggtcctgtgcccagatgaaacagaggtgtctgagggcatttctaggaagcgaattctgctaggggaaggagggcaataaaccaccttctcccggctacaacccctcaagagtcacgtggggccaaagggcaggaaaaggaactggggaaggtgtcaggaattccctcttcaggactctgtccacacccccatcccaaatgcacagggttttcggatctcctccgtctctcttccatccttcctccctcagggcccctctcctttccccagcaaacctctccccagtccgcctcccagacccaatctctcccccatcccctctcggcaccctcctcccgcctcctcccatccctttcccgcccccacctcagtggggtggggggcccggggagctggccccctccccagccaggctgcggcagcggtggtggcgggtggctgtgtctctgcctcggtcggggtgtcggtgccaagggggcgacaggatttgggggtgtcctagccccggccgatggaggggaggtgagagtgggaggctgggcccattgcgggaggaacggtggggggttatccccctagctccctccctccctccctgctgtctctctgagggctggggctgctgctgccgctatccccctacccctccccaacgcctgcgggcttccggggctggccaggaagtagggggcggtgatgggcggcccgtcttgccaatcgcctccccgaatcgaccagtttcctcggtggctccgccccgcgagagctcggctgggctttgccggtctccggccttctcaggctccagctgcatctttttttcctccaactccctttcagcacacatggctcgtgtgtcccttggtgctgtattccttccttggcccattccttcttcgtcagctctcctcttcctgggaatttcactcggtttcttcctttctccttaactcccttatctgctgtatattccctccaactcccgactcctccaaaaacctctttcctgttcccaactccggatatctgcaggtgtctactatatgccaagtactcgtctcctccccgtggctccacctccctggcccctccagctctcgctggctctctgacttttgccctccccgcacgcagtccggctccctgcttcaaccctctctctggtctttaaagagaagaggtactctcgggccctgtccctgcccctgtccttccacggtctttatttaacttcagtactttcgcttttcaatttccttcctgtcagtctcaatcactgaagctgagacagtgcctctccccaacatagaatctgggcgggcgcatcttttccagtagaaactgggtattagggttgctttaaaaaaaaatgagaaagaaacaaaaaaaaaaaaaaaaaaagagagagagagagagaaagagaaagaacgctagattactctgggacgagcatgcctcctgaattttgtaggcatgtatctgttccctgtccagcctctgacctcctctcgctcgtctttccactgtcccttaaaccaggatcattgcgttgctcctctccttggtctacaccccttcccctagaacttttctcctaagcctttcccggcatcctgtaccttcacttcccccgccctcctctcacctggcctccctggtcacgtgagacctttatctgggtgctgacctgccctcggcccgagtctgtccccgctgccagacacacattcgccctgctagaatttacacgccctgaggtcgaggatgtaaggaacactggtatgggaggactgttacctagttctgctccttgggccacagtgaggtcactgactgtagagaaggcccaagctcgggcctgcccaagtcccgggggtcctacccaggaggaagaccccacttctgcgggacacactacaggacggaaggggcgggcctaaccccattccgccgcgggtcgctcaggagggcgggccttgccccctcggcacctactcacgaaggggtggagctagttcgcttttcaggtttaaaacggggccggggtcaactctgtcatcctgtgtcaacgttagaaaggtgtgggccttgagatctgttctgcaagtcacctaaggaggagcgggctgcgtcccgcagccgagggaggtgggttaacaccagcgccgcaggtcgatgctcgcaccacccacacgtcgagctgatgccagttctgctcccttcttcactgaaagggaggggcgagccccagttctgccctctacgtcaccgaaggaggccggagccattttgagccctgcgaccatagcatttgctacctcgccaagctctcggccgtcttttccgatctcggccaatcagggctgcaagaaactagccaatcagcccggagagaccgcagtcggagggcccggatgaggcggcgctgatgcctttgaaccccaaagcccgccaatcgtagagcagtcaccacggcgacaagaccgcggcgagggggtggggccagagaaagccgagcactctcggcctggcccgccccttcccgccgcctgctgcgcgcgcgcactttgccgaaccaccatcttccgtcgagttccagccaatccagagcttcggagctctacgctccaaagtccaataggaatccggacgttctcggaaaggggaagtgaagcaaagaaagggctcggaggaggcgaggcctgtgtggtcccggaccaattgcttctggcccttggccctgactggcagctactcggacgaatcaagctccccgaccaggtccaacggacaccaattctgtcgcatggcgtcctgacggagacgcgcccgcccatcgtcgctggcaagggcaggcctgcgcagacctctccctaccctttgggccaatcctggcttttaaactgtgtgattgtcagccacccagaccagtagtgtttagacaacctcgaagcccgcccaacggtcgtgggctggaggcggtttctcgctgttggggcgtgtgtgtgtctgtgtgtgtgtttggggagaccgaggggtacgtgaaggcgaaacaccggccatggcagccgcggaggaggaggacgggggccccgaagggccaaaccgcgagcggggcggggcgggcgcgaccttcgaatgtaatatatgcttggagactgctcgggaggctgtggtcagcgtgtgtggccacctgtactggtgagggtccggccggggctgaagagaaatggggctcgccccttactggggaggctgggggcgggatggcacgcatacggatagtcggcgggcacatccccgtgggcgaggcccgaggtctctgggaatgtgtgggtgagagggtcacatctccacggaggagagccgtgtggcggagagccctaggaactgggcgctgaggggtgtgcagtggttaagaggcagcagggcggggtggtggtgggggaactacatctgtccaggtgagaccccagccgccttaccccggaaagtgacggtcttagttgtacaggtggagatagattagactccaaggttagaggaggcacgccttagtcgggtacgggagaccgagggaatgtaggatcgcatgcagatgagatcttggtagggagtggtatgacagacctgaggaccagggcactgagaaatgaaaggatggtggaaatagggacttgatggagcctagaagagaggaaaaggagtagtgggggcaggtgctagtaaagggggtttggttgaggagtgatgcgggcagggctggggttggggctgaaacaggagatctagaaagctctggttgaagagacctggacactaagttcagaggcagaaaagggaggggacatgtgtgttcaaggagagaagagcgttgaacctcggaggatgaatattactttagacgttgtaagatcagagaggtgggaaggccagattggctggcatggaataggttgtcaaaaacatgaaaagaaacagcaggtaatacctgggaagaggggtgcgatcggactctgaggtcaggttcgtgtctgtctttactgtagctagtttgaccttctttttttccccccatctagttggccctgtcttcatcaggtgcgtactcagaggagatgaagagggaaatggggaggtctgaggagttgaaaaaccctactgtgaactggaaaccacttcattttctccctcagtggttggagacccggccagagcggcaagagtgcccagtgtgtaaagctgggatcagcagagaaaaggttgtccctctttatgggcgagggagccagaagccccaggatcccaggtgagagagagggggtggtgctgagggaagatggactgcttctggcctgggagtggggcgtggagggggagaggacattccttgctgctagccctagccagtctctcattcctcagattgaaaactccaccccgcccccagggccagcgaccagcttcagagagcagaggggtgagtcttgtctgatttgtgttccttccttgccaaagacctgcccagttctcctctgactttctccacctccctagggattccagtcatttggtgataccgggggctttcacttctcatttggtgttggtgcttttccctttggctttttcaccaccgtcttcaacacccatgagccattccgtcggggtacaggtaagaagagccttccctcagctccaagcagggagccctctgagtcccctcaggccttttcccaacctaggagtggatgcttctcccacagctttcctttctcctacaggtgtggatctgggacagggtcacccggcctccagctggcaggactccctcttcctgtttctcgccatcttcttctttttctggctgctcagtatttgagctttgtctccttcctgcccacctccagccagaggagaatcagtattgggggtccttgctgacccttccttactcctggcccctccctcccaacccctccgtttctactggctaaggccaaccctggccactttgtaggagggtgtggggaggaggtgtgacatctgtgcagaggatgggagaaacttctgccctgaactcgctgcgtagcatcctaactcccagctctgggacaggaggacagacggaagaggatgtctgtttcttccctctcctgatcttttgctttcccccacatttgttgatttgatgttgaaagatgggcaaggctcccactgactctcccctactttacccctgttgacttaatttttctctccccagtgtctaatatgggttctgattcttaagtccttccttcccttcactacctcctttattataaattcaataaacaaggtgagatgtactgatgggagctctgcccacctttgtccttacccccttccttccaggacaggagcatctccccaacttgagtaaatatttgcacggtgtggggaagtgtgaaggctttcttcaaggctctgagggattcagagggtgagggcgtctctctctctctctctctctcacaaacacacacacacaaacacacacagaggcatctttctcacacacacacacacaggcgtctctcacacacacacgtgtctcacacacagtcatctcatacacaacgtgtctcacacaggtgtcacacacaggcatctctttctcaaacacaggtgtctctcacacacaggtctcacacacagtcatctcttacacacaggtgtctctcacagtcatctctcacaggtgtgtcacacaggcgtctcacacagtctcacacacacaggcatctcacacatgcaggtgtctcacacacacacaggtgtctctgtcacacacacacacacacacacatccatatgtgtgcacgagaacaaatgggtgaggtgtttacttatcactgtaggaggctctggttgtggaggcaagtttggtgaggtggggtacaggtgatacaggagagaattgctctggggacagaagagagcaagggggaagaaaagggagctgacagatggggtctggctgggcgcccctcatggccctgctgcaccgctctcagctgcctcgggctcctctgactgattcagctctgtgcgctcctcctcctcctcctcctcctggttttctggggccttcctggtggggagggggattggggagaattgtgcacatggtttctagcacttcatcattcctccccccacacccctccttgctgcctggaggtcccaaggctgagatgtttggcttcttccactcacctctcctgtctttggcgttgccgtcttcgccacatgatggccccgatgagcaggacagctatccccaggcctcctaggatccccagggccagggcgacagttcccagcccctgcccttccacatagcctgtggagagatgggcagaagtgagggcccagcccctaccactcaccattcctttgttgtcgaccatccccgggtcatgttggggccatctgtttccaagccctcacctgtggttggcccctctttgtctgtttctgaaagacaaagttagagtaggttagaagggagggtctcgatttgagagaaggctatttagtgggagccctgatggagtcttttctttcagtttcagaagagagaggaaacagactcgttgctctcttgggaggttttgcttggggcagaggaggtatgtgtactgaggaagggtggtaaggttctccagggtgggccagggaactggagtctgcgttgtcctttagcccagcctcaggggccctgggacttggagagagatctcctcaccaatgacgacactgacaccacggctttcctgggacccgtggctgggatgcatggccacacagctgtaggttccctggtcctcaggcttcacctcagagaggaccagcatggggctagggggaaggggcaggggcatgccctggggggagaaaggggacaggaggctatttattacaacatctctccccacatctgtacttctgtcttagtcttcatatcctcacatactctgccatctttcctagctcctgcctcccccatgagcctcctgtcctcctaattgccagtaatgtgtctgtctacttcccagcctcccagccccctctccaagtcactcacgtccttgatccagtggatttgaacagaggattgggcaggagtttcacaggtcagggtcacagtaccaccaggagctagcattccacctggctctaccatcacttggacttccagaggcacagactctggagttgagggcatgaagttgagagttatgcctgtgttggtcccagtggtcatgggcttactcttccctcctccctgagggcctccactcaccccagacgttgagctggatgggggccgcatgtagggctcgacgccggggaaggccagggctgaagctacaggagaaggtggggtggggagctcctccctgggctggggtcaccatcagctccgactggagtgtgaaaagccctgtctcagggtgtctcctggtctcctcctgcacagagactcctattgcggggaggggaggacaaggcaagatattccagggtgggtgtgggagaggggtcagagagaaagcagccaggagggggaactttgggacttacctttgccatcaggtatgaggggtttcccgtcccagtgccagctaagagtccctgcaggatagcccccctcagacacacatgtccccacctagggaaagagtgaccttcatcgtctttgaaaataagagattccgcacacatacatgcacacccccctccagccttatacccccttccacttctgaggatggcttcccttttctttaccttactggggacaccagccatgagttcagaggcaggattgatgatttctggctttccaggaatctctgaagtagagaaaatttcagtcagaggctgtagctttacagactcttccaccctgggtgtacaggttctcacacaccagggccaagagtccagggctagggttgaaggcttttcctgagaagagaggtaggccatggagatggccctggaactcttacggtagactcggacttggtaggtggacctcgtctcctttccatttctgctcgttgcccggcaccggaaagtcccctcatcctggatccctactgctggcaggaggagggagccattggggagcacacgcgctacactatcccagggacctccctggggagataggaccttccaagcttctgtccgacctgtgttctggggacagagaagagcctgaacagtgcaagtcctctgggaaaggacttgtgagacagagaggtggggccaccaaccatcactgggccctggctgtggggagcgggagctgtggcaggagccctgcttaccagcttccattccagctgctgcggtggcttcttgggggcccccctacagttgagcaccagcggcttcccgatccgggctgtgatgtttcggtcacctactactgctcctgggagatgggacaatggtggaggagtaggaggggattggggggccaacaaaagatgggtgagggagcttggaaagtagcgcttgggttccaggagagttctgggcagatttggggaggaggatgaagtgctttctgcagggaggattggtgtgagggttgtggctcaccccacagactgaggaccagcacccaggctcctgccgccgctgccgcccctgctgccatcgttccttcccaggcttctggctctgtctgccccttgctgctgtggccaccgtcctaggtggggcttgcaccctctcccctacccccatctttccatcctgtcctatccggccacggggaatgctaggaattcatgcttcttagacaagagtccttcaggtactaggagaaacaatgatcaccccacccttaggcagtgccagtctgggcacagccatgtccgtgggggttgggagtggacctcctaaggtttcttagtattcaggacccctaacccattccatcagtccactgagggcttgcctggtggacgatgggagccccatgttgcttaggtaaggttgctgggcaacagggttcaggcctggcctggccttgggggagggttgagggtgaaccatgggtgctcctgggtggtgagggtaaggttgggagtgggtagctggaagggaaaacaccgtttggggttttatgaaagaattttattctggggtttatcatgtttttgaaaataatgctcaactaaacccagggaaaaaagaaatttctttatttaaaactgcattttttttttccttttctgtgaaactacaagtttacaagtgaggagagaactgcccccggcccgtgcctcccaccctccacccatcacccatctaacctgctcccctccagtcctgcctgggtctttgacaggagaggttccccactatgacagtcttataaaatcctgaggatgtttgagggactcagatggtagggttctggccaaggatgggacactggtgatttgactttcccccacacctggctttttatgacatgcctcctctctccccccaccctcttgattttagactgagaaaaaaagaatgcctcgtttctggggaaattgagggagatacatacacaagcaccccaacccacatttaacatatttggcaataaccccctccctgttcttccctctccaatctgcaaataggttaaaaagaagacttaaagatgtgtcactcacaggggaaggtggcgcttcctcaaaattactgaatccagccctgcccaagggttgtgtgtttgtgtgtgtgtggcggggggcgggggggacaggtcaacaaaccactggctacctccataccaagagcagcaaagagctgcctgcataagcaaagaacacctaagtgatttgggggggggcggggggcaggcttggtgccctgctaagctaaacatactttctgatggacaggactggaaccaggtgggccttttcacaagttctgtttgttcccctttctcttacgacccctttggctatcacccctaacatggaaaagcaaaaaattaaaaaaaaaatcaatatatttataaaaacatctacttccccaaactaaaaattaagagccaattacagcaataaaaaaaaaaaaattaaaaagcacagatggattccagggtttcgtttctttacttaacaaaaaaaaaaaaaaagaaaaaagaaaaaaaaaaatcaagccctaagcccagtcaacaactccctaaagtagcagaaactccctccgaggtagatatctgagtcagacactctcgtccaccgaacgattctattggtttaagatgagctgcgtatgaggtaataaagccatctggaggggcagggggtagggaggaacagggctcatggcccgtgtcctctgtccagaagtcatgtccccagttttggcatctggtcaggcagggctggcttctccacagatcccagagcaggtaagtggggtgggggaggggggagcccagagaaagaaatggaatacaatatggtgggtagagcaaggggaaggtgatctgaacaataggactctgggctgcggggtttatgtgagagaaaaagactgaaaaaagggaagacagaccccactctccccttaggggaccccattctccctgccacgtagttagcacccccagcactgagacagtctggttggggacaggatgaccccattcgcccttctctgtcttgtgcttctcctgtgtctggggtttgtcctctggatgcctgcgtcctcttcaagagtcgccttgtgagcccccacccctctggccctgaggggcaagatcagttggaagtgtcagagtgaacgctccctggtccctctgtcggagatgtcactgaggacggggttacagcctcctgccagccaccgttggcctaaaaaaagagagagttggttggggcagggctctgggagattcagtgtgggagacaaggccaccaggggaaaggccctcctgtctgggtgagaggtagacagagggagcatcgggtatccactcactctcatttcccgagggctgtacatctggcctcccgcaaggttatccccgtagccccctggccccattgagtgtcgcagtgattccacctgcaggcagcaaagaagggtatgacactgtgaggcgtcttatattctgaagagcaggcaagagtttgggaaagccccaatggaggggacatgggccacctgacctgggaagcagagtaggaatctccgttgagccccggcatccccagaaacatgtctccggatcctgagagattgaaagagccgccagagccttgggagaacagagagggaattagggaagagtgtaacaacctgtgacagcagacagaaggctcactacagtgctgtttccaagaagccctcagaactatttctaagggggtgccactatatgcaatttattcctaaggcactacaacaaggaggagcaggctgtttctgagcctctcctgtggctccccggccacttgctggaggacagaagtagcttcgctgggatggcctttacctcctgacatctccaccccacctcagctaggtccctctcaccccaaaaggcccctactctgctgagatcctgcctagataggaagtgggaacaaaggcaggaagcgtgcaagatagccaggatgacagtggggtccacctgcagaggaagggggtgtcggggagctggtgcggctgtgacccccctgggtgactgacacggcggtcttgacggcatagatgtttgcctcctcttggaactttccaatatttttcttatagcgaatccgtttgttgccaaaccagttggagacctgttgggtgttgagcataaaggagggtcaggtgcagacctttccccccaccagcctctcagttagaatcagagagcttttgacctgaaccccactgctcctgcaagcctccccagtacctgagagacagtgattccgcacttcttggcaagctcctccttagcctcctcactaggatatgggttactcaggtgggagtagaaatactcattgaggacctcagtggcctgtttgctgaagttgcggcgttttcgtctacagaggagggagcatggtggtgagaaggccagctgtcctggcagggcctccatctcgcatcattctagagggggccattgccatggagcgccatgttgtgtcacatggtggcccaggggcttgggggaaccctgggtcaggggctcgcctgggcacccgagccccacctggcatccaagaagcgggaacgcaggatcatgacagcctcacaggtgctctgcttgagctgcatctggatggcactgaacttgcgatggatgatgctcaccatgcgctccatctccttgggtgccacaggccgtgtgcgactctgctccctcagcaggttcatgacgtgggtcgtgaactcgttacaggcctgcagcagggggcccgtgggctgtgaggagccttgggattccccattaggagcctctcctctcacccactccagcctcatctcctaacctgctcatacttctccagctctgagtggtagatgtggcggatctgggcaagtttgctgcggtagtcggagtgctcaatggagttgtcaggggacacgccgcccccggaggctgcagcagctgcagcagctgcggctgagcccccccctttctccggtccagccacaccctctgccagaagcatgttgtccaggcgcatgagctgtgggtccaccggctcctcctcttgggagcttcggatgctgaggcctagcaggcaggtgagtgaactcagggaccagggagcccatggccagctctcagcccacctggtggctcctggagacccatgttcccaggctctggttcccttcccagttcctcctagcatcttacctaacccctactgtcctcagggccccaagatgtcaaactcttggcctgactcctataaagaacagggttcagtccccagaggtgaggagtcagagggggacccacgtaccggttttctccttgatttcacacagaacactaaagagagcaggcttcatgcggtggcagttgagggcgtgtttccttgggaggaaggggagaacagttgagggtcaatagaaacagagatggggtggggttggggagaccatgaaggtgagaaagagggcagcccggaacgagaagggaggtagaaagtgggggtgggggcaggatggagttgggggcttcttggaaagaggtcagctcctggaatgtggagatgtgggggctgtttggctttaggaaggtgcaggcagcaagataaaggccccatgggcttgaacggggccctgggaaatgggtctagaaggggagtctgggggtgactgccgacatgagggtgactaggtagatttcagaggaaaagagacagagactgggagaagagtcggagtttgaggtgccagagaggggctggagaagttcaacataggtgtgagcggagggtcctgggactgaggaagccaggaggctctgatgatcccagtctggctgagcaggggccacgggctgggtggggacacatggatgctgggtcatggtggagaggagtggtaggagctttggggagggctgaggtctggagaggatggggtgggggtgggctggatggagagttaggaagacagcatagcaatttcttaatcagagagccagaacagggctctggagatggaaaagatgttccaggggagtatgggggtcagtgaggggttggggatggggttgcggtgagaccaccctgggttcccttctttgaaggcttcagggcctggtggtgaaggggggtttgagagggatggctcatcttggggctcccaggagtaaggagagaagaagctgtaggatcctggagggggtcctggagtggggggtgggggtggggactcccagaagattcttgtgaatggggcttctgttgggtctgtgtagggtcccggggtgggggcactcacttggcctgggcctcgtccaggctctggtcggtgatggtcattatctgctgcagaatgtccccgatgtcttgcttccctcggcctcccgggacccccccgctacccccaccggggtctccgccgccgggaggctcgccagggcccccgggctccccacccaccaatcccaggcccccgcggcccccgacctgaaggagttgccccaacatccattcaactctaattgatgtgtgacaacaactactaaagttaagtcttaattcgatgacttttgaccaatgtacannnnnnnnnnnnnnnnnnnnnnnnnnnnnnnnnnnnnnnnnnnnnnnnnnnnnnnnnnnnnnnnnnnnnnnnnnnnnnnnnnnnnnnnnnnnnnnnnnnnnnnnnnnnnnnnnnnnnnnnnnnnnnnnnnnnnnnnnnnnnnnnnnnnnnnnnnnnnnnnnnnnnnnnnnnnnnnnnnnnnnnnnnnnnnnnnnnnnnnnnnnnnnnnnnnnnnnnnnnnnnnnnnnnnnnnacgaatgctataagagtcgtatttattggtaaggtaagaaatgagttccgcaatccatagtgggaaaatattaccgaacatacagggctagaactgccaccgacgcaagctcgggacaagaagaaaagacaagagcccgggacacgagggcggcgcgggtcggggctggggggccgccgccggggctccgagtcggggttccaggtgccgtggactccggccgctagaatgcccgggttcgcagacagttccgttcatatttcttgtcctaatgactcccctccctgttatacttaattaaaaccaggaaaggggggctgggggggtataattagggaagtctccagccgctgcttaatgagccagtaattaaccagccagggaggggagctggcctctcgccaggctagggagagaggcggcctctggcctcaccttcctgccccccccgtacccctcccccacagccctcaacaccagtcttcttttagtccagaggataattacgtttattcgtacaaccagaacatcagactcgagcagcagtggggaggcggggtgggcagtgctaagtgtcggttcacagcctgtaggcccctcagtcctgggggctgggggtgctggtggtagggtgggaggatggtctgtctcttttgcaatgccctgtctcccttcttaatgtgtctcaaggccctaaccttgggagatttgccttttctagggagatggaggcctgagccctcagattctgccttatgggtgtctgactggggtgtctccacagctcaggaccaagacttccagccacttcttgggatcagaggagggggtgtccctcagtggctaggatcctctcacctcttcaaactgccgtgtactggcgaagggagtcaaatgaccatcctaccttgactattcccagggtttgtggacttttaccccctctattccccagaaaggtggatgagggtgatgaatattgagatttctcccaggtccttcagtctctggcgcccctgccaagcaggagaagagggcatgcaatgggctgcccagctttgagccccaggagtgcggagtgcctggtgggggggaggggctcaagtctcagcaggtatgtgtggggggccgagacctttgctcctccattcgacccccaccctgaactctcagcagcaactccaggagctcctgtccccctgggggtaggggaggctctgaccgctgggcttccatccgctggctctggagtagagggaagggaggttgtcggtaatattttaagaggaataggccctgaaaggagccaaggctgatgaaaggggtctatagggcacctgtgatggggatggaggggatcaggcctggcaaaggggtggatgctggggaaatgaggagtagggcccaaaagacaacaagggccaacgaactggcaagcctgggtcttgccttctggggaggcgtctcacctggtgactgaggatagtgctgtagagctgttctctctcctcaagaggccgaagtggggctggggctatgcttggggggttctgggggatgtggaaggtggctctttgctcctctaggcggcgggactgggcctcagccaccaaatccagaaggagctcagtctgtagggagagcagggaggcggagcagggccccagggctggggaaaggaagggtagggctcagagacccagagaaattggcagacaggaggggtggtggtgcaaggtgattaggaacttgtggtcagagctgagggggagtagtggggagttaggagatggagagagggcccacgatgggaatggccttggtaatgggatcaggaaggatgtgggcaccaaggtcagggagctccctggccgggtgagggtacctgtgtggcgggtccctggaggaggaggggacggaggagcagatcgccaaggcctagtggtggcattcacagggggccagtcctgctcatcctgatgggggccttgatgctgggagacatccggtccagtcaggcgggggagtggtgggccaacagcccatttcctctctctgtgtctctgttcctgcctcagtttgcccaagcccttccaagtcccctgaatcccctgtcagtacgtctctgccctatgtcgcatcacctccctttctcccagtgttagcctccccgacccagtgcgcagctcacctgttcaccatcctcttcctcctggggtctctcggcctccatcccctggggggagagaaactgatgggggagggatagctgggatttggaaggagggctggaactctaggttcctgaggggagtgggggctggaaggggtgggggtgagccaggggctggatgcctgggtactgagcaggaagctgggttcctggtcagcccccccactggccccgcccatccctttcaacttcctccagttctcttttcccacccaaactgcttgcttgaccgctcttgccccaggggaacacagagactgggaaaagctcctccagatgcagtagtggaggaggttcatggtggggaaggactcttggcctcctcgtctccagaggctcagtagacccccccaaggccaggctctgttctctccactcccctcctccccttcagctctttctgtcaacacaggaactagctacacaggaagtggttttgctcttcagagcccctctcccttcctcaggtccctttcctaagaggaccccaatgtaggctttgacccttccctgtatcccagtttcctgcagacttatgggaactgggaggggcatggttgcattgggaagcagaggactcagatccagggatattgggccatgaaacatgtacacatacccctagcagtggtgccaaccaacacacactattccataaatatggagttatcaaatagttatccctgccctctaggtgcttacagtctattcaggggacaagatatgtaccaaatgtgagccaaggggcaggggaaactttcctctggccatgaataaaagatgtaggaatggaatagggagacaaccacctttctggcttggtctcactgctggtcaggctggctggcacagggtgggagcaggatagagatattttgggacctctaaatggcaaccagccatattatgtttgcagctgagtggcttggagcatgaaatgtaataaagagatctggttctaccacttaatgcttgcagtctctggcaaataaaatgtctgtgcctcagtttctcagagcaaaatggagcttttttagcatctaccttactatagagttgatgtgaggattaaatgtgtaaaagtatttggcatatagggaatgctcaataaatgataagttactattagctttcaaaatgcctcatgcctccatgtctcaggcctatcaccattaaagaggagtaaccaggtttctgaaaggtggataatgtttgagatgctctctgcatcttcatcttgaggcctgaggaataattaaatgcccttggaagaggaggaaggtgtgtgtgtgtgtgtgtgtggtttctccctgggctaccagactcttgctttcagatgataccccaaattaacacagtaccctcaactctacttattcttgctcttgaaactgtacttaaaacctccatccaaagggatgacattgatcttagggcgcaaaattctgaaaacactatgtagccattcccatattttttcccatcccactcttaaaaaaaaaaaaaagttaacatttcagataagctttattatggggtgacagatctgaggtttttaaatagtgatagaggtgatgagaagagtggtgcttcatccctgtgatggtttgttgaagagggaagtggagagagtgcaaggagtcatcagctggagtggcctttggccccccacttcagcacctacacagtgcctggcatacagtgggcactcaataaatatttgttagccgtttgtgggtgctgggggtaatgggtaatagagacttccgttgggtaccatatacaggaaagactgtcttacatcttatatgtctggagttattggttccagttcagaggtaattccccaatcccactccacccttcggtagcccctcacccttattttctgggagaaggctgggccctcttccttcagcaccctaagccccttttccagggctataccttttccgtgtggaagagaatgcgtgggcgtacactcatttggggagggagatcataggacccttcacttttggggttccaggatcttagaaatctggagtccttcccgactgtcccatcatggatgttcacttttagagtcccgggctcgtagtgtcctatttttgaccctcnnnnnnnnnnnnnnnnnnnnnnnnnnnnnnnnnnnnnnnnnnnnnnnnnnnnnnnnnnnnnnnnnnnnnnnnnnnnnnnnnnnnnnnnnnnnnnnnnnnnnnnnnnnnnnnnnnnnnnnnnnnnnnnnnnnnnnnnnnnnnnnnnnnnnnnnnnnnnnnnnnnnnnnnnnnnnnnnnnnnnnnnnnnnnnnnnnnnnnnnnnnnnnnnnnnnnnnnnnnnnnnnnnnnnnnnnnnnnnnnnnnnnnnnnnnnnnnnnnnnnnnnnnnnnnnnnnnnnnnnnnnnnnnnnnnnnnnnnnnnnnnnnnnnnnnnnnnnnnnnnnnnnnnnnnnnnnnnnnnnnnnnnnnnnnnnnnnnnnnnnnnnnnnnnnnnnnnnnnnnnnnnnnnnnnnnnnnnnnnnnnnnnnnnnnnnnnnnnnnnnnnnnnnnnnnnnnnnnnnnnnnnnnnnnnnnnnnnnnnnnnnnnnnnnnnnnnnnnnnnnnnnnnnnnnnnnnnnnnnnnnnnnnnnnnnnnnnnnnnnnnnnnnnnnnnnnnnnnnnnnnnnnnnnnnnnnnnnnnnnnnnnnnnnnnnnnnnnnnnnnnnnnnnnnnnnnnnnnnnnnnnnnnnnnnnntcagtcctcgggccgctccccgccccacgttgtagccgggcggcctccaccgcgccttctcgggcggccaggaacagcggcgtctgctcctgcggcgcgggaacagcggggggcggggcggtcggggcgaggccaggggcggggcgagggcgcacccaccgcgcaggcgctcccggctccccgcgccccggtcgccccggtcgccccgccccccccccccccctacaagctctccgcgctctccgcgctccctcgccctgttttgttgctcttgtggggaccccgtcccggtctgaccctgccgtcctgggcgtccttgtcggctccggcctgcaggaggcagcgggcggcccgggcgttgttgacggcggcggcccagtgcagcgcggtttttcctgggggacgacgtgggggactgtcagcccgagcccggggaccagacgcctgcgtgtctgtttcccacggactccggttttgggcctcggggcggcctcaaaggcggaagcgttgcccgggtgaccgggtgaccgccggccggcaggaagcctagtgacgtcccccgcgcgcgggagggacaatgggacattgttctgggctgggcaggaccggagacctccccgccagacccctccccccacggacgctccttcctctgcctgaggcgaggagggaggggaaggggcccctaccacccaaaagctaggtgagagggaagcccccagtctccagtgggtccctcgggggcttccttttgtgcatcttacaccccacctgtgccacttttccagagcacaccaccaccctctccagatccgtaccccatttatctctggcccccacatctgcttgcgctgcaatcagttcttcaaccaggtcctccaccgccagcctggcggccagcatcagggctgtggtcccgtcctctgtccgtgcatccaccgcagtctgtctgctgcggagtaggagctgggggtccagagagggccagtgattccggcgtgtcctggactgctagctcaggcccgccactccaaatccatactcagccatctgttgtttctctttcagacgcccaatctcacatcatcttcctctctgacaaaccttaggggatgcttttgcccagctttacttaccagtttccctgtagcggccccagggtgcactgacctggcaaacctcctgagcatcagcagccacagcggtgtgaagaggggtgcgccctgctctgtctggctggttggggttggctccagcctcaaggaggcggcgggcagcggttggccgggagaatcgggcagccaggtgcaggggggtctccccagtgcccacagtgtgagcctggggacaggcccctccacccaacagaggttcccagggctcagggcttcccaaccatgccccctggaaggtcctggactccacttccccacagcaaactgctgacatcaggggtgtcaccccatctgtgggtgggagacatgaggaatgggagacaagtcaatcaaaaggacataactggggaaggaggagaacatggaggctcagggagtatcagccccaggtgtcaggaagcccagctctggctcttgcttttgtgtggcttcagtcaaatgactttttttgactttgtgcttcggtttccttgtctgtaaaaggaccagtaggccttaattctttaacattccaaggcagtggttcccatccttgagtctgtatcagacttacctggggagctggtgaaaacatgaattccccagtatctcagatttctgagccggtagctctggagtggagcctgagaatttatgtttctaacaatttccctggtgatgctcattcgtctgtcctgggaccacactttgagtgtcactattctaaggcagtaaccctaattttggttttctcagttctaatatcaaaaggctttgtgattctaaaagagtcaaagggagctttcctttgcttggtctgggttggctcacataccaggtccacgggtgtccacgtcagggacatccatctctgattcctggggaggagtcagcatggctgcctgggggagctcctgacagtcactgctcagaggccagagctggcacttggagggtgaggccatttcttcagccttagggatcagaacaaggatcagtgaaggaaggtgacttgtcccttcaactctgccgtcacctcaggatcatttctgccccagtgttttcagcaggctcacctcctctccttcctcagggcctgagcacatcaccactccatcctcatcaacttctgcctctggcttcagggctctggaagagggtgtttggctagaggaccttcagggtccccaggatttccagcagcctgccttcctctgtctccttcctctgccatcaacttctgatgataaatatctccacagggaagagtcccctccccgagcccttttcctcctcactcttacttgaggcggatgctgtcttcacccaggggaggccggcgtctgcggggacctggctgcgttcgaggccttcgaatgaaccccgggggcagccagagggccccgtgctctctgcgccgcctccggatgagttgaaggacgagaagagccccaagggccaggagaatcaccccggccactggtgagcacagcaaaggccagggaagctggttggtgggtggtactggtgggagagacatagtcacaaaagagagaccatttctggggaggctgggtactactgtgagacctttgggcaagtgcagtgacttctttcatcagtttcctcatctgtaaggtggtaataataatagtacctgcctcatggcattgtcaggaggattaaatgagttgataattagagcaaagcctggcatgtagtaagtgctaaatgggttaggattcttctatgtactgtgagcggttcatcaaaccctccatcagagggatgattggatttagtagaggatagaccagataataaaggttaagtacttagggaaataaggaaggatattgaagagcagatgggccacgaggagatacaattggaagaatgagaggttccgggggtcagtctccacacagaatatttggggtccctacagtcctgtgtcatttggcctccattgctggttctgccatgaaagtgggtctgggagcagagtaaggggaagtgtgtgtgggggtcacctacccgtgccagcacgaggatgggcagccagcaggggtcctggcagcaggtgctccagggtccccaccgcagccattgcggcaaggaagcggagcaggagcccaggatcccagggacagcgggatgcagggtggtcagggccacagcgggacaaatccacacccatcaccaccacaaacctgtgggggaggtgcctcagagacccctgtgttggtccctggctcccttccttccacccgttaaaaaactaatgtccgccccatccctctgcccggcctccttacccagtgctgagagagtctgtctccttgcctacaggctgtgtttgaggggttactctctcctgatgtgaagggtccggggttcctcccagctcctcttcggcctgggccccaggatagggatacaccatgtctttgccatcactatccttccttacccagagccccactctcagagtcagggatagcactcgggccagggccagcagctgctggtccagggctggggggctcaggaccaccagcagggccagggagggcccccattccgaacccccatctttaggcctgcagtcacccccatcccagccacattccgcggtgttgcagcctttctcgcagtgtccgttgtggaagtgatcgtggcagtactggtcataggctggactgtggggtgaggagagggggactcagaatccccaaaggaacctgactcccttcctcattccagagagctgcctgatatattacactgcctctagggcactggttgctaaatggggaaagctctcgagcaatgggcttaggcaggccctgggtggcagatagtctagtcactctaatgtctgtgacacctttgtctccgaagactgttgcctctccctgccttcccaagctttcttatctccctgaaggagagaccaagacccttctccctcaggggtgctgtttgctaggggagatgctccgtggcacctgggcttagagagagaggcttgagctcagagctcccacaacctttagagaggagctcggacagaggcaatgcccttcttcctggtccccatgttaaatattgatgctgccctattccccagggctggaccctagtgtcttatacccctattgagcaacggttatttgggtagaaactccccagagcttgaggctgtgttcacactgagacccagaggcatctgtgttcttccccctgcctccccctgccctccacccacccccaaccccaagtcagggtttcaggctcacgtgcaggctggaggagtctcacagtcatagccatcaaacaaacactctgcagagtcacactgcgggtggcactgcccatcccggaagaggagccagcatcgggagtgggaggggcagcctttccaggggtccgggacccccagggagcagtctcccccatcccagtttcctccagggccgctgcagccagcgtcacaggccccatctccacctctgccctcacatccccttgctccgggcctctggcactggggccctggagagctgggagggcaggaacatcggaagcctgggggccccagcccagggatctctgagcaactgccattgtgtaggcatggagaaggagggccacagccatgaggagccggtgggttcaggcagtcagggcccccgtagccatcgaggcaggcgcagcggggtgggaagccaggtttaggggagggcagacacaggccaccatggtggcagtgatggaagccacaggagggggctctgtggctgcaggtggggccctcaaaaccctgtggagaggagagagatgttggggaagctccttgtattcttcatcccctgtctcgcccctgcaaagggttaagataattcagagggtcctagagtctcatatctggaaggggcctcagagagcatcagattcatcactttatatatgttgaaaccatggtccgtagtattttcacacaaggacatactacacagtggtgaaaatgggtgagccatagctgtgtgcaacaacttgggagactgagcccttacagagcagtagtaattaaactgagattctcttaatccttggacacagtgttatatacgttttctctctctggaagtagaacaggatggaggaacacagaagtacacatgagttactgttactgttgtaattaggttacgtttataggtgttatgttgtaaggataatatgaagaaggacatgaacacaccaatgatgttagtgtgtcatgcatctgaggtccataaacacatgcataagacttaacccaatatcatgcatccgaggtccataaacacacacatacacacagaggtgaaagaccttattcattgtcatccagcctgactttggggcctttccttaggcagtgcttatgatttctgaaaattccattcatgctaccacttgatcctgctttctccctcaactgcatctgaagagtcactcaccaccatgaacaggggctagctttcatgggtaattcccactccagtgctccctgggctcacctctaggatcccagctcaggcattctcacctggcatcagtgttaggggcaaaagagaagacagctttgtagacactcacctgggggcagtggcaggtgaaacccaggggtggtcctgctgtggtctcacaggaccctccatgggagcagggctggctttggcaggggtctgtctccacttcacaccactggcctgtggtggggtgggattagacctcacacactgctttggtcagtgcttccttcctagctcattcctgggagttgacccagcattaacctgcacaggtagagggatcctggggcatgttctctggggtggggtttagagacagggggatggacacaatgactaggtggggattgtgagcttagctgtgccacaaaagtgcctgcgcacaccctcccaggcctcacctgtgtatccaggcagacactggcagtagaaggcattggccagagaatggcaggctgcagtgcctgtggggtggcaaggccggtccagacactcatctacgtctccctcacagcgcagccccacaaagcctggagggcaggtgcaatagtagcctccaggtttgggggtgcaggtcccatggttgtgacagggctgggactgacaagcgttggattcctttgagcagttctgtccattgtagcctggggcacactgccggcaaagagggtcagacagggaactagtcatttgggccgtcccaacactacgggggacctagctcaagatcctttgccctgtgtcccgtccccaccttccagttcaaaacatcattcaactcaccatctgtcacagccctgtgtagctaacccttccatctcaactccatgatacacattcagtagcatgcaacttaacccctccagcagccccaaagcatcctatgacacattgccactgaggtaatttttggtaagacctccctcccctagccacacctccgccaggttctttcaggctttactgattaatttggaagcatttattgaatgcctgctttgtgccaggctctgttgtaggcactagggatatgaagaaatttagaactcctccctgctctcaatcagccagaggcaagagaccactagcatgtattatatgattctcatacacaacctcatgaaactctcccccaaaccctgcatgtgtcttatctcatttgattctcactttacagaaaagttgactgattcctggaaagactgagtgacttgcacaagtctggtcggtggcagagctgggatgcagcacaagtctgtgacttcctaaccagtaccctgaagccttctgggtttgttttataccactctgccaggggggagggtcattgatgaggtctgtaccatgtgctgagttcttgcaagagcaaagagagtgtgtgagacacactaccaggaaagcttcagaaaagtgaagaaaacgggaattatggagaatccaaggagtggccaaagggttgggagaagcaggcgagcggggtgttttggggatgtctgagggaaggagtctcaggaaaggggagataaagctgagtattgggcacaggggtgtttactactaattagtacccttcttttgtatatgtttgaaaatgctcatgataaaaagttaaaaaataaaattgaaaagttaaagagaatgcttaggggatctgcatcaggcttttttatccagagtcagggttttttttctttctttctttttttttttttttttttttttttgagatagaggttatgggggagacacagtgggagagggagagagaggatcccaagcaggcttcaagcccagccaggagcctggctcagggctccatctcatgaccctgggatcatgactggagctgaaatcaagagtcagatgcttaatcccaaagttggggtcctgagtataggtatcaggctactcagacttgaatcctagctttgcctctgttgctcagtgaccagaaccaccaaagagaagcccaaacccagtctggagagaagctagggacattctcctgaggaaggcacctcttgggcaccatccaatggaagaggtatggggaagggctggaagagccagtagatggggtgtgtagggaagccagtagcagctggagcagagagaaggagggtgggggtggggcgagatgagacctgagaggtgggcaaggctgggtcacgtgggttttgaacttcagggttagagaggtgggcagccactgaagggagtgacaggtcaacttaaaattttcaacagagcaccctggtaacagagtaaaggctgagcctacaggccgacaaatatggagctggggacagtaatcctcagggtgaaggattactgaggtaatcctcagggtgcccaggtggtatgaaacaaagccggatggagcagtgggacaaagggtgaaggaggaaagacagagtggtgaaagatttaggaggcaaagggcatgggctggtggtaggttggatgtgtggggtaaagaaaggaaaggagatgactatatcactgcccggcccaggtacttttcccacagctggtccccccggtcacccctccccgttgttcttctcaagacctgcttacctggcagagatacccattgggctgggctatgcaggtggccccatgttggcagggtctggactcacatgggtttaccctgtcctggcaggtactgccttggaatccaggagggcagtggcagaaataggaggagccactgtcaatgcagaggcctccgttctggcatagggaagaagctgctgtgcctgaggagaaaggcaaagagggatggaaaaggctcagttgagtggaaaggttctcaggggccacagaccctgagctgagaggctcttggagatcgcgaacattcttggggtgggtggaggctacttgaagcctgagccctcagtaactcctggtgctaagaagttataatatcaagatccccctcctgcttgttctgccagaatggagagagaggatctcttgttaagcttattagatcatcataagcacccatatccttggtttaaaacaagtctcaagcaagaaggaactcaaaggaaacttcaggtgggggtttaactaatgacttgggtctgtcccctgaatttgcatcctctgatgttctcttgctatgattcccatcccctcaccccacaggaggctccttcctgagttctgctcatggtcagcctcatttggttgagggaggtattctttcacaaggggagttgacataacatcagagtgagtggggagcagctgttgagttgagggccattgggttattaagtatgatccactctggttgagttatgatgatagtgacagagttcagttgcttctcattgagttgtgtccctgtggttgtttctttttttttttttttttaatttatttatgatagtcacagagagacagacagagagagagagagagagagaggcagaggcacaggcagagggagaagcaggctccatgcaccgggagcccgacgtgggactcgatcccgggtctccaggatcgcgccctgggccaaaggcaggcgccaaaccgctgcgccacccagggatccccctgtggttgtttcaactggagtcttattggctaaactggttggtgttgctagagttgtgttgagttgtgttaggctgccctgagggttgagctgtagaatcactaatagtgtttgttctgtgttactttgagtcttagttggttgttttggccaagtgttgtgtgtggatgcctttagggctcaggtagagggggacacccttctctctttgtttgctccccacttggtccttgggttagtaccttggctcagagcagccttctgacagaaggacagtggaaggttgcagagaggcccggtccatccttggaggcacaggcactggaaggagggcccagtctggaggcagtaggaattgtgtggacagggcttctgggcacataaatccatcagagtctgaggtttgggaaggagcatgagacagagctgaatattatgttttgaggcccagggatggtcttctaccagcttctcaaaatcctaagctctcagactctctcctgaatggtctggggccaggtgatagcccccctaccccaccctggttttctttgatgcccacatcccagaacagtctctgggatcagagattcttttgttcctcctattccttgcaaacctcaagctggacctccactcccacatcctaaaccccctttcacgtgggtacctcttccaagctcccagttctgtcttctagtcctggagaccctccactagagccctccagccaccaccctcctcagcacacttggcttagtgcccctcctcacctggcaggtgcctcccgtgtagccaggggagcagagacagtggggaccctgagggccatcttggcaggttgccctgttcctacaggggctggaacaagacagacacagagcacagtgggaggaagtccaggccatcaaaggggagggaatgtgacgtgatggtgagatggggagccaggaagggaggcagtgtgaaaggatgtggggtatggaatgtgaggcagcctctccagaggagatggagaggcatggaggccaaggggccaaggggccaaggccaatcttcctctaggggtctttgctcacttgtctgcgcagctgggacgggtcctttcctcacagtgggggccctggaagcccgcagcacagaggcaggaggaggtgccaggcctgttcacacaggcacccccattgaggcacggggctggagagaggaggctgtgaggggttgggttccttgcccgtaacctggcctgtgacctcagtcacaccacacacaggacgtacatgccctccctgctggccccatcaaaagagcatcccataatggtgctcaattaagtgtttttcttatagcatagacacaccctgaccaattcctctctcctctgtggcccagctgaaggacacagcaggcactcaccagaggcacagtggtcagtgctggtctgacagcggggcccagtgtggcttggagggcaggtgcaggaatagcccctagggctggggctacaggagccaccgttgagacagggccctgagtgacaagctgtcacctcctcgctgcaggtagggcctgtaggaaatgaggaggttctgagaaagggaaccctcttctctcttgtcttcttctacctccctctccttccttttcctcatccccatccctgttctcccccatccaacctcttttctcaccaccttctgcacatcacctgcattccctgcagtctctgttccattctccttggtggtgaccaagacccagagtccttggacacatgtctttactgctcttggttagagagtagccagcccagaatgcctgtggtttagggagggcctcacctgtgtggcctggggggcaggtgcagttgtagccagagggctggggatggcaggtccccccatgggcacagggcacggagatgcagcctcccagctctgcttcacatgctggtcctgtccagcccacatcacacacacatgaggatctggtcataaagagaaaggggagagttttttcttctagtgtttttctctatcccctccccattggtcagccccctaagacctcttgttttttagccctgacactctggctcctttcttcattggctctgcactcagcattgtcccccttccataatatacatgtgaacatgtacatatgtctctcataacttgtttattgtctgtctttcctcattagaatgaaagctccatgagaacagacatgttgtctcttttgttatgtgtggttcccccagtgccttgaaaagtatccacacatagcaggtgcccagtgtttgtctaatggatgttgagttggccctgggatttggtgcttttccttctgctctcaccgcctacccctctgtttctcccgtgatttatgaactccctcctccatgggatagcactcactagttgcgccttcatgttggctgtgacctcagcactttgccatctccttcctcttccctcttggtcatttcccaccagcttgcccctcactgtctgtcttctcctgccctaactgaggaggacccagaggacagtaaaaatgaggaggggctggaaggttacctctggcaatgtccatggtggcaggtgcagttgtcctcaatgggggcacacccagggcttccatcagggcagaggcagtgggccttgtcctggcatttttgcttgggttggcacaggctgggagcacacaggggaacctcacagagatgacctggggtggagatgggtcaaagagaaaacagagtccctccatatcctcaatgggaccaaagccacttcttacatatgacttgcttactccccatgaacctgtgcttcagtggttccctgctacctcaggctaacttcctcagaatgacacacagggccctgcatgacacgattttcctacaactgccgtgctcctcagtttcactctgttgcaccctaaactcaggacgttctgtggttccttaagtggggatgtgcttttcttccgtccacacctttgtgcatcagttacctgcagctaaaacatgcagtcattctattttgacaaactcctacccattcttgaagactcagcttagccatcacctcctccatgaagctttctcatctctagtctggttggctggtcctttgtgctcctattgaatcctatgcagtcctctctcagagcacctctgggccattgcccagaagagacttcttggtctctctgcactatatttaaagccagttgagagcagctttcttactctgcttatatctgtgtggggcataggatattaatacgttcttgctaagtaagtgcacagatggcttccagtttctgaaccctggatcacaccattcctgtttggcccagtttgggttctaccaatgacacctgctgtcagcactcaggttgcataacttggaggagttccagtctcattttcttctcacatcccaaccctcaaatgcccagcaatagcctctgctccaccccaaatgggctcaactatcctgccagtcctttctaacgcctcccctgctgacctgtgaagccagaggggcagaggcaagagaaggctccggggagatccaggcagctggctccagtggggcaggggccactcaggcactcgtccacctctgcctgacagtgtgggccttcaaagcctatggcgcagcaggatagtcagagggctgcatgcaggtctgccctttgcccccactctcccctccagtgtgtgagctctggtttacctgggagacactcgcaatggaaagatccaggctggtcctggcactgacccccattggcacagggagagcttgcacactcattgatgtcttcctcacactgggagcctgtgaatcctggtggggcaggaagcaagtggggagagattgcaaagttgtctccctccctccctcccttccttcctccctcccttccgactttctctagagttattagggagtttgttacaaatagttgtgactgagctatataggtatgatttcatggattcaaacaagaaatttagagtcaatactgatctttagccttccatttacatatatggaaataacattgctacaaattgcaatggagagaatcttgtttccaatggcttggtttgggggttcgtctacatgtttcattatatagtgaaggcaccaattgggggcttctcaagtagtgatttgggtttcagaacattaacagagcataacttggtggctttgttcttcacataaataaagcataactggatatttgtgtcaatgctgaaaatacattgtatcaaaagcataaatgcaagtcctggcccttcccctcaacagagtgaacctggaaggcttcccagagcagacacctggagatgccagcaggatgatgctcagccacctgccagctgtgtgactttgagcaagctactcaagctctctaggctccagttccctctgtaaaaggggaataatgcaacctatcttatggtgtcattgaaaggtttaaacgagggaatgcctgaaaagtacacaaccaagtgtaaatagtaatggagtaaataatcaaggaacatccattatcatcatagcagggaacagagggatctgatgaagctgagaaggaaggcctggggcagtgttcgctgtatccagggtgaccagtgccaagaccagcccaggatccctaggaacagggagagcctactgaggactctggaggagggccagaaagggtggtttaggtaaatatgcactcaccgggcaggcagacacagaggaagctgttgagcccgtcgtggcagtcagcctggttcaggcacggagcagaggcacactcgtcagtctccacctcacagaactgcccttctaggcctgaggacatggaggtgtggtgtgggctgaggctcagctgggttggactgactgggccgctcaccccttctgccaaggaggcctgggttctagaaccagcatgtgccctgtcaggcagcccctcccagggtgctctctgactgcgggctggggagatgagcccgcagtcctgctaccctgctgtgtgaggctctgccttcttcagatataaaggctcagggagcacagcacctgctggggcctgtgggagccgcaaggaggtaccttttggggccgtttgctgcacagaaggtgggctcatccggtggggctaatgagcctggaggtcctcatggcacaaatgagacaaatgggtatctgctcgaaggggagccaagccccttgttcttcctgagcaggcatttgggaagctggttggtcccagatctgtcctgcatctttgggcttgtcctggtatcattctcaccctgacctgaaactggctcggcctctagacctcagctgcctcccacttcttgcctggggcatcttggtaactatccctggcccttggattgctgggcagttttctccactttttactctggatgctgctcaattgaggaaggctgttttgtgtagtggctaaatctatggaagccctgggcttgaatccttgccccgttgcttactagctggacagctcacttaatctccctgtgcctcagttccttcatttgtaaaatgggcacagctacaatgctgacctcataggattgttgcagagatgacaaaatgcatggaagatgcttaggtggtacctggcactaagtaagctagtatttttctggtttcattcagcttcctgatattggctctgtctctgtgtccctggggagaactttttccctcttagaaccagcttggagggacacctgagaggctcagcagttgagcgtctacctttgacccagggtgtgatcctggagccccgagattgagtccccacattgggctccctgcatggagcctgcttctgcctctgcctatgtctctgcttctctctctgtgtgtctctcatgaatgaataaaattaaaaaggataaattgtatatagttcctacttccaggattctataatgctctgggctgaaggcggtgctaaactgcttagccacccaggctcatttatttattcttgagagacacacagagagcgaggcagagacacaggcagaggaagaagcaggctccatgcagggaacccaatgcgggacttgatcctgggtctccaggatcatgttctgggctgaaggcggcgctaaactgctgagccacccaggctgcccataaataaaatcttaaaaaaaaaaaaaaaaaaaagaactagcttggaggtaggtgcagccttgtggcatttatttttcctcttgcaccaaattgaagcatataggctttgggattttaagggtctactcaattactacaggggagagttcctctgattaggagggacattctgagttggcatgagcagaggctgctgctgtgctgccctttctcgaccaccttctgtctacagcggaccaggctgtgcactttacttgaccatgaaatgaatgcttccccctcacccccagacttgagcagtgcacaagctcattatcatctgtggcagcccttctcctaggaaccataggtttcctggagattttatctggggcagggagatgagaagcattctttggtaactgaccccaactggtctggggccgtttgtgttctgcaggggtcatgtctcgtgggttcaggatgagtcccctgtgtcctctacccaaggccccctgcatctagtacctggtgggcagagacagtggaaggtggcgagtaggtccaggcaggtgctgccggggtggcagggctgggacaggcactcattgtgatcagcctcacagcgggagcccgtgtagccagggggacagaggcagttgaaggagccgggggtgttgaggcaagagccgccgtgttcacagggactggggccttgctgggctgggaggagagaagagtcaggaatccacaggagcccccagtggaagggcaaagaggtcagactgccagggaaggcatgagggccagagtgtggcaggggagagcaaatcagagaaagagccagtgtctttaagacagagatgaactaactgggacctggagggctgagcactgctgtgaagaccgtgcagggaagagatgccagatccggacaaaatcagaagagagatggttatattttttgtttgaaagacaatttgcagaggctgcttggggggctcagagaggatctgatgcggggatgcctcacccatctgacactcatccaggtcctggtggcaggtgggccctgagtagccaggttgacaaaggcagagtgtggagcctgtcagggggttggtgctgcactgggcttccccgtggcacggctggctcaggcacatgtcctccatgtggcacaggagtcctggagggcagggtgggcgtgaggctctcggggccgcagctgccccagctgccctgctggtgcctctcgcgctcgtcatctctaccgccaactcccacgccctctggcacacctgtgcggccaggtgggcagaggcaggagaaggagcccacgcggtcaatgcaggtggatcctggggcacaggtggcagcagcacagtcatccaggttctcttcacagcctgtgcctccccagccactcacacacacgcaatggaagctgccagccgagttctggcaggtacccccgtttctgcagtgaaggggaccctgggtctcacattcgtccacatcttcagagcagtcccaacctgcggggggcagggtaggaaggggacaaaggctggagctgggagtcctgtgaggaggggaggccggggctgaccatctgggccgcaggtgccatgggcctggcttgcacgactcacctgtccaggcctctgggcagcggcaggtgtaggtgctcagcccatcctggcaagtgcccccattctgacactcgtgcccagcacagtcatctgggttcacctcacagcctaggcctgtgagacctgatggggtcatgagattagctgagggaagggaacctccctacccagagagagaggctgcaggtgaggacacaccttgggggcagaggcagagatggaaagtggaatctctccctggaaccagctgacaggtgcccccattgggacagccactaggggggcagggtcctggctgaagctcacagtgcggaccctcccgcccagtagggcagtgacaccagaaagatcccagggtgttatggcaggaagtgcccttggggcagggtcccgggtccaggaaacactcgttgatatcgtgttcgcaggcatggccctcgaagccaggtgggcagaggcactggatctgggggtgtgtggccagacacactcctccattgatgcaggggttggctgagcagaagtcctgaagctggcactgctcacctgaggcagagggcagagggggctgcctgtagttctgcacaaaacccagctcatctgagataactcagctctcactctggattatctctgtgtctgattttcatgtttccttccatttcctcccatacctgccttgccctgcttcaccacccctcgcctcggatttgccattctggaaaatagaacgtgtcgttgatggtggggatatggcagattggccctacctgagcaaatctgggtccttctagtggggacctttccttggtggggaggtgaaaagcacccggccactgcaggcaggagacttagcactgctgtgccacaaggctctgcaccctcagacggttgtctggcctctcttgtctgggttccctaatctttaggtggctacagggttccagatagtgataaggagccgcacctctcagccgtttgcaccagtggcaatggcggtggtggcccctggcactgagctatgtcagtgcctcctgagcatcgctctctttcctcctctcaatgaccttatgaagtgtggacatcagctgacaaccaaggacgtagagagttagtgcaagggcacaggtctcatccatggtgagctggcacccagacctggggaagggctcccagaacccctgctccaagcacagggctgggcaagttgccactgtgatccttcttgtcacacagcctggtctctcacccccaagtcctcagaattacctggacagttaaaaagtctccatgcctggagactggcacagcccagacccactaaatcagcctctctgggatgtggacatcagtatgtttagggctttccaggtaattgctgtgcctcagcaagtttgaggagctcccttctagtccactgctcacagagcacttccctacccatgtggccttcactgccctgtccagtcccctccgtcctggtaggtcagaggagccttcctctcctgaggcccttggctgttctgcacccctgcctacttcctcaggctagcataccctgctcctgccaccccccccactctccccacatccttgccccagggctgcacccttcttcccaggattgacacccattcctctctctgggtcagagcccttccaccctcattacacttcccaccagcacatctatccaggtgctgctctgggctcccactcctcagaatagagaccatccagatgaccataatgcagaatcctggaggttcccctccccgaccttgtactgggtatgttaacaccctctggctgctggacggaggggccagggaaacaggccagggtggtgcaccaaaaggggctatggcaggagacatttacggacaagtttggaaagacttcaacatttaaccatcggtgcagccatgctggtgaacgtcagtctcaggtaaatcgtcagcaagagtcagcttcttgattcgcacagcctctgtcctcagaagggctccctgtatctcagactccagctctatctttcccagccagctgctcctgtccccccccccccaccccgcttccccctcagtgctcacctgtccatccaggcaggcaggagcactgtgggcggcctgaggcctggatgtggcagcggcccattttggaacagaaggaagaacaggggtccttgagcagggtctggcacctctggccggtgaagccagaggggcaggtgcaggagaagctgggggccaagggagagggaaggccaggggagcctgggagggcaggaagcagggcttggcagctgcccccattctggcagagctgggcatcctggcaggggtcgggaaactggcaagtctcacccaggaagccaggtgcacacctgagcaggggaggagagaggacagcttactcactgggccctctttgccttctctcccacctccctcagagcctttacttcctctctttctccttccttcccagtcccccctccaccctgctctccttccccgttccagtctcccagtcccaggaggcacactcactggcaggtcccttgtccaggagataggctcaggcaggggcctccatgggcacagggtttgggggggtccccccccggcagcactagggatgataatgaggatgggatggccctggggagtactgggctccccatttccccctctgggggctctggagggacctgcctgtagcagcgggacgcgtgctctctcggacccctgcctttgttcctggtccccaagtggtgctcttgccccagtgccccccccccccgcccccccaatcccaggcccaggcctctagatcctcttcgctattaatccccaccccctttcctgtttatcctctggcctcccaagcccaggcctcccaagcccagcctcagactccatcccggaagccctgacaacagggctcaggagggggccctggggactccaggaaggtgaatggctgagacgttgaagggatttcctcccggaagagcccagcattgagccatcgggggtggggacagctggaccgggaaagggacttggtcctagagcccttgaccttcccatgtctccatctcttgctttcttgtcatcgcctcccctagcaggtggtcagttttttccctcttcacctcctaaacgccatctcaagagccccctgtcccagctgggttctctctgggagcgggcaccctcctagccattcctctgacagttaccgcccctggctcaggccccaaagcctgtttgtgcagctccggtggcagagtctgctctccctgcattgggcaagggggtgaaactctcctccatccagtgtcccctcaaagcaccaggcttggccctctgcccccaacccaccgacaccctcttaaggaaggtgggtcccctcactctcccaccccattgcctcacctctggtcttgacaaccgagtgacacagcaacagcagcagcagagaagggggctgcattccagagcccctgccccaaacccagatcccctcccacctcctcaggaaaggactctcagagccctcactggggcaggagctacctcccctgctcccacagccccttcctcctcctctgcctgaagcaagcctcacgtctgagctgtttcctgagtcacacaatgtcctggacaccctagtgatgggagggggaggagtggaggaacattgagggggatgagggaggggccttctgtccccaacaacccctggggaccggaggaatgggactgtgtggtggtagggcaggtgagaggaggggagcacagggcttggagtgagggggctctgggttcagccccagcccttctgttgtgtgggcttccctttctagagatgagaatagcagggtggctgcctcttgccctgggatggtcaggacctggaaacagaggtgaggggtgctgagacatcttctgctccaggtccgtatccaggctgctcggacaatctgcgactttctgtacattgaaatcactaaccttggcagagggagcccagggtacttctggcccttaccttagcccttgctgggaacttagttttcttcctttggggaatggggaagatactaggctgattctgggggaaatcttggcctgcctttgttggggaacatgtaaccacatcatcaatgataaatgaacattgtctgtactaaaatctgcagtccggattacccacagaaaacactacatttggatatgttccccttccctccctccaccacagagagccctaggatgcaagaaatgccagtattttatttttatttttttaaagattttatttgttctgtgagagagcaccagcagtaggaggggcagagggcaagggagagagaatctcaagcagactcagctgagtgcagagcctgatgaggggcttggttccacaactgtgagatcatgacctgagcttaaatcaagagtcagatgctcaaccaactgagccactcaggtgccccaggaacgccagattttgatttcaaaattggagtaaatagagacacctgggtggctcaatcagttgactgtctgccttcggctcaggttgctatcccggggtcctgagctctccctctgcctccctttcttcctgtgtgtcatgaataaataaataaaaccttttaaaaattggagtaaataaaatgacaaaagaaaattcattgccttgactcatcctacctttgtgagtcaacccaggatagttttggcgtccgtcacacactgagttcctctagtagcacttaaagctgagagtctgggtgacaggaggtgtcatcaaaagccatgcatagcccccagcactgcagtgcccaaggctgcagcctggtgtgcctgggataccttcctttttaaaaacctttttatttggaaataacaagctcacagaaaaggggcaagaatataattccagggtagttttcattcagaatcaccaataggcatcatgatcacatttgctttatcatttatttctctacatacagtgttttttttttttttctgaaccatttgagagtaagcagtacacaggatattcttttacttataatttacttataaacacatggatgtgaatatctaaagaacaagaacatgtttaacattaccacagtacaactaccaaaatcaggaaacttgatgcaatactataatctaccaaatttgccaattgcctcacaatgtcctttataatattttttttatagtgaaagggaaaataagggaagggagaagaaatgtgtgggaaatatcagaaagggagacagaacgtaaagactgctaactctgggaaacgaactaggggtggtagaaggggaggagggcggggggtgggagtgaatgggtgacgggcactgggtgttattctgtatgttagtaaattgaacaccaataaaaaaaaataattaaaaaaaaaaaaaaaaaaaaatatatttttttttttcttggttcaggatcatgccttgcatttagttttcatatcttttcatcatcctttactatgggcacagttccttagactgactttacctttcattatattaacattttttgaggaatgcagatcagcttttttgtagattattcctaaatttaggtatgtctaatgtttcttcagtttacgtactttgggccaggaattaccaccaaagtaaggctgtgtccttctctctttttttaaaaggtataataatttttatttttaaatacagtaaattaattaaacatgaaatataaggaaaagaacaaacaacatatttcctctgatgggtaataatgtaaataaaggaaattactaactagaaaaatagttgtactcatggttttacaaaatccttattaattttatgcataaataacactagaattcttctaactgcatgcttcatcaatattgtagatttatttttatttttatttatttatgttatttttttaaaaagattttatttatttattcatgagagacacacacacccagagaggcagagacacaggcagggggagaagcaggctccatgcagggagcccgacatgggactccatcccaggtctccaggatcaggccctgggctgaaggcggcactaaactgctgagccacccgggctgcccaactcatttttatacctaatattgttttaccatttgaagtttttcagtcattttggacatgatgcaattcataatcaagaagtatagtgttttttttttttttaagattttattgatttattcatgagacacagagagagaggcagagacataggcagagggaggagcaggctcctcacaggcagcttgatgtgagacttgatcctggatcctgggatcatgacctgagccaaaggcagtcagtcaactgctgagccacccaggcgtctcaagaagtttagtattaaggaattttactacattggatgctaatgtcatagcctttaattttggtattaaatttagaatagaatccttgggtctgcattttaaaaatgcagatagggtacacaattcatcgtacagatatagtcaatctttattattattattttttgaagttcgatttgccaacatatattatgactcccagtgctcatcccatcaagtgccccactcagtgcccatcacccagttaccccatccctgttcacctccccttccactaccccttgttcgttccccagagttaggagcctctcatgttttgtcaccctctctaatttttcccactcattttccctcctttcccttatagtgtccttctcaatgcagcacaccagaagacacacggactagcatcattcttagtggttgaccagtgccccactgtttggtgaaccctagttcattgaaaccagtttcccattgtgggggcattaaggtggatctcaaaccttaaaaatactataagctatgctgcaatgaagattctcgaacatgcatatttgcgtggttgtctaggttatttccttagcctgaattcctagaagtgaaatcactgactcaaagggttaaaggatagagttattttaaaagcttttggtatctaagtgttgctgagccactctccaaaaagcaaacaagactgcactggggtggtagtatctgtgcatgtccttactctagccagccctggggatctgaatacttactgctttgatgggtgaaatagtgccttgttttattactttttttaattttattttttccagatttgattttaagagaaagagagagagagagagagagagagagagagagagagagagagagaatatgaatgggaaggagcgggagaagcagactccctcttgagtagggaacccaacatggaactcgatcccaggaccctgggatcttgacctgagccaaaggcagacccttaacaaactgagccacctaggctccccttgttgttttaaattgtgttttgttgtagggctaacattattttcagctgtttagtggctattcttgtttattcttcttcagttgcctgtctgtgtttctgtcctgtgtatgtcattgtcagtttcctatcacctttcttaattggtggcaactgtggggttggagtcctgggcagaagaaacctagtgtgaaatgtccctgcttttgccaccttctggtttgctgatgagtgggtgggggtgaggtttggtgagaaggggaaggaaaataggaagggagactaggcttctcatgatactatgaagacctgagtggaaaaaaacaaaattctctatttcttccatgttcctgaccctactctttttgttgaaaaggaggtggtggggggcactagctacaggttgagagaaaagaaaatgtaatggagacagggaaggagtggatgggtggaagcggagccaggggcatgattggggagaagctgggtttttagacagtgttcagcaaggtacacagcccacttcttataccttctccctaaggaaggccttatatacctgctcaggtgttatgagctgtgtttggatcccagacactctccctggcctccggggtcttatggtccaaaagaggatcaatgcttccctaatagcttgtttctccatcccaggagatacagaaaattctttctggtataaaatgacctcattctttacaatatcccatcatatagaagtttgttttactcaactgacttttttttaacattgtatataggaggataagcttgccaatcattcgcacttaagtcctgtggacttttgaccttaagaggatccatctctgagctgggccttgataatgtgaccaaacacagagaagatagaaataaatacacaggagtcccaccctgagagattacttgcgaatatatagtttaggagacttggagacccttttgctctctcagacctccctttgcttcccagcagatgacttcttacctcccgaatttcttaccactatagtgtccatggtgcaatctctggaccttttctatttgttacctgtccctaggtagtctcatccagtctcatgctccggccagatttaagcatcacctgtgaatatcctttttgttgataactcccaaatttgtgtttctagattagaccacccccttgaactctaaatgtgtacttccagtgactcatgagtacctcaaactgatcatgtccagaactgaggtgatctgcctctccaaaacttctccctcccaatggacttgggctttgcatcctattctttcagttgttcaggcccaaatccttggagacattactgactcctctctcttatactctacatccaatctgtcttaaaacctatttggttaccttctgaccacttctcatttcttttcatccccactgttaacattctagcccaagctaccatcatctcttgcatctcctaacttcttccttgctgctgtcattgctcccttggcaatttgtctatgcagtggccacagtgagttgttaaaatacgagtcagaccatgtcactgctctgctcaaaactccccaattacttctgcacttactcagagtaaagctaaatttcttaccgggcaggcaaggccttatgtattggcctcctccctgtcctgccttgtttacctctctgacctcatctcctattattacttcttctgcccactgtgccacattggcctcctaaatgttctttcaacaggcacattcacaccttacagcctttgtacttgttcttccccactgcctggactgctttctttcccaggtatctgtatggcttgctccctaaacttaaaaggcctcttaacattcgtggggaaatatgaggacttagaatagacacaatgatttttgaagaagaacaaggtggaagatttacatttcccaatttcaaaagttactgcaaagctagggtaatcaaggcaatttggtattggcctaagtttagacataaagccaatgcaaaagaattaatttatggtcaattgattttcaacaaaggtgctgagacaattcagaaaagtcttttcaacaaatagtactggaacaattggttcttcatgtgcaaaagaatgaatttggacacttatctcacataatacacaaaacttcacttaaaattaatcttagacttaaacataagagcctaaactataaatctattagaagaaccccccccccccaaaaaaaaaaacttttaggagaaatttcaagagtaaatattatgatcttggattggacagtggtttaacatatgacaccaaatatgcaagcaacaaaataaaattttggtaatatggattttatcaaaattaaaaatgtttgtgctctgaagaacacctcaagaaaaatgaaaagacaagtgacagaatgggagcaaatatttgcaaattatatcagataagggacttgtatccagaatatgtaaagaactcataactcattcatgagaattagaaaatgagcaaaatatttccataggcatttcactaaacatgtaccagtgaccaataaacatggaaatacgctctttgggattcaccctgcttctcataggtctgtatcttttgccaaatttgggaatttctcagccattatttctttggatatcttttcctgccatggctttttctcctctccttctggggctttgataacatgaaagattttttgttatagttctgtacatctctcaacctctgctcattttttatggtctatttttttttaagattttatttattttttcatgagagacacagagagagagagagagagagacagagaggcagagacacaggaggagggagaagcaggcccatgcggggagcccgacgcagaactcgatcccaggaccccaggatcgcgccccagggccaaaggcaggcgccaaaccgctgagccacccagggatccctaaggtctattttctatttgttgtgaagattgagtaatttctatttttcctatctttaaggtcacggaatcttccctctgctgtttcttctggtaagcccatccacagagttttaaattttgatgatggtatttttaagttgaaaatttctatttggtttttctttttctcttcctcccttcttttgcttctcttcttcatttgctgagactgtttatttcttcatttgtttcaatagagttcataattcttttttgaggcatttaacatttttactttaaaatacttgctttgggatccctgggtggcacagcggtttggcgcctgcctttggcccagggcgtgatcctggagactctggatcaaatcccacgtcaggctccctgcatggagcctgcttctcccgctgcctgtgtctctgcctctctctctctctctctctgtgtgactatcatgaataaataaataaaatcttaaaaaaaaaatacttgcctgctttacatatgtatcagataattctgtcatcttggccatcttgagtgttgattgtcttttcttatttaatttgagattttcctgatcttgctatgacaagagatttttaaattgcatcctgggtatcatgttataattttatttaaatctattttaaccatatactctgaactgtgctcatagggggaaagatggtgacggcctcactgctgtcagatggggggagaagtccagggtcctcacttggcttctgttgacacttgtgggggccatgttaatactgctatgtggggttgggcattcaggctccccactaagcttctgccgacacacactgactgggagtgtgaagcaccttttttattgttcccatttggtttctagtaatattgtgatggaaggtgatttgttagcaccaggcagggctggaagtcccagcttcccacttggccttctctgacaccatgccagcagtcgggaggggcaccttgtgggtaaaagtgagtgtctagactcctcacttagcctttgctggcaagtgtttccccccctgtgatatttgggctggagtatagcagttactgtctaaaagttttattgtcggggatccctgggtggcgcagcggtttggcgcctgcctttggcccagggcgcggtcctggagacccgggatcgaatcccacattgggctcccggtgcatggagcctgcttctccctctgcctctctctttctctctctctctctctgtgactatcataaataaataaaaattaaaaaaaaaataaaagttttattgtctagctgggctgtccctttcttggttctttgggtagagactttttggcctgagtgtatgtgcatgtatcttttagagtttcctggttctggcttttctagtgcccagtcacatgtatatgaggggcaaaaggaaaacctagggaacttatgttgttatttagatcttgagattcctaggcagtctgccttctctccatctttcagagtcttcttatgtttgttttataaataatctccagggttttagctgcacttactaggaggaaccagaagtgtatctcctccatcttgtcctacaactggaagccagcctgacaagtccttaaaatgctcactatattgaccagtgattccacttctaggtatctacccaagaaaaatgaaagcgtatatccacacaaacacttgcaccatgaatgctcatagaagtattattcacaatactataaaggggaaacaatccaaatattcatgaattagtgaatagataaacaaaatgtttatatccataccacaggatactattcagcaaaaaattatttatttatttatttatttatttaaatttttatttttatttatgatagtcacacagagagagagaggcagagacacaggcagagggagaagcaggctccatgcaccgggagcccgacgtgggattcgatcccgggtctccaggatcgcgccctgggccaaaggcaggcgccaaaccgctgcaccacccagggatcccttcagcaaaaaattaatgaaacactgatgcatgctctaatatgaatgaacctgaaaactttgttaagtaaaaacaaaaaacaaaaaacaaaaaaacaacaaaaaacaaaataaaataaaacaaaaactttatgttaagtaaaataaaccagactcaagaggccataaattgtatgcatccatttatatgaaatgttcagaaggcaaaactaggtcagaaaactgttgcctaaggctatgggttggcatgggtcataaatacaaatgagcatgacatttctttgtggagtgatggaaatgttctaaaattaggttagatgggcatcccgggtggctcagcggtttagcaccgccttcagcccagggcatgatcctggagacccaggatcaagtcccacatcaggctccctgcatggagcctacttctccctctgcctgtgtctctgcctcagtctctctctctctctctctctcttgtgtgtgtctctcatgaataaataaataaaatcttaaaaaaataaaattaggttaggtatatgatatatataatataaactatattaataactataaatatactaaagtcattgatctatacacttaaaatgggtgaattttataatatataaattatgccttcatagatctgtttcaaaagagagtgagaggagaggaagtagagatattttctattgtatcctttattaaagaactttgctgttaaaaatgtagggatctgaaaaggcacttgtaccccaatgtttatagcagcaatgtttacaatagccaaaatacagaaagagctcagatgtccatcgacagatgaatggataaagaagatgtggtgtataatacaatggaatattactcagccatcaaaaaagaaatcttgccatttgcaatgacatagttggaactagtgggtattatgctaagtgaaataagtcagtcagagaaagataattatcatatgatctcactcatatgtggcatttaagaaacaaaacagagtatcataggggaaaggagggaaaaagaaaatgagacgaaatcagagaggaaaacaaactgtaagagattcttaactctaggaaacaaactgagagttgctggagggaaagtgagtggtgggatggggtaactggataaagggcattaaagaggacacttgatggaatgggcactgggtgttatatacaactgatgattcactaaactctacctctgaaactaataatacattatatgttaattaattgaattcaaataaaatgaaataaaaagaaatttgctgttaagagttgcagggaaaggatagatagcaagaagggtcaagggaattattttttaaaattatcattacagaaaatttcaaatatgtgcataagtggaaaatccccatgtccccatcatccagatagtatactacacttgatcttagccaaaagaccgagaagcagtatcattgagatagtataataaactgagaaccactctctttagtcccaccctcaccctagattattttattttattttttattttttttcctagattattttagaacaaatactaggcatcatattatttctattataaatatttcattatctctaaaacagaaggactcttcaaaatataaccacagtatcattattattctaaatattcacaatatctttaatatcctcaaatatgcagccaatgttcagatttcccaaattgtcaatacataacatgtgtaattaatttgtttgaaccaggatcaaatccagattcactattgtacttggttgatatgttttatttctctctctttttaaaaataaactttatttatttttattttattttattttatttttttgttgaactttattttttagaacagttttagtttcacagaaaaattgagaagatagtgtagaatgttcccatgtccactgcactggtatttcctattactagcattttttctttctttctttttttttttagagagagagaaagaatgtgcaagcgagtggtggtggtgggactgggggagaggagaggcagagagagagagagagagagagagagagagagagaatcccaagcaggctccagcttcagtgtagagcctgatatggggctcgatctcataactctggatcatgatctgagctgaaatcaagacatggatgcttactggactgagccacccagatgtctccctattactaacattttatgtgaatataataccttattctaattaatgaattgatattgataaactaccattaaagtccacaatgtctttggaatcactaagccaatttttacctaatgttctttaactgtgccagaatcctatccaagatgcctcattacacgtatttgtcatgtatccttgagcccttcttggctgtgacagtttcttaaacttttcttgtttttggtggtctcaacaatttttggtcaggtattttgttgaattcccttcttttgaaattgtttggtgtttttttcatggctagactgagagcttaagtgtcttttaacccctcaggatttttctggtcatttatttgttaaagaaatggcttgtttcctataggatttactatattattttttttttaaagattttatttatttattcatgacagacaaagagagagagaggcagagacataggcagagagagaaggaggctccatgcagggagcccgatgtgggacttgatccgggacttcaggatcatgccctgggcagaaggcaagcgcataaccgctgagccacccaggcgtcccagaatttactatattcataaatttgctaattgtattcctgtgtcatttgccatgcccaccccctccactttttacccccatgtaaactgatagttacccttaaagatctgacatcattcagaatttatttttttggcaaggctatctcgtaggtagtgttgtgctgtaattatatgcatcaagaggcatatgattctagttggcagccattgatgagcattgtctagacccattattttactaggggttgtgaatggtgatattctttttctatcattctgtcttttttatttcatttatacaaagaagctatgcctcatttactattttggtacaatttatttaggaaaggcagattaatacctttctttactgtttattttctagttttcagaataatgagttcattctctagcatcctccaaaagtgacccgtgaattttttagtgtaactatgaataaatacattttaatgtattttaatctcttgcattgaatcctcttactgatgctcagtttgtacatatttggccaatgtgagcctcaagctgacatgatcttagtgtctctgatggcctccttgccatcagggtcatcttttacatatggttctttttagtggaaatgctactaagtaatctcagtttgggtgctagagaagagtattactcatttatttttaaaaataagtatcttataccatgttagcttgcatgggtgtgatctgcagagggaatggcagcattacagaagagggagggttgctggagggatgtccttgaataggtgggaggggctggggttgagtgctcaagtggaggagtgggttatcagttaaaaatgaagaggagggagggtgcataattaagaagaaaatgtgaaataattgccttgaaattttgtgagtgagtaaccaggaaaatgctgggtccttctatcggctaacttgaagtttgtgattataaatattctataaacatgtctgcatatttttatccaatcacttctgcttggatgcaggcatggattaggtgggaagttggatttaggcagagcttggctttttccatgcagctatggtggagagaatgaggaaaatgggagttgagtgtgcaaggtaattataacaatggatcatgaaatttgagtgggatattgttgaaatggggcacaatctcttactaccagggtcaaaggggttggaagtctgggaaaaggaaaaattgtgacaggggaaggcaggagagagagtgattctcaaagacaggatgtgttgagcacagggtgggatacttaaaattcattcggtatttcctaaatgacctccttcctgcttcagagaagttttcccatttcctgggtcctggggttttgccttccttgtagggactgctgtccccacatccatttcccagctgccctggtcctctccctcatgactattatggggttcttggttcttggatattctggggaattcatcacatggagtgattgttctgtgctcatgtagataaaggtccttatggattttggacagtggctctgaagctgactctgatgatcctgacatcctttcaggatgtgagagcccacagtagttccttctggaaagcctgatctgggaggaggagatgggctgggaaatgactgctctccagggccgggatcctggaggcgctgagagcagctcctgccacaacataaaatgtgttattcctaggtcagtgagctgtgcctgcctcccttcacctgcacacaactggccctgggctctcagaccttggctggggattttgggggctggtgtgaggcagtgagtgggtgctggatgaggaataagggagatggacagggagacacacaagtacttggctagtgttagacactgttctagaaaaccctatcctggagctgtgggaggtgcagcatcatggattatccctttcccagaaagattgacaattaagccctgaaaatagactataatttttactgacacatatgatcatggactgattcagaaagtcctcaatttttttttctttttttttttaagtaggctccacacccagaatggagcccagtggagggcttgaactcatgacacatcacgatctgagatgagtgaacaagccacccagttccgcccaaaatccttcattttaagtttggaaactatttcataaacaggccaaagttgaagacagcacaatgagttatttatcttttcctgacgagacaagctcatactgggccctaatatgaggagcaaaataattaaaatattaaggaaatttaagtccaaaaatttttatgtgcaagaacgatggacaagagaagtagtagaagcaagacaactgctccacctttagtaaatgtctacaagtcctaagccccaaggactcaaagggtttgtgattctgtatattttctcctatttttcttcttcttgccaaagtttactgaacccttgctaaggagagaggactattgaatatgttttcaggggaagggtagggctttttcagtggtaggatgaagcccttaggcagtggcctggagtgtggtgggggatttggagtgggaaggggaagtgtctgggtgggcaggggtggaggggtgggggtgagtaggggggtgggaaggctgaaggtaggatggggagggacagagttagggaggtagtagagatggagagtgatgctggggtgggagcagcaactacttggatggggctttagggcctggtcagaaggctatttagggatggatttggaggggaggcagactcagtgatgatgcagaaggtcccaagatacatggtttagggttagggaggtcagagtgcagtgaagacagccagtggtggtgaggccagcagctggccatctgcctgagctgctctgggttactcacaacccaccctccctaagtgtttgggacaggaagtaaattccctggtccacggcctgtgttgatggcaagcctgggaatgactctcttgggtcctgggccccagcctgccatagtcacggggcaagggctgcccagccatggtctaccttcctcatcggttctctggacctgatccagctttaggtgttgtgcagttatgtctgcactgaagaatctttggcctcccatgctgtgccctcgagtttcccaatgtaggggggagatccagacagttattaacaagtagaactgtgcatgtaaagggacgtggtgtgaacaccccaagtggaatctctgggagaagccagctgttctccatccccatagctctgaccaccatcaatggtcctgttgccacacaatggatgtttccagcccagagctttccttgggctcaagacccacatgttcaactgtgtcttccatttcccaccaagatgtctaataggaaagtcaacagaaactcttttttaaaaaaacagtctaactccaaactctttttttaaaaaacattttgattgggcagtctgggtggctcagcggtttagtgctgccttgggcccggggtgtgatcctagagacccgggatcaagtcccatgtcaggcttctgcatggagcctgcttctccctctgcctgtgtctctgcctctctctatctctgtgtgtcttccatgagtaaataaataaaatcttaaaaaaattaaaaaaaatttattacacacacacacacacacacacacacacacgagtataagcagggagaacagcagaggagagggagaagcaggctccccactgaccagggagcccaatgtggggcttgatcccaggactctgaggtcccaggactctcaatctgaattgagggcagacacttaaccaactgagccacccaggccaccataattccaaactcttgattcctccctgcaatggagtgctctggggtggatgtgggcagaggcctctggattctgctcctctgggcccaggagctccttgggtgcagttgaggcctcaaggctctcccttctgtgacatgggggactgaagaaatggggaggcccttaggaaggttctggaaggcttctctcttccctcctttcctctagcataacctttggtgaatgtgacttgtcacctgctccctgggggaaaggcctcccttatgtgtgggcactggctcctctccactaaaggtgtcccaactattggctttggggggggaggagcaggctgaccccagtctcctgggaggtgcaggtgtggctcgtgcccagcagacctcttcagaagccagtggccatgcctggcactctgaaagaggagctgtgtacatgtgctgggtgcagttccagggcaggacaggacccttaccctgcaatgagggaagcaaatgggaaagcccagggccagggagagccaggttgccttgagaagggacagccaatcacaattactgggacccactccttctgtccgcctgcgcttttagccaaagagaaggtatcaatttagaggtagaggggatagagtgggaaaagatgagcagggtcggtgggcaacttgaaccctgtggtgtgaactcaaagtttcccatgctgcttttggtctctctgacacctgatggcagtgagtagtttgaggaaggactgagcagaactgactggcaggaaaaggcttggagtcttggtcaatggaaatggaggatgggtcttgcccataggagctagtctgtgtgggtggcagtgagggcaagggtggtgcaggagaacagtgtaggtgggagcagaagggcaaggtggctaagggggagctgggatcaggggctgaggctctgggcttcccagagcaggcaggtgggacagaaagtcctgaggagatggagagacacctgcagggtgaaacagggacatggggaacagcccagagctcactggggggagagatttggggagaggaggtggttctggctagcctgagggtgatcataggtatggtgcttggttcctgggctgtcactggttttctgagaacctcacattgggaaaaccctgcttttctgcttccttattgcatttgttcccttttgtatttcctatgcaaagttccctaacaatatctacctcttgagtgtgaactaacgggagtggtcttggtctcagtggtggcagaagcgatgggggctgtccctggggaaggctcctgggtgtaaacctatatagaacacagacctcagggctgttttattgcctgctgggagaccccaaccttcccagctgaggaggtcgcctgttcctgggaggttcagctcagggagtggaggagaagtggtggcaggggctccactggccccacaggatggtctgggctatggctttgggcctggaggcattgaaagctgtgttttgtccactccagagcctcttggtgggcctcctacctctcccacctatacgtgcactgggattccccattcaatgagcttgtcactaggttgtcactggtgtcctcatctttgttgaggggagggttgtcatctggcagaagcaatagttgggtgagctgggaaggtgcttgtggtagagatggatcagggttgggggtcctcctattatcttctccccctgggtccctttgtcctttgttgtgttactccctgtctgccccccctcttccctgccctgctctctacctggggagactgacctttatggattgatcacaggtagggaagggagggcacaggggaccagcttgtagcttcttgctgagtttggccagtgggaggcactagagggaggctttggtagaaggagtgtaggtggggtattccccctccctgcacaccctacccagtctgggcccctcctttccatcccttcatggctgggagggggacaaaggctccccttgcctcagaagcccctgctgttgccctccccccctctgatgaatcaccccttctttctaactctgtgactgaattccagggaattcttctccctccgagggtccctccacttctcttcttgtcactctggccctcaggtgggttggagaaggactgagtgtccatgaggtgggggacactctctcctcccttgaagtgttcactttctcaccacagtctgtggggccgaatcctctgcttcatttccttcgcccaccttctcaggttcagcctttacctcctccctctacctgaacctctggttttggctctgaatcagcgtctccaaagcaaggaagacatcctctcagaaatgtcaggcttggaccaaccatttccagctttgttccagggaatgtgcagtttccccaggggagctgatgctggaaaccgggggcacttctccagcagctctgcccaggcctcccttcagtgtatctcaccttcagtgtatctgagggtctgtgctttttgctcacatcactttgggttttctcctcttcaccatgtgtcctgtcaggtcccaggctgtgagactgtccggggtgagagactttctttgtcttgcccagatgcatgcagcaggctgtcagtaaatgccctgaacaagtgagtgtagaggttacgtcctataacctttcactaggggcacagtgagtggtgaaaggggagggggcagggaaagaagacagcttttggtttgggggaaatggcagagccaaggtctggcagtgtgggccttttgcaaagacagggtacagtggtgtgtgtgtgtgtctgtgtgtgggtgggtgcctgtgaaggggtcatcctcaccctatcagacttcaagggaaaggtgagaacggggagcacggggagcacggggagcacgtgggatccctagcacagtgcctagggacttggttggatgcagaagcactttcctgtggaaattgttttgttcttaaaaatgaataatatttaattaaagtaaataaaacgaataagtgaacttcagtgagtggacaagtatatgaatcaagccccctcctcccccccctttgatgtcccttcctgtcctaacttcgccctcagtgccaggaatccctcatctgacttctgccagcagaggttggttttgcatgtcctctagtcaggaatcctgtagagggcggtcttttgggtctggtttcctgtgctccatccacatttctagaatccttgtctgcacaacgcattccctccctctgacctcccccagggaagccctccttcagagctgtgcgcgccagccaggcgggggcggcagaggccaatagaaccggggagaccctgcagggcctcagggtgactgtcccctcacagcactccctagtggtagcctcccaggctgctgcttcagggtggtcagacccgcggctctagagaggatttctgggcccatgcccccagtttggtgccatctcattagagcctggctgagctctggggtggacctggctcctgtagggtttggccacaccaccatatgaccctgggcaggtgcccttctcttgttcagcttctgtctgtcaactttaagatgaggaaaggctttcctctgaggattttgtaaatcatttactgaaataatgtaccccatgtttagagtgaagtggcccttggtaaatggtgggcctgagtatttggtgaaggtcagcagagagcaggggcctggcctcaggatttcagcatacagctcaggaggcaagtctgaggagacaagtctccctgacatggaggaacagggtgtggggcaccctggagactgttagaatcagcctttcagggttggtcagggcctctcctgccttttatgccccaggcctctctcctcttattctttcatggtcagaggccaaaatgccaggcctccagccccttcctcataacttggcactcacatccctcccaccaggacttgtctgctttacccttgaccacagatgggcctgacctgcatgggattgggagaataagtttttcccgggtcacttagccagttgcccaggtgacagtacatgcacttgctccctgcaaatcattcactgacatcacagggactggggaactggcttgagacactctgggcagaccgatgtccattcaggtgtcttgtccccagatatatcagggctgaaagcaaggaggagctacttcttccttttcttcattccttccctcccttagtccttcctattctttccattctttttttcctgcactttccattcttacaccatcttccattcagcctccttaccttttaatttcttttttatcttttactaattgatgagtgtaatcaaatttattaaaatttctatataagagtatctttcttcctgatctcacacttttgctttcatagaactcagagctttggtggcagtgacgcctcctcatgtcccctggaatctcagactttggaagtagcatggcttgtacaatcacagggtgctgggacaggtgcctctggtcaggtgggctttgcagctgacctttgggtgggcctggccaggctccattcctgagagtgtgtaaggccgaggaattttctgaggcacatttgactggatatttcagttatgagatgacagcctctgctgggaggggctgtgctctccagaaggatagatgtgcagattcagaggacagtgatcatccccacggagcacgtggtttgtcctcggcagctctcagggcagagctcagcccaccagccagggtcagctggttagaggaggaaggaaaaattttaaagtccacacagaaactatcaccttgagtgtgtgtatgtgcatgtgcgtatgtgtgtgtgtgtttcctgttattttcatttttttccagatagcaaacaagcagaaaatgcttcttaaaacttttccttgtcgtagaagatggaccatgaacctttatcataatggtgtcaaaataaattcagattttaaatttctaaaaatggggcttaatcctttccaccaaatgtcacattttatttttttaatttattaatgacagtcacacacacacacagagagagagagagagagagaggcagagacacaggcagagggagaagcaggctccatgcaccgggagcccgacgtgggattcgatcccgggtctccaggattgcaccctgggccaaaggcaggtgctaaaccgctgtgccacccagggatcccttttttttgttttttcaaatgtcacattttaaaatggcaatttaaaaaaatatatttatttattttagagagtgagcgacaactgcgtatgaatgtgtgtgtgtgtgtgtgtgtgtgtgtgggcagaaggagaggtagagagagaatctcaagcatatttcgccctgatccagagagtcaatgtgggcctcaatcccaggaccctgatatattttgacctgcaccgaaattaagagtcggacacttaactgactgagccacccaggtgcccctaaaattataattatttttatattagccgttgtttatggcttaagtattcatgtgaaactctttcagaagcactctagcaactaacgataagaggtaatacatggctgttagagtagaaagtataatattaacctgattagcatcagggaaatttatattttgagcaagaaaaatcatttgtggccagggaacagtgtctgtcgataaatatcctgacagacagcctgatgagctgggggagggcagtgacgttggtgtttggtgtttggtgaccttcctgtagtgtctccaggtgtccatccagtgtccttcaggaaaaccttccctgtgctttgtcattcctcccccccccccccatcatgggatccaagggttgcattcaggggagataagctttctggtcatatcatcctgggcctttgctgagtctaaggtccccttcctgctcctctttcaccctgagttgtgtgtgttggagctgagggctgggctgggcttgaggactggggtgtgggggtcagtgtccctgtagctccagccctgcctcctctaggaagttcctggatgaaagattagtggatggcagagctcttgtctgccttctctgtctgcatgtgtgagaatgaagtgtcataagtatggcttgtgtagcccagtccctggcagttagtaggtactcaataaaatttggttttcttccctctgacttttcacaaaattcccctaatgtttctcaagccttgaggagtctccccattgggcagggaaaagcggggacagcgggggtgggcctggagcctaatattggtccttgttcatttgctaattttcaattaaggtggatttttccaatattcccatgtctaagtgaatattagcagaaatggacctatggggatgacagcatgggatgtgttcaggtatatccagatgtccagggtttgcccacagttttattttttatttaatttttaaatttgaaaacattttatttgtttacttatttgagagagacagagagagagagcgagcatggaaggagggacatacagggacaggtagatggagaggaggaataagagactcagtgcccagtgaggagtcccacagggagcttgatcccaggaccctgagatcatgacctgagttgagtcagaagcttaatggactgagtcacccaggcacccctgcctagagttttaatatctcagaccagacatccaggcagaactcaatcactcctatgcatcaatgggtccatcagcccttgcttcatgaaaatgatagcagatcattcagaactatcaagagtgaccataggctgggagagacttcgctgggtatgtggttgtggatctgagaaatctgatttcctcacctatagaaggaagataataatgacagcaggctggcagcagtggggccagggaagttttagcccaaactagtgtcttaacaccagtcacttcacacatgaacactcaagtactgggcaggcttgagggagcagagcaaatgaaggtggttgagtctgagtttctgtcctggtgatgttcagtgatgaggtaggaagaaaaaaagagagaagatgtggagttgtagccacacagggggtgacagatttaggtcacagttaatagtcttcgtgtttctcagaggactgaaatgtttttccaatttggacagggctgaatagccaatgtgctgctgaagtgactcctctgcaaatgagctccagcaaagtttcttgagtgtttgctacatgttggatacgtgaatagggcacatagtgcctccctttgtggatgccacagacattccacagaagaactcatgtcagggctgtggagaacagggtgccactcaaacccagcaagcatgtgtatggggcacatatgaggctgagcatgttggcgaaggcccctctgaggaaggtcatttcaagtgagactagaagggtgaggagtttgggggttgagagagagagagagagagagagagagagagtgagaaggaacattcagtgacttgtgagaagacccaaggctgggaaagctccatgaactggagcaactcacccaggccagtgagggagaactaggaacaatggaatgaggttggaaggaagtcagggcctgggagccacagactagaggtttagctgggggatccctggaagggatgaggagagttgatgtaagttgttgttagaggatcatgatcttggaaggaaaatgaagttgagagggtaaggctggaggtggtcaagggacacccatggagcagcagggataccatccttgagtgtggagctaggagctggccatggatatagatttgaggagtcttgaactttctggtacattggaagtagactgggttggaaagtggagtgtgtagtggaatgacgctccactttctgtcagataactgggtgaacccagggatttgttacgagatggggaaccaggaaagaaggggctggagagaaggccatagtgctccatgattttccttcagagaccatagaatccacctttcctagagcaaagtgtggcctggcagggagggggatgaatgatgtacccagaccacatgtgacggtaaagtactaacaagccacagggcactgtccactcagcaggggcaggccccatgtcctggagctggtcctggaagatcctgacacccagtgttaacccctctgtggccaggctgtggggagtacctgattcatttcccggtgaagaaaagcgaagcagctacactggtggcttttcaaacactcttgccagataggattcactaactgacatagaatatttttgctggtgaacaaccagtccagagagctccaagcaaagggctagatatgagtcttgtctgtgtcacacactcctgcttctggtctagaaactagccaacctggagaggagcagttgttcaacaaatggttgctaagtctgtgcctgtgtgtccccctgcaggataattgatatacctgttcctgccctgtttctgtggctttgatcatgttatttccttcctgattaccaaggtcaccatccagagtgcagggcagagtccgctgagatgactttttgtgcacgctttcactttcaaatggtgaaaggaggcagagctgggtggattcttctgtctgggggtgcccagtgccccaggtctctgttttgagacagacccctgcaacctgtgccaggttctgcttctctactctcctgggaaccacctgcctttcagataagaggaacatgtggcaccagtgttggatctggaagcagggtttagggctcaagcagtgaactgcaggtgcaaactctgagagtagatttggggtctgctctgatctcacagtactgaattagagatgctccggaagttccaggttttcaagcaggtgagtgggttctgaagacatctgtggccaagaagaggaaaactgggagaagctggctgtgaggaggagactgagaatatggtggcactgagggtggtggtgctggataacaatgagaagatgagaattaacttttggtggggaattgactgagcactggctgtgtagaaggccaggtccttggtccatagcagcaaagggctgggggaggcaggaggtgaaattcaggtgaactcagcaaacacaggaccccaggacagggtacgtgtgctgggagccacagtgtcctggaggaggatgcaatctgatgccatgcttctcagtgaatccctggtcataattagagggcagcagaacagcacacaggagttggtgtgtccttcctggggagccctcagtctgggccctgtgtccctgggcctctgtggtggcctgtgactaatggaggaggcccctgtgctgaggagggaaggctttggtcctgtgggcagagcaggctatgaaagctttccacgaggatgggaaggctttatgttatcagggttgtgggggtccccaccccatgagcataatgagcagtaggaaaggctctgcttctgctgggaactgttgccagccctgagccctgtgtctgctctgaggcccagagctgtgggctggccctgcctcgtctctttaggtgttcacctgcctccttcctgtgtctccccagttctgaggaaatggaggatcgctgcaggcactctttgctctcccatctcccctccctgcttctcctcttccagttgccctttgcggggtctgcaggtgagtgtgtgccctccccctgcctgtgtctcccctccctcaggtgggtgagagtctccgggagccttgctgatgtctccatcaggacagatggctattggtggaggccctgactagagagattctggtgatccttcaactgctagtgtttcctaaggtggctagtgtaggcagtgagatgggaaaaaagacagggaggaggtggggtactggcctgtctggatcctatggaaagagtgtctccacagtggggagcagccagagcaaagctggtaatatcctgtgttcaagtagctaaggaagcaagtgttggctggagccaaatgatcaagagggagagaagcaggaatcgggggtcagagatcactgggggtcatcattattgggcttgtgggtcacgtggggaacctgagaggcattgcagggctttcagcagaggagggatttggttttgcttacaagttaaaagagtcacacacatgtggtctgggagagatagtcactgtcatcccccctgaaagacatatggtgactcagccaaggttgagtagcacagaggtaagaattcactcttcagaagtccaacaggactctttctgtagaagtattgtgtcatgacatagccgtaggtatcaaaagaccaaggcctgtgaggagtggtggtggcagtgaagtgaacctacctttgtaacaggtagtgatttgtgtcctgtgagtgagggtaggtcttaatggaagtagccatgggctctagtttttagtgcacatggaattaaacagaagacaaagaaatggggacaaataatagactaaggagcaggtatggggaagttcctgagtgtggccaaatgaacatagggatcccacctatgccacaggtgtgctctttggtcagttttcagtctagagccaggttagaactatggtttttagagtgtggtccctggcacatcaataccagcatccccaccatctcctcagaagtgcacattctgggtcctaccccagacctactgaaccagaagttctgagggtaaagcccagcaatctgtgtttcacaagccttcctggtgattgtgatgcttgtggaagtttagaaccattgagttagagtccttcatggaagggcctggacccaggagcataggctgctaagggagtctctttgacgtcatttctggtctcagagttgtggtaagaggctcttgccctgattcagagtgttcacagctgagtccctcaggtcagggcctctcacctgacacttacccttgcctgcctgggctcccacctgatagtgtgtgatccctgcccccaccctatgtctctcccactctctcactcctattctgtgtccacagaggagttcgtggtgattggcccctcagaccccattgtggccatgctgggtggggatgtcatgctgccgtgtcatttgtccccggccatggatatggagaacatggagctacggtggttccgctctaagttctcagaagcagcgttcatctatcaaaaccagcaggagcagagagaggagcaattggcccagtacgcagggcggacctcactggtaaaagacttcctcactcagggggaggctgccatgcgtatccacaaggtccaggcttttgacaatggactatatacctgcttattcaggaaaggaaacttctatgaagaggccaatttggagctgatggtggcaggtgtgtggttgatctatatttagagtcttgcagtatttgagttgtgagcaacctcatggtccagcaaacaggccctcattttacagatgagggaaaggagagtctttcactcattcatttttttgggacaaatatgtagaacccctagtatgtgggggttactgttctgggtacttggatacaaaagtataacaaataaagatctctgccctgtagaatttatattctaaagtgaataaataggtagacagatgggatatagaggatgttaggtggtgggaagtggggattcagccaagtggatatctgtaggcaagaattccatgcagaggaacaaccatgtgagacacctgaggtaggagtgtggctgttgcatctgtgcacacagggagcccccctggctggtgagagagttgagtgggagggtggtgagaggtgacaatcctggaatatagaggtgttcctggtccatgggtgcagagaaaggattgatcaggaaaaattcatgaggaatacacacttgagcagatacttgagtgaagcagacagtgttctaaagagcccttttggttgatgaactccgtgaggggcacaaagagcagggtgatcttgtttatgaggaattcttcaaatagtcctagggttggagcgtgtctgccgtgatggatgtaggtgatatgattagggaagaagtggagagggattttatgtgtgtgagggcaatgccagactattggaggctttgtttgctgtgccatggagtttggatacagaactgaggaaattataagcagagtgatttagggaggtgtgtatgtggggaggtttatttgacagctgtaagggaaggtatatggaaggtgaacaagactggagcagaacatgtacttacagggtagataggttggctgcctgaattcacgtaaacgaagtggggtgggaaaggtgggatctggcaacagagagatttggaaagtaaagctttcttttttttttaaagatttttattttattttttcatgagagacacagagacagagagaggtagagacacaggcggagggataagcagggtccatgcagggagcccgatgtgggattcgatcccaggactccaggatcatgccctgggccgaaggcagatgctcaaccactgagccacccaaggatcccttggaaagtagaaacaactgaatgagtagatttgggagatgcagagggtttgtggggtgggaggaagggatggcagagaaacccagggtttttttgagggggcaatttggggcacccaggtgccccatcttaaaatttctggcacagaaatattggtaattatgtgttagttgctgatttctgtaacaatgctgtgtaatacacgcatggaaagctcagtggcatatagcaacaaccatttatttaatctgggtgttaaaggagttcagcacatcttagctgcatttggctaatcttaactggacttactggtacatctttggtaatatatgggaaatttaattaaaaacaaaatctctcaacccagaaatatttttcacaaagatataagggaaagaaaacagctttattattgaattagcattaaccagtatgtgaggttcatcatgagtacctaccaagatattgaaatgacagaagaaatctcactcttttccatagccatgcagacacaatcattacattacatacatgttctcaggatgaacaattcctatctctcaaataagtagacttgacagcaccatttgtcacagatgatacaccctataattacttggaaattggggtaatcatctatgttaactaatcagctttatcctgaggaaaaagaaattagcctatcttaaaatatttttttttaatttttttttatttatttatgatagtcacagagagagagagaggcagagacataggcagagggagaagcaggctccatgcaccgggagcccgatgtgggattcgatcctgggtctccaggatcgcgccctaggccaaaggcaggcgccaaaccgctgcgccacctagggatccctatcttaaaatattttaaaaatattttatttatttattcatgacagagagagagagagagagagaggcagagacacaggcagagggagaagcggagactcaatctcaggatcccaggatcacgacctgagctgaaagcagatactcaatcactgagccacccaggtgccccatcttaaaatttgtttaaagaaatttaattccagtgtagttaacatatagtgttatattcatcagatgtgcaatatagtgattcaacatttccacatgttactcagtggaattttcaacagaaactttactggccagaaaggactggcatgatgtattctaagtgtgaaaagaaaaaacctgcagccaagaatattctatccagcaagtgtatcattcagtctattcagcaaaccaatagaaggagagatgaagagcttcccagacaaacaaaagttaaattagtttgttttttacacattcctccatctttatgagaggacatgtttttacacttggatcttggtgcccactgaagttaggctcctaccctggcacaggaagcggggagagggttgcgttttctttggtgttaacagttcaaagagagggctcccaggtccttgagaaagacatccctggatcacagagctggcctaaggcctatctagttgtcacaaaggacttacatacatttcaaagaggggagaaagcacccacaattacaagtttcctttatatatatatataatatatatatatatatatatattatatataacaagtttcctatagtaaatgctgtaagaaaaaggatggaaaggggctctctttccttattttattttttaaaagattttatttacttattcacgagagacagagagagagagaggcagagacacaggcagagggagaagcaggctccatgcagggagcctgatgtgggactcaatcctgggtcttcaggatcacgccctgggctgaaggtggtgctaaatcgctgagccactcaggctgccctctttccttattttaaaccgggacagtaagcctcttaattttaatatattttgtcctgacagtggaacttggctgggtttgctcacataggtgttgttcagctggctgttggctgatctaggacagcttcagcttgaaaggctgtgctagcctgagcacctacctcccatagcagagggcaaggcgatgtcacaagcagtttccaacctctgctggagccacattctctgaactctcagtggctgagtcaagtcacatgaaggagcccagcagcagagtgtgaaggcactaacaatatgtggcagaggacgagctggatgtaaagaagtctgaaggattggggatattttcatcatcagcctatcacagagggggacaaatacaaatcagttcaggatttgaatttgaagcatctgtgaggaatcatagcagagctaaccccagggatgtggatattagggtgggagatcaggaagtagatagggttgtcagtggtggaagtgattttaccaaggggcagtgggtgtgcaggcagatgccctggagagtgtgtgaggggagaagagcagagaaggatggaatataggaccaaattccttattgtgttactctgggtgatggacttcccactctcccactctcatggctggggagaagagctttaccctctgtggctgctgcaggtccccgtggtctttccttctgtttcctgaagcagagctactgctttgctccctgcagggaccactcctcatagagcccctagaatgcaatgctacctctggagttgggcacagaaatgctctgctggcatccccaggctctggttggcctctctgtgctctccagcttctctctcacaggtgtgggttctgctcctcaagtgcgcatccaagggccagaggaggatggaatccgagtgatgtgcatggcctcagggtggttcccaaaaccccaggtgcagtggcgagccctcagtggggagaagttcctgatgttctctgagacatatgcccaagatgctgaaggactgtacagtgtggaggctgctctggtggtgagggacagctcctcagggaatgtgacctgctcggtcctcaaccccatcctgggccaggagaaggtgatggccattttcattccaggtcagtgctacttcctgctcccaggagggcaggaggggattggcaggggaggtctctgggtgtgctgggctgagctgtcctggtccatacccatgatggggtgtctggctgggcccagagcccttcttcccccagacttctccctggaagccagctttcatggtgaccctgaccgtgctgacactcctaatctttggggctgcctactacactaagagagaacatactgcaaagcagcaggagaggcaggaacgggagaaactgcacagggacaaggaggaggaccagcagacaaaggagaaggtgctgaaggacagaggtaaggcaggacaggggtcaaggcctgtaagtgtggcagctggtgcagaggatgagccgacagcagggcccttggcctggagcaagtggctgaggaggtccagagaggacagctggagctgtggagtctcgatggatctggagttaggccttcttctaggatacagagaggtccttttgtgggttctccaggtgcagtctttgctgttcttagggatgagagttcatgcttattttccactttctttcagatgaattccaagcagatattgctgagaactttctatgtcccttttgtaggagacgttctgtgttctcagctcacttgtttcctgtgttgcctttcagactggaggaaatctgtttacctgtctggtaagtaactgtccagatgtccttgggtcacctgtcacctaagccaaggtgtcccctctccttgtttcaggcacagacatgtggacccttccctggggcagaagtggaagctggtgggaggcagaacctgctccatgggctttcctcatctgggcctctgcttcccactcagtgctagggaacctgggggtgatggtgcttcctggagtctgttgtgcatcttgggtttattccaatgttgatcttcctgtcacattgctagctgattagccttcaatgcaaggagttctcagcacctgggagccacaagacaattgtacttatgttgaaatcttggtattttatttcaccattttactctttgtttctttattatccttttctgcattttgttttgattaaatatttttaattattccgttttctcctctgttggctttagtgatatctggatcatgtttctctattattaatagtacttttattatttgtttactgactactcttgagattcagctttctttctttcttttttggttatttttaatgattgtatctttctcctctgctaactttttgttatgtatatatctatacatttatatctatttctttttcagtgtacctagatacacaattatttcaattcaattggcagtcaagctagagattcagtatttactgtatacttacagtcatgtgggtttatgataattttcctaattctatataataaatcttgactcattaaactggtttatcaccctcctgcttttttatttttactgtcatatattttaattctacatgtctgcagtctcactagttcttattctttctttatatttttactagttcttatttttaatagttaatgttcattcatttttaatatattcatatatatttataaacattcatattcacttatatattctttttaaaaatattttatttatttattcatgagagacagggagagagagagaggcagagacacaggcagagggagaagtaggctccatgcagggagcctgatgtgggactcgatccctggtctccaggaccacaccttgggctgaaggcggtgctaaaccgctgagccactgggttgccttcacttatatattcataatcaaatatatacctattatttatatgtatctatacacacatttttttctcttcttatttcctttacacagtctgtacttcaagtagaagattttccttcaggctgaagaattaccttttgtatactttgtgtacagatctagggatgcattttctatgttctgtgggacatagtttctcatagagcattacttaaaaatctttgcctttagaacaatgaatgagtgtaaatgtgaacattttaggcaatctagacctggctgataacatctgcccatgcacatttcttctttgttccatttcccctttactgatggctgcagatgtgcatgatgcgcatgatgtgctaggagggaggaggcagagaaaggaggagaaagtctgggttcctgaatgaccatgtggaggagttcagtctccaatctgaacacccatccagcactgtcaggtggggaaatctgtggtgacagatttggggacttatttgctaattcagcataacctaatatacctacaaaatgtttaaatcaccaaattaacttaaatagttatcattctaataccttcaaaaatggcaggctcagtcagtagggcatgcagctcttgatctcagagtcatgagtttgagccccatgttggctgtagtttactttaaaaaattagataaataaatacaataagtatttaaaatgactaaagtcaagtagggtctaacaactgagctggtcagtggctgatggctcctcttacctcttcattcagccactgtgccctaagttctcagttcgtgccagtgctgataagccaactaggtcttccctctaggagctctacaggggaagatggacaaaacatgaaacagaatttcattcattcatgaatgaaaagagcagttactccataggaaaagagtaaggtgctacaactgggtcctgaactcctccaggtaaggggctgataaggctgtgctgaggtgacattagtatttcctgcagcaggacaggaaagagccagccttgcacaaacctgagtatatgtaatctggtagaaggctcagtggtggagacactggcaggcagaagttggtgttgtcatagctgaagttagaaaggaggccagggaggctgaagggagttgaagaggagagcagagaggcaggggggaagagccagggcctggggcaggaggacattatcagtggtctgctagtggtgctgtgtgacgacatttcgccacaaacacttagtgtctcacagtctcaggggatcaggaatccaggagcgctcagctgggggctcctgccggagcctctcaggaggttagggcttctgtccacactgacacaggacctgtttcattcacaacctgagctcacctaggggtgttggcagcattcggtctgtaatgagggcctaagttctccatctgtagttgtttctgagtgctagggcatgtgcatgtgtctgtgtcatggctcaacataggggtttcttctccagtgtgaggatctgagagagaacacaggtcagagtgagcgtgtagctggacactgagtttttataaccaaatcttggaaggggctctggggcatgttgccatcttttagaagcaaaatggaagtgagtcactaagtccaggccacactccaagggaaggggtcatacaaggatgtatacacaggaggtggggatctcagggagccactgaggggaaaaggggaacaccctgacaggattactgagttgcccagaatcacagactggtaaaaaggcagaaccaggcatgaatccagctgcgtgtcctcaaagttggggccctggctgcacccaggttttctgaggctttctggggctctttctgtgttaatgtaactgtgtgcagacatggaggtggtatgggggtgagggtgagtattggcatccttgacaggaggaattcctgcatgttcttgtctgaggaggagcccagtcaggcagcccactgagtacacccctgtctataatgcacccagtggaaagggagggaatggcttgtggtacatgacaggtagaggcgagaggtaagggtgggttttgaccttctaggccaaggctccaatcccgtcttgtagggtttgctttgaaaattagaaagccttagatcttgggaagcttttgcccatccttccctaggtgagactgtcatcttctgggcttccataatgtaagtactggtatatgtgtgcgcgcacgcacgcacgcacacacacacagcagtaaggactgtggggtgggatctgaggaggagcaggcttagagtaggtgagaagaggaagaaaatgtgttggaggcatttcctaaatgtgacaccactcctcaaatttcataggtatcatcccacatatatctgaagacatcccaaggaaggacatactagaataatccccactgagcaggcaggacacagagcatcgcaagaggtacagtggcttatctagggtcaaaacaagtttgaatatggcagcccgggtggctcagtggtttagcgccaatttcagcccagggcagatcctggggaccctggatcgagtcccaggtcgggctccctgcgtggaatctgcttctccctttgcctgtgtctctgcctctctctctctgtgtgtgtgtgtctctcatgaataaacaaataaaatcttaaaaaaaaaacaggtaagaataaagagttgtgtctgaacccaggtgtatctcaagggtgggatcctgactatacccagacattccccaggagctgtggagagagagggtgcattggtgcaactatgtacagatggggaatttcacggagaagaagggtgaagaatcagaagcctagagcactgtttcatagatgatagcccagaagaggtctcaggtagggaatccaaggtggtgaagtcacttccttgacaatagtccccgacagaacttggaacccccaaaaccaggcacccacattctagagcagacccagaccagatcacttggctagagacactggagagtaaaagatgttctgcagtttgctgacttaccagggctctggcttccagaaacccagtgtgagagttttctcagatgctgcagatgttggctcaacccttacctccaatgtctcgatgtctcagactatttgccaggaagtgccacaaagtaatacagagcagcctagggcaggccagttcacgtcaggtcacttctctgagtcatctctgtgcagccccctcccctcttcttcagtttcagggaaagagggacgtgtggggaagtcctgccctgggctggaggagcttggagggcagtggatacccatcatgttcacaccaacgtcatggtgatagggtggaaagggaattcctgaggtgcctcttaacctgtgctagggttaatccaaggccctcacggtgtattattgctttctcctttttggtggcagtctatgcacactgaggcgtggtgtgtctggaatggagcacatgggtctaaggaccagcaaaggcagccagacagggttctgaggcctcccctggctctggtcactgtctttactgagctccacactggagatggggcaggggctgaatgatgggatccgtccatctccctgaaggacaggaagatgccccacaccaccaacagggtgcagctctggttcaggatgagtgcaggtaccaggaagatccaacacccagggcatcagggaagcaaaaagggccccaggtcccagaagccaccctgttactctcctaggactagctccctcctagcaagactcctgcttccagatgaatctggatttttttctagtccctagaatttccctgcctgaagatgctcctggcatacatggggctcagcatgccaggctagaatgtggagcaccatggcccagcttcttctcttacagctgaggcaccttgagccactgaaccagaggctgaggctgaggaaacctagaggtgggtgatgtggacatgtggagggagcaggttgcgccacacagagcaagccttcatagactgcagttaggccagaagcaatgagtagtctcagatccctatccctatggcctgccacctgaggagacttcctggaggcaggttctggactcagatgacaatgacttgtgggagaggttttctctatctgggagggacacagaaaggtaatcatggtgatgacattttctcttcttggagctatagcaacagctctagagcaagacccagaaccgtctcaagagctacccccatctctcactcctgctggagccaagcaattagaaaaagcagcgacctcacctgcagtgttggagtcaatataggtggtagtcacagctctacttcactgtcctgagctggaagggccaccggcatgtctggcagcccaggagcaggagcagactccagccccagttatcggggccaccgaagggctccagcgaccacctgctacagctgagcaccagccttagctcctgagcggaggctttgtgtcagctgcagcctcaaaggatggcttcccctccctggtcattgcagtttttggtgttttttatacagatagataatggcttatcatattttgttttataaataaactacaaattaacttcaagtaaaattttactctgacctttttaaactgtacatttaagtgccattagaaacattcagaatgcggtacaaccgtgaccatgctgtacttctagacctttccatcacagagacacctgtgctagatcagtcgctgcccattccttcacctcagtctctgcagccactgatcttctctctctctctgttactttacctcttctggcatttcatttgcgtggaatcctacaacatggcctttcatgtctgggtacatagcatgaggagagtgattaacaaggttttaaatctttaataaaataacatttttattacaaaggactattcctaatagaacaaagattatgtgaagccccaacatgaaatatcttcattatctgggataggaatcccttttataaatttgacttgagagcctgaaaccaccagagaaatgtctggatcagggaagacacctttaaaaccattcattttcctggatggatcatatttaaatgattctaatgtgcatactatgaaaatatcaaaatcccttagtaaatcttcccatttgttactaatatattagtgataaggtgtaaaattatttaaagttttagaccgatcatgtttatctagtagaataatgatttaaatatgaggaaaaaagacacactccttctaccaaaaaataattgcccgtaacacgtggtgtccctcttttcagtcctgtccctttgagtgtagtgtgagtgtgtgagtgtgagtgtgtgtgtgacaggatggggcagggcaggtcccatggctgatgtccccacagtagacagacgcagttgctcctgtcctcttatgcattctcagtggtcacacgtcatcatttactcagcattcccagctattgaacaattgggccatttccaactttttgactttcataattgcagtgaagggtaggtacatctatgctgtaaatctctatttctttaggactgatccctataagcacaatttctggagcacaatttatacacattttgggggtattggctccagtttccaatatctacagcgtctttattaagttatggccttgttgggaaagactggaccccagagactggagacctagagaattaggaggacaagccagcggtgaggccatcagggtatctggagtgacccacggagcagggaagagctatacctccctcatgtgtcctggaacacacctcacccaggccccatcccttgataaactccagccacatcagcccttcctgctccatgacagcttctaagtagagcagccaggccctgcttccaggccagtggaggctgcaggctgggccactcctgcctgcttgcgtgcccttcaccctgactgggccccttcctctcaggaaagaatctggaagtacagggcaggtcaatgagttatagacatgacctgtctgtgttcattcagatgtagttttagtggaaaaagcaagaaccacttgaatttctgtgggcaagagagacctttacaaagcgccttaatgctcatggaagctgcaggataggtagtgcctcagcccaggtgctttggaactgggtatagtccctccacacccctcagtctcctccagcagtgacctccttgcctccccaatccccaaccttggtatccatcaagttcagtttttgtgagacagggggctgtgcttcctgctcaagataccacgtgagggaaaagggggactcctcttctcccacatcagctcagggggagtttcttgatctgaagctcaacgagaggccatggtcaacaatgccatgagatggagcaccccaggcagagaagatagattttcagagggaggaagagagaaaaacagcattcagtgaggatcaggtgagaaaggaaggccatgaagacaaagaggaagggctgccatgtgttggggcactgccatgttggtcaggggcctggctctgtgttggtttttaggaagcagccatgcttcatcctaccagtgttcgcatcaaaagccaaattcacctccagaagatactttcaataccaaccatcaaatggcactgggatcctggcagccaaggaggcctgagatgctatgcaatgatgattgcacagagcaggaggggagggcatgccattgagctgagggcagctcactttggctgctttggagagaaagagccccttcactgggcacccctacatttggcccagggagcagctgacatttcagggagatccagagtacaggtctcaatactcaagacagtccatgtccacagccacaaactctgggtgatgtccagtcccagggctgacctaggcctgatgcgtgagcaccagtgctgtgcgagcccaactgagggataccctacccacactagaggtgattaaaggctttatagagggacaattgagtcaggaggtgcagggcttgccagacagagggtgcagagtatgcaaaggcccagagtccatggtcacagtggactcacagtggaatgtcatgagcaggtacagctaaggattactgagtgttttgggggcatgaatcatgtcactgaatccccatgaggattacactaggaaggtagaaatgctgtccctgtttgactaatgaggaaactgaggatttaagaagcccctttcgggaggtctgggtggctcagtggtttggttgggcgcctgcattcaactcaggtcgtggtcctggaatctgggatcgagtcccgcatcaggctccctgcgaggagcctgtttctcctctgcctgtgtctctgcctctctcactctgtgtctctcatgaataaataaataaatcttaaaaaaaaaagctcctttcttaggtgcctgggtggttcagttggttgtctgccttctgagctggtcatgatctcaggtcctgggatggagttctgtgttgggctttctgatcagcagagagcctgtttctctctctccttctgtacgtgccctctccctctcccccctgcccactctctctctcaaataaataaataaataaataaataaaatcttttaagaatctgatcctttctatgccccacagagaggcagaggcaagatttgaatccagtgtttgtcccccctgtggggcccacctgacaacaggctgcatccagaggctgcagaagggacttctcagctctgaaattacatgaactttttttcctggtgcccagggagaaacctccacctgctcagataaaggatggctgccattcttggccaagaggccaagccccaggcataagggggcagcagtgccttctgagtccagtgaggtctctaggcctgggggattggatgtggcagatttgcagacctctgggttccaggaaggagtagtgtgatggagcacagagtccaaaggcagaggcagtggttgcagccctgcttagcctctgtatcagggtgaccccaggcagggctctgagcctcagagaccctctctgaaatagagaaagaactggtattgctaagtgggttgtaggaagacttccatgagaaatgacttgtacaactcttgcttgattcctggagcacatgaggagtcaagtggaaaggccatcacattggtcaccattcatctatgtatctgtttttgttcttgttgattttggtatcatccttaagaaacagatgccaagtctaaggacaggaagatatgttcatatgctttctttttgagttttatagttttaactcttaaatttaggtctttgattcatattgggttcaatttctatattatttaggtgagagtctaccttcattcagtcattcataattttatgtgaatgcatgtgaaagaagaggcatctttttgtcaatgtattacatggaattgttacttgtagggaattttcaatagacccggaagaaattgaagagaaaaagcaaataaaaaatccttaaagcaatttgctaaaattataagccttgttttgaaggagattgatttctatttctgttaaagtggagcaacgtcttcgtcatgagcagccacactgccctctggtggccacagaggcattgcaggtgtgctgcagggctccctgatctgtcagcaaaaagccacattcagacttagatatcctcacaggattccaggtacataaaaaaaattctgtaaaattcagtgttttaggggtaacttctagaaaatctgtaacaaaaatagtcttcttcccaagtacagtatttcaagaagtatttatggagcagatgagccaggcagtgggttctagggcagaaaatagagacaaggtgactaccccccaagacacacagggtgtggggtgagaaagtgttggggacagccagtctgtatgacagctctatatgtctggtttaaagaaaacagtaaaaaaaaaaagtaaaaaaaaaataaagaaaacagtatatccaaacaagccatatttatggactcctttgattacagtaacaacaaaatattttagaaaaattggaaactatcactccatatatctgcttacttccatcaaatgagatggcttcatcctccattcccaattactttttcttaggagtgcatggtatggtatataaaaactttaacgactccacaaacacgcttagaactaataaacaaattcagtaaaatttaaggacaaaaattcaatatataaaaatgtgttgcatttcttacatgcaaataacaaattatcatagaaattaagaaaataatttactatttatattcagtcaaaaagaataaaatacttggggataaatttaactaagaaggtgaaagacctctatatttaaaaccataaatcattggtgaaagaatttgaggaaacagaaataagtggaaagacatctcatgctagtggatcccaagattaacattgtcaaaatgtccacactacttaaagcaatctacatattcagtgcaatccctgtaaaaacttaatggcctttccagaaatagaacaaagaaatccttaaatgtggatagaactacaaaaggccccgagtaaccaaagccatcttgagaaggaagaacaaagctggacacatcatgctttttgatttcaaactacatcacaaagctatagtaatcaaaacagtatgatattggcatgcaaaaggacacacagatcagtggaacagaatagaaagcccagaaaaaaacccacacgtatttagtcaattaatttacaaccaaagagccaagaatataacacggaaaggcagactcctcaatagatggtattgggcagccagatgcaaaggaatgcaactggacacccacttaacaccatatgcgaaaattaagtcaaaatatattaaagatgtacacataagagctaaaatcataaaactcctagatgaaaagttggtcagaatgtttcttgatatcagtctgacactgattttctggatttgataacagaagcaaaagctacaaagcaaaaataaacaagtgggactatatggaactaaaaattttctgcacaaccaaggaaatcatcaatagaacgacaaggtaacatactgaatgatagaaagtatttgcaaactacacatatgataaggggttaatatccaaaatacataaagaacttctacaacccaataacacaaaagaaacagcaaacgacaaaacaggcaggttctgaatagacatttttccaaagaaagacatacaaatagccgacaaatacatgaggagatgttcaacatcacatatcaaggaaatgcaaatcaaaacctaaagagatatcacctcacagctggtaaaatggctatcatcaaaaagacaagaaataacaagaattggcaaaaatgtggaggaaagggaaccgttttgctctgttggtgggattgtaaattggtgcagccactatggaaaacaacataaaaatttcaaaaaaataaaaacagaacaaccatgtcatccagcaattcccctcctgggtattaagaaaggaaaatgaaattgctaacttataaagaaacctgcatgcctgtacacatcgaaacattatggtagccaggaggggattatgctaagtaaactaaatcagaatgagaaagacaaataccacatgatctcacatatatgtggaatctaaaaaaaccagaaaacaaaatacaaaataatcaccaaaacattataaaatagcctaaactcatagattcagaaaacatatagatgattgccaaggtgaggggtaggaagtaggcaaaattggtaaaagacataaactaacaaaaaaagagaatatcaagaggggaaataagagagtaaatgtgacttcaatatattaatttctagcttcctatattgcaagtaccttagttaattcattctatgccactgaattattctgacccaccagaattcctcattatgacttggtagaatttttaaaaaagattttatttctccattcgacagagagagagagagagtgcacaagcagggggagtgggagaagaagaagcaggctcccgactaagcagggaccccaaggcaaggctccaccccaggactcccgaatcatgatctgagctgaaagcagactcccaactgaccgagccacccagatgccctgacttcgtagaattttttaaagatgagttgtttatttagcttttcatatcaataaatacagagtgcttagattcctagatatgttagccattaaattatttttatagctttttgaagtatgattatgtaacaaaacctccatacatctaagtgtacaatttatgactctggatattagtacataccactaaaacaatcactgtgattaaggtaatgtacatgtatccatcaccccaaaatgatttttcctgtttgttttgcagtctattgttagcttgatgtgtaacttctatttgtccctacagaaggtttttctacagaatgaaagatttgcttgactttgttgttatgtattaataggagctcataatagaggcagacctaaagacagactttaaaatagccagattagaaagttccaaggccttcactggaggagataccgtacactgacagcttataagaccttgctcttttgcgaatctgtgttggcaaaaacttgagcagcgtgggtagaaataagttgtgagggtggtagcccaaagggacacaataaaggtcttgagtagactgaattcattgacctatatatactcggttaagatttgggatttaaaggacttccttggggcagcccgggtggctcagcagtttagcgtcgccttcagcccagggtgtgatcctggggacctgggatcgagtcccacattgggctccctgcatggagcctgcttctccctctgcctgtgtctctgcctctctctctctgtctctctctctgtctctcatgaataaataaaatcttaaaaaaaggacttccctgaccacctgaaagtggtattggtattctggaccctatattgggtcaataaagtagagatactgagatttccttgataaactgttgaggaaggcaggtaggagtcagaaggccggtaggagtcagaaggcctaaggaatcaggaatgttaaaatgagtctgtgttgtgcaatctgcttattttggacttctggtctccagaaccatagataataaataaatttgtgtggttctaagccaataagtttgtgacaatctgttatagtggcaaaaggaaatgcctttttgatggcattgatggatacaaatgatttaaaatgtgctctagtagctagctatttgttatcatggcattagaacaattcctctatttccagaaatctgaacttcaaaattttcaagtcccattgtaagtaatttaaataataaataatgttgaatcaaaaatccccttacaactagtccaagccctcaccctctactcagggcattatcagtgtcggagtttgggttgtgcaggggtgtgtgtttggaacaagattgagggggatccctgggtggctcagcggtttggcgcctgcctttggcccggggcgcgatcctggagaccccgggatcgagtcccacgtcgggctcccggtgcgtggagcctgcttctccctctgcctatgtgtctgcctctctttctctgtgtgtgactatcataaataaataaataaaaattaaaaaaaaaaaagattgagggagctatcagtgctggatttataatgttctccacaaggctgactgcagggcattggacatatggagatcttttgtaacattgggccatctagtatctgaaccccctttccatgtatgaggaatttcttacattctgaaacttgaaggatcacatattgctttctcagtttccctaagagctaagatgtgggtatactaccctgacctaggcaatcccaatcagaaacaactattccactttttaacataagttgagagattcaaggagcaggcactagagatattacttcttgctctgcagcataataatctccccaagttcagatcctcagggtagcagcatcctgggcagcaaaagtcaggagccattggcagtgtttggtatctagggcagtaggtcagctgtgcaaggctacagggtttatcactcagcagggagcaagagtaatcttcccaaatgatgctggagggtggctctatgtgaagctctatttttttttgtatgtatatatttttatttatttttatttttttaatttttatttatttctgatagtcacacagagagagtgagagagagaggcagagacataggcagagggagaagcaggctccatacaccgggagcctgacgtgggattcgatcccgggtctccaggatcgcgccctggaccaaaggcaggcgctaaaccgttgcgccacccagggttcctgtatattttttttattggggttcaatttggcatcatatagcataacacccagtgctcatcccatcaagtgcccctctcagtgcccatcacccagtcacccccaccccccgcccacctcccttccactacctgttgttcgtatcccagagttaggagtctctcatgttctgtcaccctcactgatatttcccactcattttctctcctttcccctttattccctttcactattttttatattccccaaatgaatgagaccatatgatgtttgtccttctccgattgacttacttcactcagcataataccctccagttccatccacatcgaagcaaatggtgggtatttgtcatttctaatggctaaggaatattccattgtatacatagaccacagcttctttatccattcatctttcgatggacaccgaggctccttccacagtttggctattgtggacattgctgctataaacattggggtgcaggtgtcccagcatttcactgcatctgtatctttggagtaaatccccagcagtgcaattgctgggtcgtagggcaggtctatgtttaactctttgaggaacctccacaccattttccagagtggctgcaccagttcacattcccaccaacagtgcaagagggttcccctttctccacatcctctccaacatttgtggtttcctgccttgttaattttcaccattctcactggtgtgaggtgggatctcattgtggttttgatttgtatttcctgatgacaagtgatgcggaacattttctcatatgcttgttggccatgtctatgtcttttttggtgaaatttctgttcatgtctttgcgcatttcatgattggattgtttgtttctttggtgttgagtttaataagttctttatagatcttgtataccagcccttcatctgatacatcatttgcaaatatcttctctcattctgtaggttgtcttttagttttgtggactgtttctttggctgtgcagaagctttttatcttgaagtcccaataattcatttttgcttttgtttcctttgccttcatagatgtatcttgcaagaagttgctgtggccaagttcaaaaagggtgttgcctgtgttctcctctagattttaatggaatcttgtattacatttagatctttcatccattttgagtttatctttgtgtatgatgcaagagaatggtccagtttcattcttctgcatgtggctgtccaattttctcagcaccatttattgaagagactggcttttttccaatggatagtctttcctgctttgtcaaagatgagttgaccatagagttgagggtccccttctggattctctattctgttccattaatctatgtctgtttctgtgccagtaccacactgtcttgatgaccacagctttgtagtacaacctgaaatctggcatttgatgcccccagctctaaatttctttttcaatattccccgggctattcggggtcttttctgattccaaatcttaagatggtttgttccaactctctgaagaaagtccctggtattttgatagggattgcattaaatgtgtaaatttcccagggtaacattgacattttcaccatattaattcttccaatgcatgagcatggaatatttgtccatctctttgtgtcttcctcaatttctttcagaagtgttctatagtttttagggtatagatcctttccctttttggttaggtttattccttataaggaataaccaggaataagtgtaacatataggtatcttatgcttttgggtgcaattgtaaatgggattgactccttaatttctctttcttctgtcttattgttagtgtatagaaatgccactgattcctgggcattgattttgtatcctgccacactgccaacttgctctttgagttctagcaagcttggggtggagtcttttgggttttctaggtacagtatcatgtcatctgcaaagagagagagtttgccttcttctttgccaatttgaatgcctttaatgtctttttgttgtctgattactgaggctaggacttctagtactatgttgaagagagtggtgagagtggacaccttgtcttgtttctgatcttaggggaaaggctcccagtgtttccccattgagaatgatatttgctgtgggtttttcatagatggcttttaagatgctgaggaatgttccctctatccctacactctgaagagttttgatcaggaatggatgctgtattttgttaaacgtttctgcatctattgagaggatcatattgtttttgttttttctcttgttgatatgatctcacacattgattgctttatgagtgttgaaccagccttgcatcctggggataaatcccacttggtcatggtgaagaatcttcttaatgtattgttggatcctattggctagtatctcgttgagaatttttgcatctgtgttcatcatggatattggtcaataatacttctttttggtggggtctttgtctggttttggaattaaagtgatgctggcctcatagaatgagtttggaagtattctgtccctttatatctttcggaacagctttagcataataggtactttttcttctttaaacgtttgatagaattcccctgggaagccatctggccctggacttttgtgtcttgggaggtttttgatgactgcttcaatttcctccctggttattggcctgttcaggttttctatttcttcctgttccagttttggtagtttgtggttttccagaaatgcatccatttcttctagattgcctaatttattggcatatagctgctcataatatgttttttaaaattgtttgtatttccttggtattggttgtgatctctcctttttcgttcatgattttattactttgagtcttttttctttttaataaggctggctaatggttcatctatgttattaattctttcacagaattaataaccaactcctggatttgttatctgttccacagttcttctggtctttcattgagttctgctcaaatctttactaactctcttcttctgctgggtgtaggttttatttgctgctctttctcctgttccttttgatgcaaggttagcttgtgtttttgagttgtttccgattttttgagggatgctagtattgtgatgtatttccctctcaggactgcttttgctgtatcccaaaggttttgaatggttgcatcttcattctcattagtttccatgaatctttttaattcttctctaatttcctggttgaccctttcatcttttgcagaatgctctttaacctccacgtgtttgaattttctccaaatttcttcttgtgatttagttctagtttcaaagcattatggtctgaaaatatgcagggaacaaaaccaaccttttggtatcagttaagacctgatttgtgacccagtatgtggtctattctggagaaagttccatgtgtacttgagaagaatgtgtattcagttgtgtttggataaagaagatgtggtttatgtatacaatggaatattactcagctattagaaatgacaaatacccaccatttgcttcaacgtggatggaactggagggtattatgctgagtgaagtaagtcagtcggagaaggacaaacattatatgttctcattcatttggggaatataaataatagtgaaagggaaaataagggaagggagaagaaatgtgtgggaaatatcagaaagggagacagaacgtaaagactgctaactctgggaaacgaactaggggcggtagaaggggaggagggcggggggtgggagtgaatgggtgacgggcactgggtgttattctgtatgttagtaaattgaacaccaataaaaaaaaaaatgaaagtaaaaaaaaaaaaaaaaaaaaaaaaaaagagaagaatgtgtattcagttgtgtttggatgaaagttctgtaaatatctgtgaaacccatctagtcctgtgtatcatttaaagctcttgtttcttcggagatgttgtgcttagaagatccgtcatttacagaaagcactgtgttaaagtctcccagtataagtgtattattatctaagtatgtcttaactttggttattaattgattgatatatttggcagctcccacattaggggcataaatattcatgattgttagatcttcttgttgtatagatcctttaagtatgatatagtgtccctcttcatctcttactacagtcttcgggataaactaatttatctgatatgaggattgctaccccagttttcttttgaggaccatttgaatggtgaatggtcctccatcctttcatttttcaggctgtaggtgtccttacgtctaaaatgagtctcttgtaaacagcaagtagatgggtcttcttttttatccagtctaaaaccctgggtcttttgatgggatcatttagcccattcatgttcagagtgactatggaaagataagaatttagtgtcatcataatacctattcagtccctgtttttctggattatttatttgggcttcctctttcttttacagagtccccctttatatttcttgcagagctggtttggtggtcacatattcattcactttctgcctattatggaagctctttatctctcctattctgaatgagggccttgctggataaagtattcttgactgcacgttcttctcatttagtatcctgactatatcctgccagccctttctggcctgccagggctctgtggagaggtctgctgttaatctgatatttcttcccatataagttaagaatctcttgtctctcactgctttatctttatctttcgaatttgcaagtttcactattaaaatgtccaggtgttgaacggtttttattgatttcagcggggtaaggggggaatttctctatctgctgaatctgaatacctgtttccctccccaagttaggggagttctcaaaacttgagattttgagataataacaagaataaactatgatttattcaaatatgctttctggtcctctgtccctttcagtgccttctggaaccccaattaaacatagattttttccttttgaggctgtcatttatttcccttaacgttttctcatagtctttaattgtttttctcttttttcctcagcttccttccttgccatcaccttgtcttctctgtcactcactctttcttctacctcattaaccctcgtcgttaggacctccagtttggattgcatctcatttaattgatttttaatttcagcctgattagatctaaattctgcagtcatgaagtctcttgaatcctttatgtttttttccagagccgccagtagctttataattgtgcttctgaattggctttctgacatcagattgtaatccaaattctgtaactctgtggcagagagtactgtttctgattctttcttttgtggtgagttcttctttctagtcatttttctcagtgcagagtggttaaaaacgagttatacttgctagaagtgcaaatttctttctgtagcgttccagctgttctctctttaaatttcaggtcaaattcgtaggttttcagcctgatttgaaagttatctaggtaagttggtggggacaggtgacttggggactctactcctccgccatcttgccccgccccatgaagctctatttgattgactttcctattcctcattctttgtatactctggttctcttgtttcctgaggatcctctgagctatgaatattcctgaaataaaatatattttggctaatttggccagagtctaatagttgcaggggagggttgggagagagggagaagcagcaggtgggggagggggagagagagagagagagaagggagattgagagatgagggaaggaaggaaggaaggctcaccttggaagtcaacttggtgctgagtacattgccagccacatccatgattctcctgaaacatcatgttcccctctgagcccaaaggctccctcaaggatcaagtgattccactccatgctctctggtcataagacacaagtagggtttctgctccagcctcccccactccccagtctgtaaatgaaagtgaacaaaaagcctcactcttcaagcaaataccttatctttctatccctattttagccagctgcttctttatctgaattcttatttgtattctggatggtgaggaaaggaaaaaaaatggttcctgggatattatgaaaatgaagtaataatgtagaaatgtactgagtagtactttgagatagaacccagctatctatacacatcatacatgcccttttttggtaaatataaatggtataatttctatatattgttttacaactctttctttactcaaagaagtaagtaagacaggattccagaattcttttaccctgaaagtaacccagaacaaagggtaggaagccaagtaatgttggaaacatgcatgtctccagtgccttgtatccacagatgccatagatgggagggatggtgaagtcatttaggctacagcagctgagtggcccattggccaaatgtgcagggtgggagggagatgaaagcaggggcggggtgtgagttagaggtaagagacagccctaggcctcaggaatggcctgtgtccacataaatcagacagcatgggggtgtaattccccaccacagaatttccgagactgtgggcgtggtccagagctgttgcttgaattttagtaggaagagttgtgtggtgggtttgtgaggcttgagaaaggagtgagtacaaggggctgtgggggagcaaagtgaccatgtgttggcagtgtgaggactatgaggctgtgctggggcgaaaacaaggaccttttatttatctggcaagggaggtgccatcatgtaaggttggttttcttacagcaaagtttatctgttatgctctggatatgtgaagccctacatatttgcattatctgtggtactaggttttctctatttcctgagcatcaaatggtcagaaagagatggtggcaaggtacccccaaagggtacagaaatattaacttagagggacacatgtgctcagatgtttatagcagcattatttaaaatagccaaattatgtgaacagagaagatgtggtatatgtgtatgcaaagggatattactcagccataaaaaagaatgaaatcttgacattttcaaggacatcgatggagctagaaagtattatgcaaagtgaagtgagacagagaaagacaaataccatatgatttcactcatatgtgtaatttacaaaacaaagcaaatgagtaaaggggaaaaaagtaagagagggctaaacagatgcttaaactatagagaacaaactgatggtgaccagaggggagatgggtggagggatgagtgaagtacatgacagggattgaggagtgtacttgtgatgaacaccaagcatcgtatgaaatcactatatagtacacctgacactaatattacactgtatgttaagtaactggaatttaaataaaaatttaaaagagggatgctggtatttttttctagtgcaaagagtttttaattgcttcccagggaccagaagtcagtctgggtccagtgttacccaccagacacctcacagaagctcagagagagaccagcattcccatgaaaccacttggtactcatgctcagccttccttggaggaccttccagagactagaaaggaaggagttgacatacttttcaagagacatgtctgctcgcacaggaccagttttcaccacagaccccccaggaacatccactcaactcttgggcaaggggccacggggcttctgcagtctcccacacaggtcaagtaaaaactgtccttataactggtgtgctgctttgtaaatagaagatttggaaatagaagttcagccagactgtggctgttttctgtctctgtaaaggtctccattcagaatctacattgaaatttcctaatctgatcttcacataggggtgcacaccaatacagactcataggaactggactgactctcctgcctgaaatgacaaaagaaaacaactacaaaatcaggcaagatacacaaattgaagattttcaagatcctgagcatcaggaaaaaaatgacagtgatccctgagagaggggaagctgacaggtgagccctacaattggctccggtttactgcctgagatggttttcatgcaaggtaggggaggggaagctgaaaaggagcccagtggacctgttgagagtctagggaggccaaggtagccagaggccgcctgacagtgtgccagggagggagaacagtccaaagtcaactagggagaactgtgcagatgcccctccagggagcagcagaaccctgaccagcacctccatgtgaggtaatgtcacaaagtcagggaagtcatttgaaaagattagagggaacagtgcctgacacatagtgctcagaacagagtctgcttgcaacagatagacttggaagagaagaacccacataattcacggggagctcttgccacagtagcaggaacaaattagccctccattgaagtgttactctagactacttaataaatcctaaaagcaagatctgaagtgctcaaactgtttctgaggaaatgcatccctcaacaaatctcaaaatttatagaaacacaaaaatatccaggcagttaaaattcacagtgcctggccttccacccaggattctgtggtgtgcagaaagacagggaatggctgctaatgaggagacagatcagtcatctgaaaatgacccagagctgacacagatgttagaaccaccagaaaaggacatcaaaacatctattataactgtattccatcagttcaaatgttaagtagataaatggaaaatataaaaaaaacccaatctcattttaagagatgaaaacaatgtctgaaaggaaatgcattgcaagggactgaccatgtttaggaaatgcagaagaaaaacatgtgacaggactcattaatcccacagatcccttctggtggtacagccaccttcactccatgagcacaggatgtctttttattgtttcagtcttcttgaacctcttgcagcaacgtcctagagttcttagggtgcacctctttggcctccttgaatcagccgattcctagatattttattgttgtgggtactgtggtgagtgcaattgttttcctcaatttccttttcagattggtcattgctggtgtatagatttacaatgtatttttgtctctcttgtgtcctgcaacatctcagaattagttgattgactctagtatttttgtgtgtggattttggaggtttttctatatataggagcatgccatccacaaatacagttttatttattcctttccatgctatctttgttcaccttcagttttgaaagatattcgtacctgatgtagaagcctaaacctgccacagctgcccctgggttttcgggtcagagatgagcagtgacaggaggttgcctactttgggtcactcagcccaggggttttggatcagcacacacaggctggtcccagggaatagagagcagcagaactccttgttctttgcaagcccagctccaaggggaaggaccacagaggtccctggcggtccctgcagggagggctcctggccctgggaggctccaagtgagagggcagggggcaggagagggtgctgaccgtgagtcctctggggatgctgtccctgcaccaccttgtcctcctgctccatggagagaaagggggagataccaagtccaggaagtagaactgctcactcatacacatggagtcctttctctgttatgatttgaatccaaacccaggcggccaaggttccaacaccatatccgtcccaccacgacccctgcatgccccccacaacctgtagtgctggggttcagtcttagcatttgaggttagtggaggctagagttgaaccactctctccctctttctcccttccttctctccttctctctctcccaacttccttccttctctctcccctccttccctcttctctccttctctccttctctctcccctttccctccttccctctcccccttttctccctccactccttccttccttttctctcccctcatcctctctcttccttgtcctctcttcctccctctctctcctttcctctccctctgtctccctttctccctctcatactcaaggttgcctgccctcaccttctttctcctgtttagctttccttctccctgccactagcactcagactgaggccaccacactgccctgggtggggtggcgaacccatatgtttgaagctggggccctctatacatctattagaacattttaaaaaagattttatttttaagtaatgtttatacccaatgtggtgcttgaacttataaccgcaagatcaagagttgcatgctccactggtagaacttttacttgattctaaacagatgctagaatgaatattcttaagaacagctgtgagttgagaaacttatcatgcccccattccagggttcctctaggactggaaacataagtgtctgcattaaagctcttggtctcccaccacctcagacctcataacaaaatgaatccttcatggagcatttatcggtgcctacacgtgacacgtcctactctggctgcatggtgagcaaacctcaggttcttgcaccatggagcctacactagaggcccaagggtgatgggatggaggcacagccagttagttccttcctgccacagggcccatgcgcttcaacttgggtgcacttgtgctgaaaaaaaaaatggataaagccggggagcctgggtggctcagccaggtaagtgtctgccttcagcttggttcatgatcccaggatactgagattgaaccccaggttaggctccctcctgagcagggagcttgcttctctctctccctctgtctgccactcctcctgcctgtgctctttctattaaataaataaataaataaataaataaataaataaataaataataaacttaataaagaaatggatgaaactgaccatgaatgagaaatgcatgacttcaatcatctggcttcacccggcgctcacttacttgcaagacatcatagaacagatgaggagggcctcatcacagtccctcgttcactccccaaaaataatcctggggcagcggctgctaattgatgtgtttcatcctcatttggacttgttgcctgatcaggtcaagggttctgctgaacgaaggaacccagatgtcttttattggatgaatcactgtccagccggcttgcaccaccctggaaatatggtccagctgtgctttcaggaaaaatatgccatttatgcaggttgtaccttgagattaggcatactcatactccttatcctcctggagactggtcctatgccctagcccttctaaccccttgccctgttccagatccctgacaaccctgaagtgcacagcaccacaagcatagtacatgcacagtacatctggacctgttgcctgattggataccaggcggctcccttgccagatagcccagctgtcttttattggaataattgtcagccagttgcccttccctgctctggccagtccgatatcctccagctgggcctaaggtaagcctatgctcatttgtgcatataaggcatgtaattatacaaatcccttgtgccctgagatccatgtcccgaaaccagcatctgcaaacccttgtcctgttctagatccctggcaaccctgagttgagcagccctgcatgagcaatgcacactccttcagcaggtcttgggcagctgggtcctggccccatggaactgcatagtattcatggtggagggaacccatctccagaatctttttgagatagcagttttattttttttatttttaaaaatcaattaaaatttttattgaattataattgaatataagatcttattagtttgaggtatacatatagtataatgattcaatatttttctatgttacacaaggatccttaggatggggatccccatacaaagttattacaattatattaactgtatcccctatgtgtatattacaaccccatggcctatttattttataactggaagtctgtaccttttaatttccttcacctgttttacccacccctgatccctaacctctctggtaaccataatcctgattcctgtatttatgagtctgtttctgctttgttttgtttattttgttttttagattccacatataagtgaaatcatgctatatttgtctttctctgacctgtttcacttagcatagtatcattaggtccaaccatgtttcaaatattaagatttcattcatttctatggatgagtaatattacattgtgtacatatactacatctttgttcatttatcgatggacacagggtttcatccatattttgtctattgtaaataatgctgcaggaagcacaaggatgcatatatctttttggatgagtgtttttgtttttttcaaggtaaatacccagtagtggaattattggatcatatgatagttctatttttaatcttttgaggaactaccatactgttttgtatagtggctgcaccaattaacattaccaccaacagtgcacaagggttccattttctccacaccgtctccaacacttgttattttttgtctttttgataatagccaatctgacaggtaggaagttatatctcactatggttttgatttgcatttccctgctgatcagtgatgttgagcatattttcatgcctgttgatcatctgtgctttctttggaaaagagtctattaaaatcttttgcccattttaaaaaattgggttgtgtttctgacattaagttgtgtaagttctttataaatcttagatattaaccactcattgggtgtacaatttgcaaatattttctccattcactaggttgccttttcattttgttgatgtttgttgggcaaaagcttttcagtttgatgctaacccatttatttattttagcttctgttgcccttgcctgaggggagtgatccaaaaaatattgccaagaccaatgtcaaagagttatctgccattttttattttttttatttttttattttttttaatttattttttattggtgttcaatttactaacatacagaataacccccagtgcccgtcacccattcaacccaccccccgccctcctccccttccaccacccctagttcgcttccccgagttagcagtctttacgttctgtctccctttctgatatttcccacacatttcttcccccttcccttatattccctttcactattatttatattccccaaatgaatgagaacatataatgtttgtccttctccgactggcttacttcactcagcataataccctccagttccatccacgttgaagcaaatggtgggtatttgtcatttctaatagctgagtaatattccattgtatacataaaccacatcttctttatccattcatctttcgttggacaccgaggctccttccacagtttggctatcgtggccattgctgctataaacatcggggtgcaggtgtcccggcgtttcattgcatttgtctctttggggtaaatccccaacagtgcaattgctgggtcgtagggcaggtatatttttaactgtttgaggaacctccacacagttttccagagtggctgcaccagttcacattcccaccaacagtgcatgagggttcccttttctccgcatcctctccaacattggttgtttcctgccttgttaattttccccattctcactggtgtgaggtggtatctcattgtggttttgatttgtatttccctgatggcaagtgatgcagagcattttctcatgtgaatgttggccatgtctatgtcttcctcagtgagatttctgttcatgtattttgcccatttcatgattggattgtttgtttctttggtgttgagtttgataagttctttatagatcttggaaactagccctttatctgatatgtcatttgcaaatatcttctcccattctgtaggttgtctttgagttttgttgactgtatcctttgctgtgcaaaagcttcttatcttgatgaagtcccaatagttcatttttgcttttgtttcttttgccttcgtggatgtatcttgcaagaagttactgtggccgagttcaaaaagggtgttgcctgtgttcttctctaggattttgatggaatcttgtctcacatttagatctttcatccattttgagtttatctttgtgtatggtgaaagagagtggtctagtttcattcttctgcatgtggatgtccaattttcccagcaccatttattgaagagactgtctttcttccaatggatagtctttcctcctttatcgaatattagttgcccataaagttcagggtccacttctggattctctattctgttccactgatctatgtgtctgtttttgtgccagtaccacactgtcttgatgaccacagctttgtagtacaacctgaaatctggcattgtgatgcccccagatatggttttcttttttaaaattcccctggctattcggggtcttttctgattccacacaaatcttaaaataatttgttctaactctctgaagaaagtccatggtattttgatagggattgcattaaacgtgtatattgccctgggtaacattgacattttcacaatattaattctgccaatccatgagcatggaatatttttccatctctttgtgtcttcctcaatttctttcagaagtgttctatagttttgagggtatagatcctttacatctttggttaggtttattcctaggtatcttatgcttttgggtgcaattgtaaatgggattgactccttaatttctctttcttcagtctcattgttagtgtatagaaatgccactgacttctgggcattgattttgtatcctgccacgctaccgaattgctgtatgagttccagcaatcttggggtggagacttttgggttttctatgtagagtatcatgtcatccgcgaagagggagagtttgacttcttctttgccaatttgaatgcctttaatgtctttttgttgtctgattgctgaggctaggacttccagtactatgttgaacagcagtggtgagagtggacatccctgtcttgttcctgatcttaggggaaaggctcccagtgcttccccattgagaatgatatttgctgtgggcttttcatagatggcttttaagatgtcgaggaatgttccctctatccctacactctgaagagttttgatcaggaatggatgctgtattttgtcaaatgctttctctgcatctaatgagaggatcatatggttcttggtttttctcttgctgatatgatgaatcacattgattgttttacgggggttgaaccagccttgcgtcccagggataaatcctacttggtcatggtgaataatttttttaatgtactattggatcctattggccagtatcttgttgagaatttttgcatccatgttcaccagggatattggtctgtaattctcctttttggtggggtctttgtctggttttggaattaaggtgatgctggcctcatagaacgaatttggaagtactccatctctttctatctttccaaacagctttaggagaataggtatggtttcttctttaaacgtttgataaaattcccctgggaagccatctggccctggactcttgtgtcttgggaggtttttgatgactgcttcaatttcctccctggttattggcctgttcaggttttctattttttcctgttccagttttggtagtttgtggctttccaggaatgcgtccatttcttctagattgcctaatttattggcgtatagctgttcacaatatgtttttaaaatcgtttgtatttccttggtgttggtagtgatctctcctttctcattcatgattttattaatttgagtcttctctctcttctttttaataaggctggctaatggtttatctatcttgttaattctttcaaagaaccaactcctggttttgttgatctgttccacagttcttctggtctcgatttcgttgagttctgctcgaatctttattaactcccttcttctcttgggtgtaggatctatttgctgttttttctctagctcctttatgtgtaaggttagcttttgtatttgagttctttccagtttttgaatggatgcttgtattgcgatgtatttcccccttaggactgcttatctgccattttttaaaggagttttatggtttcaggtcctacagtctgtaatccattttgaatttatttttgtgtatggcataatatagtggtccagtttcattcttttgcatgttgctgtccagcttttccaacactatatattgaagacactatcttttccctgttgcatattcttgcctttgtcataaatttattaactcctatatgcatggctttctcttgggctctcgattccattctattgatctatgtgtctgggtgccacactgttttgattacgtcagctttgtagtagagtttgaaatcaaggaatgtgagatctccattgcaactgcagttctgaactggcaataatccatttggactgactctggatggaatctcaggcttgtccagcaatcaagtctcccaggtgtgtcttactggaagctatcctggctagtctgtccgactctgccctggcaagacaggtttctccatctctgccttcaggagaaatccaatttgtgtaattaaggtttgcaattaggcaaatggccttgttacctaaaaagcctgctccagtgaccagcctatctcatttcttgctctgttcctgaacagtatgcatatgctcagtaagcaccccatcagccaggattgagcaggccttgtgtagctctgctggttcccaactatctgtatagcttccaaggtggaggaagtcaacccacaaatttttctgaggcagcttttgaatggtgtcagtccttcccattatggactaggtgcttcttcagcactagggtccaaggctcctccagcactaagtactcccagatatctcatatcagggtggggctacttttgtcagtggtctggcccttccttgcaaggcagacccgatacttgaggttcactttagggggaaatatgagaaatgtagattagtgcttggaagttggcagatgtctagtaccccctagaacttggggtgattttattgtgtgggcacttctactctggatactatggatgtatctggggaccagccccagctccacaggcctgtagtacctagagacctcaggacagctaaagggagagtgctgtgcatgcttcaactgagtagtgcagaatagccagggatctggaacacagcaagtgtggggataggccaggtcataagagaaggatcttgggggacaaggtagtgcccaaggtttcttaactgccttgcctatgcaggccctgaaagctggttgggtacaatctaataagaattacctgggaaccctatgctggagaaacatggggcccttcaggcagtaggtcccaaagggactgattgtcctcagtttgtcactgatgcctcagggtgattttaggtgcatgggccctctccatgctggagactatgtaggtgattagagctgggctttcatctcttttggcctgcaaggtcttggctacccaaggtctggtgatggagtgtgagctgtgcatgctgaggccatgtcggtcatggtagccagggacctgcaacagggcagaagtcaggagactctgggacatgggagcaagatcttgggggaacatggtatctgtataatcccaaatcctaccttttataaaggtacatatttctcctgaaggctgagaggacactggcccgccttgccagggtggggctagtggattggctgttgtagcctctaataagagatacccggtgccctggttgccagagaagccagggagcccatcagacagcaagtccaaacagagactagctgttaccaatttgcatctaccacctcatggggaatgtgcaagtagttgtgtcctggctccagctccacaggcatggagggccctgtatgcctctggttggccaaatgggtgcatattgctcccatgcaagccaagaattgcagtgtaaccaggcatctggaacgggtcaagggtcccagaactgagctcttgggggacaatgcagctgtctaattgcaagcattaatttaccccataggtagaagtcgccctgaagccaaggttcaagtttactcgactgccctgcctgccctgcctgccctgccagggagggttctgatggctcgtcggggtgtcatccaataacacctggaagccctggctgcaggagcaggaactctccctgagtggtggagaagcaagttttgggagcttagaagaaaatgcatcaagcttccttgacatctcctactggctgctctcaggaatgaagggggaaacccagaataaaaagaaagcatggctgcaagggaactggaagaagactctgtcctgcacatggcataaatgcttttttgaatatctggagaatgccaggaagcagagcatttgaaggcagaaacctctagcagaacgtgacccaagaaaatgtgaaggaagttttaatgtggatgggtcaatcagggagagcttccagaatgaaggttttaaaggatttgggaaatgcatgaagaaaagaaagagctgatggtggcttctgcctggggaagctggcagctaacatacctggctgaggagccacattgagggctctgacagtgtggtgctgagccagcatttataggcagctcctggcctagatactcaactttcatgcaaagactgcttgatgagccagcagcgtactaaccctgaactggactgtcattgccaggagaaggcaggagtagggcaggaaatgttcacagagcttctttgccttttcatgaaatgcccagtcctgggcctggagctggtttgggaggaaggtggtaactcacttcccctctacctcttccctccctgagtaagccagagatctgcctctcctctggcacccctcagtctccccccaaccccctttgagtttgggccttcccacttaggttagccagtggctggagggggctgtggacccccagggatgcctggcacactctgcttcccctatgtggacagttcagcaaggatggctgtgccttccaagcctgtctggctctgcgctaagtgttcttatgtgggtgaagggttggtgtgaggatcttagctgaaagggggtgaattgaagttaaaagggcccttggaggtagtcaggcccttgtactgcagatggagacactgatgcccactgaggggcctgagcaaggctaggaagcaggaattgggcttagacatcctggtgtctggttaagggcaattcccattataccttccacagtctgaggagaaatcttcagggtgaatgggtttctacaggttctcagcattactcttcctaaccccgctcccaatgtagaagtcatggccttaaggaacttacagcctagaagacaactatttttatgtagcctcttggtaggcaacacctgcctctcctcggctacaaaacttccctggctccccatcacccaggggtgaaagctgagctgcttagcacagcacacacagccctctgggagtgggcccaggggggccagcctgatcagtgccctccaaccccttgcctgggggcccacggggcccactggccacatgcacctgtgggccttggtctttgctgctttcatcccttggtacccttccccactacagggtgctgccctaccacctctcatggctcagctcaaatgccacttcatccaggagtctgctctgtttttcccaattgggaaacaatttcttcctccccaaaaattgctcccatactactctgaccctcagcacatctctcctgtcatacagttgtttacatcttttgccttgtccgacagttgcctgtgtatcctcaaaggcagatattattcatgttttggtcctccgaagcacacagcccagggcttggcatatggtaaacctcacatgcgctgaaggatgtgtccttactggtaccctggtccctcgacgcaggaagtgtgtatggaagaccaaacacaggcaccttccctttacccctcccttcctccaacctccccccttctattcgggaaggtggtgttctcttccacctctactagcccttcctcccatccaacctcctcaatgcccccgaggccagaggttgagatgtgcgtggtgggaagtgaggtcttcttcttggggagactcagagccccccactagggtgcgacaaaggaagggaaagttattctctattctcaaggtcttagctggaataggtattaaaattacatgagaaagattaataggggaaaaaaccccaaagtttcatgacatgcacatggaggcccaatagtgcagttgagattccaagaagtgaccaaggcaggcagttttcatactttttagacaaagagacaataaatctgtgaggcgttgacaagatgaagaaaactgaactttgggagattcaatcaataaggaattctaaagagtttgagtgtggggagtaaattagtaaagagtaacacgggttgtttataaggccttctgggttctaaattgcccacctgtgggataaggctgtctctttaccgcctgtttcagggagggtacctttctcatggagatttctttcctgctttgtgagggggggcaaaggagggcctgaggttccttctcactggctgtctctttagtcactttcatttaaaatcatcagtatgctaaagtgacacattttggggcagtctgcccttggcctctacattgaattgggatgatttccctggttctggacagtggctctggaggatgccactgggaggaaggggtgtagtttccttagctgtgttaacacaaatggggaaacagtgagcagacagtctagtcctgtctctggaccccttcccccacacccaggaccacaactgaggttgcctctacctgtctgcaagctgtcctgatgtgggccccagaggttcatccctcctgacatttttgatggtcatgagggaccgtgaaaaggacnacatgtttatgagggatggtggtgtggacttgataccaggccctgttctttttgcctgtgggaccttgcgtgaaaactcatggcagattttggagccatcatctgggttccggtcctagctctgccaacttgctgggtgggctttgcgcatcattcattcccatgtctgggactctattttactaagagtaaaatatctccttatctactaagtgaggaggctggattgattgacctttagtaatttctactgccgaccctggctttgctggaacttgagggagtgtagaaggtgttccaccaatacctcttgcctcagggctccagggctctgtctactcttcctcctcattgagcagtgtttcccttaaagaaaggaagtcagggtccttctccccacagggtagatggtgtctgggcccagccccttcctggccacataacctgctgcctcttcctccacatctccctttctccggtcctccccccctccctctcagcctgagactcccagatgctctttcacagagatttctggatctggacgcctgaccacaggcctcctgacaccctcgtcccctcactgctcattctgggtctctggtgcattaggatggccatgggtaatgtcagaccactcttctgcacctttgggctaatccactgcaagcttgactgcccctagcttgtcatagtctgcattcaaggagggcggtcctgtgttctctgagactgcctgctcctgcagcctggcctctgcccccacctccatagtgaggcccctccaggaagcctgcacattagctccccacttgcaatgctcccaagtcaagaaggtcccccaacccctattccacctgcctaactttgctcaaactgtcttctgggaaatttcaccttcgaaatagaaaaatccagtgttaccttttctgtttcctagcttcaatttttccaattcctctcctatctctagtagaacctggtgtttgttcttaggtccttagggttccaggtacttccagaaattcctggtgagtatctcagtatctctttgttggctttcctctgctgtcagggaacttttttttttataataaatttattttttattggtgttcaatttgccaacatacagaataacacccagtgctcatcctgtcaagtgcccccctcagtgcccgccacccagtcacctccacccccctgccctcctccccttccaccacccctagttcatttcccagagttaggagccttccatgttctgtctccttttctgatatttcctacccatttcttctcccttcccctatattccctttcactattatttatgttccccaaatgaatgagaccatataatgtttgtccttctccgattgacttatttcactcagcataataccctccagttccatccacgtcgaagcaaatggtgggtattgtcgtttctaatggctgaggaatattccattgtatacacagaccacatcatctttatccattcatctttcgatggacaccgaggctccttccacagtttggctattgtggacattgctgctagaaacatcggggtgcaggtgtcccggcgtttcattgcatctgtatctttggggtaaatccccagcagtgcaattgctgggtcgtagggctggtctatttttaactctttgaggaacctccacacagttttccagagtggctgcaccagttcacattcccaccaacagtgtaagagggttcccttttctccgcatcctctccaacatttgtggttttgtcaggaatctttttgaagtagccagtcctttgaagaaaataaagcactttcacacacatcactgtgctgccttctaattcctaacctttgaatcaggctccctcactagatattagggattctcctacttattcatctctggttgataagctttgcatgtgagatatttgataaacatttgcagagtaatttgtaactgccttggctttgatgggacccatgcttagaagattccttcatggaataaagaggttgtgcagtgtgggagagcacagataaaggaaaaaaggaagtggacagggaggcggggagactcctgttggtgattaccagagcacatgccccttgtggcctaccaggtgcaggacagcccgtggagttcttgggataccaattcccacactttttggtctgaagacacttttacacttgaaaaattattgaagataccaaagggcttttgtttatgtgggttacacatattaatacttacaatataagaaaattcaaagttttaaagacttattcaaagtactgttagtaagcccatcttatattaatatacttttacaataaaaattataatttttaaaagctagtgagaatgattttttttttacacaactctttaaagcatgacttaaaagaagaccactggattctcatacccaattctgttttctaagctgttttgattaaagatatgaagaaaatccagcctcatacaaataagtagctggaaaaggaaagaatagattaatagtctttaaaaatagttatggatattattctttgttaatacaccaaaactcaacaagtggaggtttcttaaaggttagtcgcaatgtaaactttgtactctgttacattagaatccattgtttatcctgaaatttgaatgggtcttttattcaggtatgattttgtatcttcatatattgttcatttgaaaaatattgattcactgagttatccatgtcttctaaatgctgacacattgcaatatttattttttgtccattttaaatttaaattccagttagttaacatacagcataatattagttttaggtgtagaatttagtgattcatcatttacatagaacacccattgctcatcacagcaagtgctctccttaatactcatcactgggaagcctggctggctcagtcagtatgtttttcttgatttccaggtcctaagtttgagccctacactggggatagagattacataacaacaacaacaacaacaacctatcagttatttaacccatcctccccactcacctcccttccagtaaccagttattcattctctatagttaagagtctgtttcttggcttgcctctctctttccccactatgttcattaattttgtttcttaaataccatatatgagtgaaatcatatggtatttgtctttctctgacttattgcacttagcacaataccttctagctccatccatgcccttgcaaatggcaagatttccttctttttgatggccaaatagtatttcattgtatacatataccatttctttattcattcatcagttgatggatatttggactccttccataattctgctattgtagataatgctgctataaacacaagttgcatatatccctttgaatcagtatttttgtatccctttagtaaatagtagtgcaattaccagatcatagggtagttctatttttaactttctgaggaacctccatactgtttttcagagtagctgccccagcttgcattctgaccaagagtgtaagatgggtctcctttctctgcatcctcaccaacacttgctatttcctatgttgttcattttagttagctaactggtgaggtaatatcttattgtagttttgatttttatttccccagtgatgagtgtgacacatttcaatatttaatatatacatttaaagaatcacatatattaatatcactactgatctcatcagaaaatctgtaagtattgggagactgtcaaactcatggttagtgtaggggaagagggaaggccaccccaagatgggctactttggcatgaggttattttggggtaaaagcaattaaaaccaagcagattcaggaaaatctctttatctcctcctcaactgcctgcttgtatcaagaagagagctattaacacagattcctctttacctaagaaacttatctacacaatagggtaacctttgttttccaaataccttattgctttctttcttcttttcttctaaatttttatttaaattttggttgacatatggtgtagtattggttttaggcatagcattcagtgattcatcacttacatataacgtccagtgctcatcataacttgtgtcttccttaatatccatcacctatttagcccatcccccacacacctccctccatcaaacctcagtttattttgtatcattaagagtctcttgtggtttgcttccctctcttttttcctcccttcccatatgttcatctgtgttatttcctaaactccatatattagtgaaattataaggtatttgtttttcttcgacttagttcacttagcataatgcactctagttctatccacctcattgcgaatggaaagactaaattctttttgatggctgagtaatattccattgtgtgtatataccacacttatttatccattcatcagttgatggacacatggactcttcattgtttggctattgttgacaatgctgctataaacactgggatacttatgccccttcaaatcactatttttgtatcctttggataaatacctactagtgcaatagagtagttttcttttaatagttctattttgaggaacctctatactcttttccagagtggctgcacccattggcattcacaccaacagtacaagagggttcccctatctccacattctcagcaacatctgttgtttcctgcattattaattttagccattctcactggtgtgaggtggtatctccttgtggttttgatttgtatttccctgatgatgagtgatgttgagcatcttttcatgtgtctgttagacatctatatgtcttctttggaaaaatttctattcatgccttctgcccattaattaactagattatttgttttttgggtgcagtttaataagttctttatagattttggatactaaccctttatcagatatgtcattggcaaatatcttcttccattctcaaggctgctttttgtttagtgattgtttccttcactgtgcagagctttttatcttgatgaagtcccaactgttcatttttgcttttgtttcttttgcccccagagatgtgtctagtaagaagttgccacgactaaaatcaaagtggttggctgcctattttttcctctagaattttgatagttcctgtctcatttatgtctttcatccatttttaaaaaaagattttatttatttattcatgaaagacacagagggagagaggcagagacacaggcagagggagaagcaggctccatgcagggagcccaacatgggactcgatcctgggcctccaggatcatgccctgggccgaaggcggcattaaactgctgagccacctgggctgccctctttcatccattttgaatacatttttatgtatggtataagaaagtgatctgggttcattcttttgcatgttgctgtccaggtttcccaacaccatttgttgaagagactgtcttttccattggatgttctttcctgctttgttaaaggttagttgaccatatagttgtgggtccatttctgggttttctattctgttccattgatctatgtgtctgtttttgtgtcagtaccatactgttttgacaaagctgtcactacagctttgtaatatagcttgatgctttgaattgcttttcttttctttttcagggttgctttggcaatttggggtcttatgcagttccatagaaattttaggattatttgctctagatctatgaaaaatgctggtggtattttgataggaattgacttaaacgtgtagattcctttgggtagtatagacattttaacaatgtttgttcttccaatgtatgagcatagattttttttccccttttctttgtgttctctttaatttctttcttaagtgttctatagttttcagagtacagatcttttacctttatggttagggctattcctaggtattttatggtttggtgcaattgcaaatgggatcacacccttgattcctttctctgctgcttcatttttggtgtatagaaacataacaggtttctgtacattgattttatatcctgcaactttgctaaattcctgcattagttctagttttttggtagagtctttcaggttttctatctagagtatcctgtcaatttgacttcttctttgccagtttggatacatttatttctttttgttgtctgattgctgtagctagaacttccagtactatgtttaaaaacaatggtgagagtgaacatccctgtgttgttcctgagtgtagaggaaaagctctcagtttttccccattgaggatgatattagctgtgagtctttcatatatggcttttctgatgttgaagtatatcctatttatctactttgttgtgggtatttatcaagaatggatcctgtactttgtcaaatgctttttctgcatctaggaaaaggatcatatggttcttatcgtttcttttattaatatggtgtatcatgttgattgatttgtgaatattgaaccactcctgcagcccaggaataaattacacttgattgtggtgaataattttcttaatgtcctgttggattcaatttccaaatatcttgttgacaatctttgcatccatgttcatcagggatattagcctttaattctcctttttagtggggactttgttggctttggaatcaaggtaatgctggccttgaagaaggagtctggaattttccaaagtattttctttccattacttggaacagtttgagaataataggtattactattctttaaatgtctgatagaattctcctgggaagcaatctggccctggactttaatgggaaatttttgataagtgattcaatttctttgctggttacgcgtatcttcaaactttctatttcttcctgtttccattttattaatttgtaggcatataatttttaataatattctcttattgttgtttgtatttttttggtgttggttgcaatctcttctctttcattcatgatttatttctttgagtcctttctgtttcctttttgatgagtctggctagaggtttatcaattttgttaattctctcagagaaccagctcttatattcattgatctattctactggcttttgtttgtttgtttctatattgtttaattcttctctattccttataatttcccttcttcggctgggttctgttcttttgtagctcctttagatgtagttttaggttgtgtatttgagacttttcttgcttcttgaggaaggcctgtattgccatatacttcccttttatgactcccttgctgcatcccaaaggttttggagtctcatgttttcatttgcacttgcttccatttatttatttttttctttaatttcttggttaaccaattcattctttttttttttttttagattttatttattttttcatcagagatgcagagagagagaggcagagacacaggcagagggaggagcaggctccacgcagggagcccgacgtgggcctcgatcccgggtctccaggatcacgccctggaatgaaggcggcgctaaaccgctgagccacgggggctgcccaaccaattcattctttagtgggatgttctttaatctccctgtatttgtgttttctccaaattttttcttgtggttgacttccagtctcatagtgttatgttcagaaaatatgcatgttatgatttcagtctttttctacttgttgaggggtgattgtgacccaatatgtgatctattctggagaatgtacatatgcgcttgaaaagaatgtatattttgctgctttgggatgaaatattctgattatatgtgtttagttcagtgtgtctttcaaagccattgttgccttgttgattttctgtttagatgacctgtccattgctgtaagtcgggtgttaagtcccctgatatgatcatataattatcaatgtttctttatgtttgttattaattgatttatatatttaggtgctcccaatttggggttataaatattaaaaattgttacatcctcttgattgatagaactcttaattatgatataaagcccttcttaaaaaaaaacccttcttcatgtcttgttacaatttttggtttaaaaatctagtttgtttgatatagcatggttactctgtctttcttttggcattcattagaatgatagatggctattcgttacctcactttcaatctgcagatgttttggggtctaaaatgagtgtcttataggaagtatacagatgagtacttatttatttaacattttttttttttactggagttcaatttgccaacatatagcatatcacccagtgctcatcccatcaagtgcccccctcagtgctcatcacccagtcacccaaaccccccgcccacctccctttctactaccccttgttcgtttcccagagttaggtgtctctcatgttttgtcaccctcactgatatttccgactcattttctctcatttcccttttattccctttcactattttttatattccccaaatgaatgagaccatataatgtttgtcctctgattgacttatttcactcagcataataccctccagttccatccacgtcgaagcaaatggtgggtatttttcgtttctaatggctgagtgatattccattgcatacatagatcacagtttctttatccattcatctttcaatgggcaccaagattccttccacactttggctattgtggacattgttactataaacattggggtgcaggtgtcccagcgttccactgcatctgtatctttggggtaaatccacagcagtgcaattgctgggttgtagggcagttctatttttaactctttgaggaacctccacactgttttccagagtggctgtaccctgctattcaacatagtactagaagtcctagcttcagcaatcaggcaacaaacagaaataaaagacattcaaattggcaaagaagaaggcaaatctccctcttcacagatgacatgatattgtacatagaaaacccaaaagcctccaccccaagattgctagaactcatacagcaatttggtagcgtggcaggatacaaaatcaatgcccagaaatcagtggcatttctatacactaacaatgagactgaagaaagagaaattaaggagtcaatcccatttacaattgcacccaaaagcataagatacctaggaataaacctaaccaaaagaggaaaaggatctataccctaaaaactacagaacacttctgaaagaaattgagaaagacacaaagagatggaaaaatattccatgcttgtgcattggaagaattaatatggtaaaaatgtcaatgttacccagggcaatttgcaaatttaatgcaatccctatcaaaataccatggactttcttcagagagttgggacaaatcatctttagatttgtgtggaatcagaaaagaccccgaatagccaggggaatattgaaaaagaaaaccatatctgggggcatcacaatgccagatttcggttgtactacaaagctgtggtcatcaagacagtgtggtactggcacaaaaacagacacatagatcaatggaacagaatagagaacccagaagtggaccctgaactttatggtcaattaatattcgataaaggaggaaagactatccattggaagaaagacagtctctccaataaatggtgctgggaaaactggacatccacatgcagaagaatgaaactagaccattctctttcaccatacacaaagataaactcataatggatgaaagatctaaatgtgagacaagattccatcaaaatcctagaggagaacacaggcaacaccctttatgaacttggccacagcaacttcttgcaagatgcatctatgaaggcaagggaaataaaagcaaaaatgaattattgggacttaatcaagataaaaagcttcttcacagcaaaagaaacagtcaacaaaactaaaagacaacctacagaatgggagaagatatttgcaaatgacgtatcagatgaagggctagtatccaagatctataaagaacttattaaactcaatagcaaagaaacaaacaatccaaccatgaaatgggcaaaagacatgaacagaaatttcacagaggaagacatagaccaacaagcacatgagcacttttaaaaaaaatctattctaccatcctatgtctttcaattggagcatttagtccatttaagtaatgtcactgtttctgtaaattgtctcttgttctttttaatctttgttgctcttggtctttttgtcctcactcaaagagtccactttaatatttcttgcagggctagtttagtggtcatgaactcctttagtttttgttggtaagctctttatctctccttctaatctgaacagccttgctggataaaatattcttggctgcatatttgtcttattcagcatgttgaagatattatgccactgtcttctggcctgtcaagtttctgtggatagaccttctgcaaatctgacctgtcttccattgtaggttaaggactttttttctcttgctgttttcaggacttttctcttgtctgagtattttgtgaatttgactattatatgtgtcagtgatggctggctttttttgaatttaatggaagtttctgtgcttcttgggttttaatatctgttttttccccatattagggaagttttcagctataattggctcaaataaacctgctccattttttttttctctccttcttggactcctgtgatatgaatgttatcatgcgttaaggagtcactgaattccttaagtctacattctgatccaatgcttttctttccctcttcttttcagattcattgttttccattattttcagctattttcattattttcttttgctcactgaagttagtcagtgttgattgggggatggaggatgatgttaccctgctctctcctccaggaacagtgagttctgtcccatcactcttcaggaagccctcacagaagagcaaataatcacctctcttgtgtctccagcattcactagattcttgccttcactctgtctgcatcccagctgtctgcctgccaggcagcacagtactccatgttttatctcaggatgggtttcaaaattccaaatcttagagatgtgggtggtgtggatacacactgatcctctgggagagagcttgctatactgtagttgaatgtcagtttgtcccagaaatcacttgcatgactgcacagtagtttggaggttatggtaaagtgcacccaaaagctggcaccaaggtttgctgccctcagcatgtgtctttgttcctatgctagggaatagggcagcacattggcgctgctagtacttttgtcgctggagaggccatgcagacactcccaaatgtattccaagcaggggaactgtttctcctcatgagtctctggggatcctaagttcatgctgcctgctcccaggcctctgccttccttccccacaggtggactacttagcctgctgggtacaaccctggcaatggtgtatacctccaaaacttcagaatttgtgttctgttgcttttaaaaacttgctgtagccagactttctccttttccctggaaaagattttggaaaagactctttcttatgcaatcccttgcatgtacttccattctttctccctctcttctctctgtgatcaggggtccatctcctctgcagcacccacatttttctccctcaaatcaactctctgcagctcctatcttccacaatatggctgttgtttatacctccagttgtgcagtcttgctctcttagtcctcagattgattttttgtgtgttcagaatgatttgatatttatctagctgtgtttgaaggatgaggcaagcttaaggtcccccttctcctctgcaatttaaattcctctgcccaaacacctccttggtaatggtctttctcctctttgtatcctcaagactttgcctttctccttatcttgtaaaaacaccctgctgcctgactgtctttggattttccatatctatgtggattccttgaatgtatgccattatgtttgatttttgcctattaatctgtctcatgtcagtttcattcacagtccagctagaaagaccttgaggagcagagagaattcttcttccctgacaacttttcccctgatatgatataaatagttcaaagaagtaggctgaaccaattgatattctatgcatgattacagagcacataatatttaaaataaatattttcatgcattttaaaggcacctgctgatctacaggggtggtgctgctttgagagtggccaaggaatgtgcctgagaagtgtcatcacacagaagtgaccaggacttatttttctctcttaaagtgcacttagcatgtcagagtgtgccatgcagacattgtcatcttcatggagctggcaaggcaagtgaacatgaagtcagctttggagaaccaatgccatctctagaagggctccagggtctcaatttagtgatgcagttacagaacattgccatttgaacctcaagtcctgtagggttttctaatccagcttcaccagtcataaatacactgattctgatcttttttcagtatttgagtctacttcctaccacttagaactcagagaagagaagggtgattcactattcctaactttcaatgccaacttgacaaattgccttgcctccctaaatttttcagatgtaaaaagaggagattgctcaatactaaagttccctccagtagttcaatatttgcaaaatcaaagtgatatatcacaataacaaaagaaaggataaaaaacatgatcatcttgacagatgaagaaaaagcatttgacaaaatacattgtccaaaaattctcaacaaagtaggttttagggggaacatagctcaagataataaaaaccatatatggtaaactacagctaacttccttctcattggtgaaagactgagggctttttctctaagatcaagaacaagaaaaggaagtccactctcaccacttttattcaacataatactggaagtccttagccacattaatcagacaacaaaaataaataaaagacatcacaattggtagaaggaaagaagtaaagcttaccatttgcagatgtcataatactatacatagaaaactctagggatccctgggtggtgcagcggtttagcgcctgcctttggcccagggcgcgatcctggagacccggaatcgaatcccacgtcaggctcccggtgcatggggcctgcttctccctctgcctatgtctctgcctctctctctctctctctctcactgtgtgcctatcataaaaaaaaaaaaaagaaaactctaaagactccaccaaaaacacttatagctaataaatgaaataaaataagacactgatagaaaattaatatacagcaaacagttgcatatctataagctaataatgaagttacagaaggagaaattaggaaaacaatcccatttgcaattgcaccaaaaagactaaaatacctaggaataaacttaaggaagtgagatacatatactcttaaagctataagacactgataaattaaaaatgacacaaacaaatggaatgatatttcatgctcagggattagaagaattaatactgttaaaatgtccataccacccaaatcaatctagacattcaatgcaatctctactaaaaaacaacagcatttttttcacatcacttagaacaaataaaactaaaatttatatggaagtacaaaggaccccaaatgcccaacctattcaaaatacacaaagaactcatataactcaacaccaaaacccagataatctgattaaaaatggtcagagaacttgaagagacatttttccaaagaagaaatagagatggcaaacagacacctggtaagatgctcagcatcactcattgtcaagaaatgaaaataaaaaccacagtgaaatatcatcttacacttgtcaaaatggctgaaattaaaagataaaaacaataagtgttggcaaggatgtacagaataaagaaccctcccttatccactcctggtgggattgtgaattagtgcatctactgcggaaaacagtgtaatggttcctcaaaaaaattaaaaatagaattatcatatgacccaatagttccactactgggtattttctcaaagaatacaaacatactaattgaaaaaaatatatatacctctatgtttactgtagtattatttacaatattcaagatatggaagcaacacaagtgtctattgaaagatgaatgtatagctttaggttacaggtaaatagatatgtgatatatgtgatacacacaatggaacaatattcagccataacaaagaatgagatgttgctgctttcaacaacatgggtggacttacagggtattatgacaagtgaaataagtgagatagagaaaggaaaaataccatgtcatttcacttatatgtggaattaaaaaaataaaacaaatgggcacagaaacaaacaaaaaattgacttaaatgcagagaacaaactggtggttgccaaggataggtaggtgggggaaatgaatgaaatagataaagaggattaagacatacaaacttctacttataaataagtcacagagatgaaatttacagcacagggaatatagtcaataatattgtaataatgttatatggtgacagatggtgagttctcagtggtaggcactgagtaatgatgataattgtcaaatcaatatgttgtacaccagaaactaatataacactatatgtgaattatacttcaataaaaaaatgaagttttctccagctaagctacttcatttacaacttttttttttggtaacagattttttaaaggccagattcaactggttataatcaaaagcagccaaatgtgtatttccttcaaaacactgtagttatatccaggtcttcaacagaggtttgtgcaaatttgtgaaactttatttttattattattttttaaatttaaattcaatttgccaacatatagtataatacccagtgctcatcccatcatgtgccctccttagtgcccatcccccagtcaccccatcccccgctcccctgctccccttccgcaaccctttctttgtttcccagagttaggagcctctcatggtttgtcttcctctctaatttttccccactcagtttcaaacttgtgaaactttaaaataagaattaaaaattcaaaataaattctcatctgcactttctcctctatgtttttaagatactagaacaaatattcaaatattttatttcctattaaagcaattttataaatattgttattatttttttgtccatttaggatacagattttgtctggaaaattcaaaaggaaaaaatgtagaagaaaaaggaaaagagactatgaaaagttatatggacctaatgcatttattacataaaaactccagggtctttcacctccaaagctggatttctgtgaatcaaaatttcaaacataattgcaaactattgcgacatcattttttttttgcctaaaaaggatagaaaaaagaaaaaatttccatcatttacatatgttaaatattctgtcagagacatttatatatctgtataaactgaattccttgtaaaagttttgtgatgtagatgttttctacctccatttttatacagaactcagctgaaattcagagcgtctgatcaagttggtaaaatctgacgtttgaacccatatctgataagctcggaacccaagcacacccacaacgtgttgccatgggctacagtgggggtggcagtgtgcagtgtgtgaagctactgcacagcacactatggtgatgctgagaggataaactccctttactcccatcttctgtgctttttttttttttttaaagattttatttatttattcatgagagagaaagagagagagagagagaggcagagacacaggcagagggagaagcaggctccatgcagggagcccgacgtgggactcgatcctgggtctccaggatcacaccctgggctgaaggtggcagccaaaccgctaggccacaggggctgcccatcctgtgctctttttcaaagagcatctatttagtcataagcctcacatcctcaggaagcaaggattctttctttctttgagaactgttgtttccttaaatagtagatggaatgaggtcacacatcatgttcacaagggactgttttttgcttaacgcttgatgatacatttgtcttaaggtcaaataggaattattactagaactccactgaaatagaaaaggcaagtggaaaggtgacgaaaggtaggattgtgtcagacttccaagtatctatctatatagatatagttacacacacacacacacacacaaatcagattggatgtagaaaaggcaaaacctggagataaaaatttgaatgataggggacacctgcatggctcagtcagttaaatgtttgccttcagctcagatcatgatcccgggtcctgggatcaagcccagtggtatcttatcgcagattgatcttattggtatcttattgtattgcctgggatcaagccctgcatcggggtccttgctcagtggggatcctgcttctccctctccctctgcctcctgctccccctgcttgtgctctctctgtcaaataaataaaatattttaaaaaatttgaatgatagaaatgtattttacaggctttctaaaaatttgtttaagaaacagatttcagggatccctgggtggcgcagcggtttagcgcctgcctttggcccagggcgcgatcctggagacccgggatcgaatcccacgttgggcttccggtgcatggagcctgcttctccctctgcctatgtctctgcctctctctctgtgactatcataaataaataaaaaaaattaaaaaaaaaaaaaagaaacagatttcagtaactcttggttggctcagttggtggagcaagcaactcttgatctcggtcatgagttctagccctactttggcatagagcctacttaaaacaaaacaaaaacagatttcagttatgcaaagcaaaggaatgaaatcaagacaatttttgcttctttgctatagagggagaaaaactattagcagatgacattaaaaattcagagactggggatccctgggtggctcagcggtttggcgcctgcctttggctcagggcgtgatcctggagtcccaagatcgagtcccaagattgagtcccacatcgggctccctgcatggagcctgcttctccctttgcctgtgtctctgcctctctctctctgtgtctctcatgaataaataaataaaatcttttaaaaaattcagagactaattttattcttcatatatttttattttttataaaatacatgtaaaaaagcacatgcactagcctatatatacataagtatatgtaagtgattttcataaagtaaacaaatataggtaaccaccacccagatcaagaaatagtacatttctggaactctaggagtcttccttgtgcccctgacagttgcttttcctttcctcaaaatatctatcattgcttcaaacagtataaatcagttttgcctgtttttgaccttcatacaaacagaatcattcattatacttcctggtgtttggcttctttcactgaacattttgtttatgagatctcacgcatattgcctcatgcagcagatgctggttcatggtcattgctgaatagtatgccactgaatgaatgaaacacaattgatcaagtctgtgtttatagatttgatcattcccagttttcaccattatgaatgcctaagaatatgcacagttgtgtacccgactttctgttttccatggatctgttacatatatacctggagtggaattgctgccattggctgtgtatttggtcagtttcagcattttcagtatttcctgctacaagggtttctaaagtttctgcattgatttatattcccattaacagtgtttaagagttccagttgctccaagtattgctttagtatgatattgacaagcttcttaaaattagactttctagaggttgtggagtgatatcttattgcagatttaatgtattgccttgatgacaagtgaggttgagaacattttcctgtgtaattggcaatttgaatatgcttttttgtgaagtgctcttgtacgtcttttgcaacgtttcccaatatgttttctatctttttcttactggttggtgtgtgtattctgactctgagtcctctgttggatgtattgaaaatatcttctattttgtggattgcctttttctttcttagtattttattttttctaacagaagttttaatatagtatgtatcaatgttttcctttctggttcatgttttatgcattctacatgaagagacttttcctacctcaagtttatgaagatattctctggggttatctctgtaaattttattgtttcatctttcacattcagatctcaatatcacttccaattgctatctgtgtatggtaggagtttcctttgtccttttgaaagaatatcaattctagtcaattatccagggcaagagatagaaagataaggaatgcacaaaaatgaaacaaactatttcactgtaaagcactctcaaaatatgtgcatgtttggattacttgggcttgaagatgggattcttatttccaaaggttattggcagccgtccctatagagttagcagctttattctctgaaaagataagaatgagaaatagagtggcttttttggatactagaagacagcatcctgttcataagtgttcagtagctttagcaagggctttggatcaaatagaatttgatgtacatctcagttctgccacttatcagctgttactgctgcaggtgtttaactcactatgaattcttatctgcacaattaaaatcatacccatctcagtgggctaaagtgaggatgccatgagatcccagatgtgtcttgttcaccattgtgtctccagcaccacaacagcttatggcacatggtaggaactgaacactgctttcccatctgtcttacatcataattatttgttatttatactctaattaaaatagatttaggggcttcattggaggggggcagcaagtgattatgaagtaatttgggcaagcagagatgatctactttcatgattttgtcaaggcaaaattagatgaggcagcttaatattgacacccaagaagaaagtagaacatcattaatttgaaatgtccttgaagggtcagatctagagtaaccagcatgtctttgcaagcccaaacagtgctagaaaaaacaatttaatttcctgacataaggcaaagcaatgctgatagagtgataaatgcacatttcatatctttaatcatcagtaagtcctttccttttcatcccacctaacattcctgggaatatgctcctcagtgtaggccttggctctgaaccagcagcatcaatatcacctgagagctgttggaaaatcaggcttgggcccttccccagaccctctgactcagaacttgaattttagccaaatcaccaaggattctatgcactttaattttgaaaagcactggaccagacaggcaaaaggtctactaactggatagcccacatctgaaaaatcaagtgaggagtggaagcaaaggctagaatgcaaggagggtggaggtccaactgaacaaatgtcagccctcttgtacaaggtttggtgtacttgtgagcaaggtcattttacccacatatcctaggaactgggcactgcatgccctcagccagggctgttacctttccgtctatcttcagttcttggcctgtttcccacagtctcaaagtaaaatcataatgattggatctacttttactttggatttctatcttagctcaaggaggattgcagacaaactgaaggaagaagggaatggaagaaacgaagcaggtagggtctctaaaagacatcgcagctgaatccgtattatttctcattctgtcactgatttggccaaaggccattctccatttcaacctctgactgagaatcttaaactctctatctagactttgtatgtcctccctttgaagagaaaatccagcatgaatgcatgagagacacctaactctggaaaatgaacaaggggtagtgaatggaaagggaggtgggcgaggggttggggtgactgggtgatgggcactgaggggggcacttggcgggatgagcactgggtgttatgccatatgttaggtaaattgaactccaataaaaagaatttaaacaaatgaatggattgggctactgtctctaaaaaagcacatatttttgtcagttggtttgttgatgagtcaaagaaatgaaatgaatgggctggatcattataatggtctgtgaacctaaaagtttatgagttactagatggctaaattcattctgttaagtggatacctcagaacttactgtttatggtttaatatctctgttagaaattattataatggtaacaatcactaatatgtatggtttgattaccaggcactgtgctaaatgtcttagatacatacctatatttagttttagttatattgttaaaatataactaaacaagggagggagccctaatttcagtatttacttactgattcccagtgcttaagcgaaagtagaagtgctgtaacacaaagtattcactaataaattgacaacatgtggaatgaattcccattcaaataaacgtcattttcatttatgcaagtgctatatagtatgagagtcacagttttcccctcagtttcttgtttcttgtatcaaatgtccagtaacagtgaaagacaacagcaaagcgtaactgtatattttggaaaaagtgaagatttcataaagctgataaagaatatgttggaacactgctccaattacaggcaaggacattgataaatgaggattatgcagaatttagagtagctgacacctgacatttttttaaaataatgattttgacattaaaacattatgatcctgctttaagagccaggtccgaagtaaactgtttatcatgccatcatatgattttaacccctcaaaattatatacttattttattctttatactaaaaaatagcatatctatttaattttaactaggaactaaaatgaattcatagtcatggtttagtttaaattttaaagatgaaatttgcacattttttacaatttgctataaaacttatgatatttaaaacatattaacttgggcttttttcctatattagttctgctcaggtaaggaagctcttctattttattattatccatattatatatacagaaactgaatgtttgcatgggtttgcagcttgaccaagaccacagccagacatctagtctgcaacatcccatcttagttctacagcttattgctactaaaattatgactctaaaatcactctaacttaagaacttaacccaagaagtcaactgggagagaggaactttaaatcatttactttaaatcattgactgctaaagttcttgaaaataacatgatgatatgataggacctactatttagaatacagtaagaatttattatttgggagtcaagatgcctctccttccttagatcaagtgaatgcaactggcaataaaagaaaaactagaaatatggcatttggtggatcattggtataaagtaaatgtgagggattagaggaactgtagtactatgaaaccgtgtcatccaagcctgatgctacattggctcatgtctatggattgtgagtatatgactgattacacaaccacatcgaaacaagtgatgcaggacctggaagatctagatatgaacttccatttagagacatacctgtaagtcccagactttactggtatacatgctaacgtcagcagtgacaattccttaatgagataaactgcattagaaatgggctatgttctgggcttcacctctttgcattccagcggctcgaacacattgcattgttcatttctcttcctcatgtacttgaaggaagttcatcaatctcaaatttttattagataagcatatatccttgggagaggagagagaagggacagtttttatggcccattatcagagctccccatacagatattaagtgtaattttgttagagatgcaaacaatgaaaacaagaaattttactggtgagaaagacatgtttgaacaggggaagttagttgcctaccaatatcaattgtaacttaaggatcaattaaaaatgttaactctattcttaggaaaacttagtgtaacaaagaaatggcaagacacagataaagtattttataaacaaaatgcattagtgggtaaaaatgaggcacgtctatccatcactgctgagacatattttacctattgtaatgcccaaacaattatcatttgtgtgaattactcttctaagtacaaaatttcctttacttcctttttttttctttttaaaaagacaccacattaagagacagaaataagaatgcttatttcttttgatttagctcagaattgactcagcttcttgaatccagaggtttgtatcttttgccaaattcggaaacttttcagccattatttctttttttaatttaaattcaatttgggagggagggggcaagatggtggaagagtagggtccccaagtcacccgtccccaccaaattacctagataaccttcaaatcatcctgaaaatctacgaattcggcctgagatttaaagagagaccagctggaatgctacagtgagaagagttcgcgcttgtatcaaggtaggaagacggggaaaaagaaataaaggaacaaaggcctccaagggggagggaccccgcgaggagccgggctgaggccggggcgagtgtccccaggacaggagagccccgtcccgaaggagcaggagctgcaccgaccttcccgggcgaannnnnnnnnnnnnnnnnnnnnnnnnnnnnnnnnnnnnnnnnnnnnnnnnnnnnnnnnnnnnnnnnnnnnnnnnnnnnnnnnnnnnnnnnnnnnnnnnnnnnnnnnnnnnnnnnnnnnnnnnnnnnnnnnnnnnnnnnnnnnnnnnnnnnnnnnnnnnnnnnnnnnnnnnnnnnnnnnnnnnnnnnnnnnnnnnnnnnnnnnnnnnnnnnnnnnnnnnnnnnnnnnnnnnnnnnnnnnnnnnnnnnnnnnnnngagcaggagccactcggggggctcgggggcggctccgcggaggggggctcctgggcgggagcagcgcggggggctcgggggcggctccgcggagggggctgcggggcgggagcagctcggagggctcgggggcggctccgcggagggggctgctgggcgggagcagctcgagggagctcgggggcggctccgcggagggggctgaagggcgggagcgggaatccaccagcgcaggccccggagcactggacgccgggacacagcccaggatctggcctccctgggacaggcagaggcggggagggcccaggacagcaaggacactcctgccccaagctgagcagatcagcggccccgccccagagcctccagatcctgcagaccgagagctccgtggttactacgggagctgactccagggctccagagctgccccgccactgcggttgttcctcctggggcctcacggggtgaacaacccccactgagccctgcaccagggagggggctgagcagctcccccaagtgctaacacctgaaaatcagcacagcaggcccctccccaagaggaccagctagacagaccgaggaaaaacaacttattgaccaagcaagaaataaccaagttatttcccctggaaagttccagggaaagttgagggatttacagtatatagaatcagaggatactcccctttgttttttgttttctgcttgcttaccccccctttcctttttctccttttcttttttttttcttctttttttatttttcttttcttctttctcttccttctttttctccttttcccaatacaacttctttttggccactctgcactgagcaaaatgactagaaggaaaaactcacttcaaaaaaagaatcagggatccctgggtggcgcagcggtttggcgcctgcctttggcccagggcgcgatcctggagacccgggatcgagtcccacgtcaggctcccggtgcatggagcctgcttctccctctgcctgtgtctctgcctctctctctctctctgtgactatcataaataaataaaaaaaaaaattaaaaaaaaaaaaaagaatcaaaaacagtcctctcccccacagagttacaaaatttagattacaattcaatgtcagaaagccaattaagaagcacaattataaagctactggtggctctagaaaaaagcataaaaggttcaagagacttcatgactgcagaatttagatctaatcaggcagaaattaaaaatcaattaaatgagatgcaatccaaactagaggtcctcacgacgagggttaacgaggtagaagaacgagtgagtgacctagaagacaagttgatggcaaagagggaaactgatgaaaaaagagaaaaacaattaaaagatcatgaggatagattaagggaaataaatgacagcttcgggaaaaattttttttttcatttaattgaggttcccgagggcgctgaaagggacagaggtccagaatatgtatttgatcaaatcctagctgaaaactttcctaatctgggaagggaaacaggcattcagatccaggaaatagagagataacccccccaaattaataaaaactgctcaacaccttgacatttaatagcgaagcttgcaaattccaaagataaagagaagaagatccttaaagcagcaagagacaagaaatctctaacttttatggggagaagtattagattaacagcagacttctccacagagaccgggcaggccagaaagggctggcaggatatatttagggtcctaaaagagaagaacatgcagccaagaatactttatccagcaaggctctcattcagaataggagagataaagagcttccaaataggcagaaactgaaagaatatgtgatcacgaagtcagctctgcaagaaatattaagggggattctgtaatagagaaagtccaagggaacaatccacaaaaacagggactgaataggtatcatgatgacactaaactcatatctttcaatagtaactctgaacttgaatgggcttaatgaccccatcaaaaggcacagagtttcagactggataaaaaagcaagacccatctatttgctgtctacaagagactcattttttttgttttgttttctgttttttaatataaatttattttttattggtgtgnnnnnnnnnnnnnnnnnnnnnnnnnnnnnnnnnnnnnnnnnnnnnnnnnnnnnnnnnnnnnnnnnnnnnnnnnnnacataaggacgcctacagcctgaaaataccattatgtaccattcaatgagccatgtaccattcaaatggtctttaaaagaaagcaggggtagccatccttatatcagataaagtttatcctgaagactgtagtaagagatgaagagggacactatatcatacttaaaggatctatccaacaagatgacttaacaatcctcaatatatatgccccgaatgtgggagctgccaagtatatcgatcaattaataaccaaagtaaagacatacttagataataatacacttatacttggtgccttcaatgtagcgttttctacaatccacaggttttctaaccacaacatctccaaagaaacaagaactttaaatgatacatggacccgatggatttcacagatatttacagacctttacatacaaatgcaactgaatacacattcttctcaagtgcacatggaactttctccagaatagaccacatactaggtcacaaatcaggtcttaaccgataccaaaagattgggatcgtctcctgcgtattttcagaccataatgctttgaaattagaactaaatcacaagaagtttggaaagatttcaaacacgtggaggttaaggaccatcctgctaaaagatgaaagggtcaaccaggaaattagagaagaattaaaaagtttcatggaaactaatgagaatgaagatacaaccattcaaaatctttgggatacagcaaaagcagtcccaagggggaaatacatcacaatacaagcatccatccaaaaactggaaagaactcaaatacaaaagctaaccttgcacctaaaggagctggagaaaaatcagcatatagatcctacacccagcagaagaagagagttaataaagattcgagcagaactcaatgaaatagagaccagaagaactgtggaacagatcaacaaaaccaggaattggttctttgaaagaattaataagatagataaaccattagcttaccttattaaaaagaagagagagaagactcaaattaataaaatcatgaatgagaaaggagagatcactaccaacaccgaggaaatacaaacgatttaaaaaacatattatgagcagctatactccaatgaattaggcaatctagaagaaatggacctatttctggaaaaccacaaactaccaaaactggaagggaagaaatagaaaaacctgaacatgccaataaccagggaggaaattgaagcagtcatcaaaaaactcccaagacacaaaagcccagggccagatggcttccctggggaattctatcaaacatttaaagaagaaacaataccaattctactaaagctcttccgaaagatagaaagggacgtaatacttccaaactcgttctatgaggccagcatcaccttaattccaaaaccagacaaagacctgaccaaaaaggagtattatagaccaatatccatgatgaacacagatgcaaaaatactcaacaagataccagccaataggatccaacaatacattaagaagattatttatcatgaccaagtgggatttatgcccgggatgcaaggctggttcaacactcgtagagccagccttgcatcccggggataaatcccacctggtcatgataaataatcttcttaatgtattgatcatatcagcaagagaaaaaacaagaaccataggatcctcccaatagatgcagagaaagcatttgacaaaatacagcatccattcctgatcgaaactcttcagagcgtagggatagagggaacattcctcgacatcttaaaagccatctatgaaaagcccacagcaaatatcattctcaatggggaagcactgggagcctttcccctaagatcaggaacaagacagggatgtccactctcaccactgctattcaacatagtattagaagtcctagcctcagcaatcagacaacaaaaagagataaaaggcatttaaattggcaaagaagaagtcaaactctccctcttcgcagatgacatgatactcttcctagaaaacccaaaagactccaccccaagattgctagaactcatacagcaatttgccagtgtggcaggatacaaaatcagtgcccagaagtcagtggcatttctatagaaatgaagaaagaaattaaggagtcaatcccatttacaattgcacccaaaagcataagatacctaggaataaacctaaccaaagaagtaaaggatctataacctaaaaactacagaagatttctgaaagaaattgaggaagacacaaagagatggaaaaatattccatgctcatggattggcagaattaatattgtgaaaatgtcaatgttgcccagggaaatttacatgtttaatgcaatccctatcaaaataccatggactttcttcagagagttggaacaaattatcttaagatttgtgtggaatcagaaaagaccctgaatattcaggggaatattaaaaagaaaatcagagctgggggcatcacaatgccagacttcaggttgtactacaaagctgtgatcatcaagacggtgtggtgctggcacaaacacagacacatagatcaatggaacagaatagaaaatccagaagtggaccctcaactttatggtcaactaatattcgacaaaggaggaacgagtatccactggaaaaaagtctcttcaataaatggtgctgggaaaattgggcatccacatgcagaagaatgaaactagaccattctcttacaccatagacaaagacaaaactaaaaatggatgaaagatcttaatgtgagacaagattccatcaaaatctagaggagaacacaggcaacaccctttttgaacttggccacagcaacttcttgcaagatatatccatgaaggcaaaggaaacaaaagcaaaaatgaactatttggacttcatcaaggtaaaaagtttctgcacagcaaaaaaaaaaaaaaaaaaaaaaagtcagcaaaactaaaagacaacctacagaatgggagaggatatttgcaagtgatgtatcagataaagggctagtatccaagatctataaagaacttgttaaactcaacagcaaagaaacaaacaatgcaatcatgaaatggtcaaaagacatgaacagaaatttcacagaggaaggcatacacatggccaagaaggacatgagaaaatgctccgcatcccttgccctttagggaaatacaaatcaaaaccacaatgagataccacctcacaccagtgagaatggggaaaattaacgaggcaggaaacaaccaattttagataggatgtggagaaaggggaacactcttgcactgttggtgggaatgtgaactggtgcaaccactctggaaaacagtgtggaggttcctcaaagagttaaaaatagacctgccctacaacccaccaattgcactgctggggatttaccccaaagatacagatgcagtaaaatgttgggacatctgcaccccgatttttatagcagcaatgtccacaatagccaaactgtggaaggagcctcggtgtccattgaaggatgaatggataaagaagctgtggtctatgtatacaatggaatattactcagccattagaaacaacaaatacccaccatttgcttcgacgtggatggaactggagggtattatgctgagtgaaataagtcaatcggagaaggacaaacattatatggtctcattcatttggggaatgtaaaaaatagtgaaagggaataaaggggaaaggagaaaaatgagtgggaaatatcagagagggagatctccagccctggagccaagagctcccaatgtgtgccaactacagactcctatagtgcccacttgcccagatcctcctggggacaggtggaggaataggggcactgatttgtacaatttgcagggcgcctggcagtgggagagctttcactgtcttgagtgttcaccagctccacctgtccccgaagaagccgagggttgcttgcttctgtctgttgcagggccctggggcagagagcattcatcctctccagtgcacacctgctctgcctctccagatgcaagtagagggttgttgcattctagtcctttgcagggacccagcacaactccggttccccaatccttccagggctgcagtttatggcacaagttgagcctactcttgagctcactgacaacccatttcttgcctccaaagcttaggaacttcgctggcttaggtgctcctgttctttttgtgcctccaggaatattgagaattcactgtcccttctacgattctgctgtttcaccactgagcatttttcaggcagagaagactctctcagaagccaatttctaaaggtcctgattttgagttccagggctgtatcactttccttcagcgagcttacaaaggctccctcctcctgccatttatcttcagatatattccatttctcttctctgcaccccaatagaaagtggtcacttttctctctgtagcattccagctgttctttctttacatctcaggttgaactcataggtgttcaggatggtttgaaagttatctagctaaatttgggggaccagatgaaatgaggaccctactcttctaccatcttgcctctcttccctaaacaaatacatatcttaagggagaaatagaaaaaatccagtaatagtaggggaccttaataccccattgtcagcaatggatggatgctccaggcacaaaaccagcagggagacattagagtgaaaccacaccttagaacaaatgacagacatttatagaacattctgtccaacagcagaggaatacatattcttcttatgtgcatatggaccattctccagggtaaattatgaatgaagcacagaaatcttagcaaatttagaaagattgaaatcaacaaccaacttctctgaccctgatggtatgaaagtggaaatgaacaagaggaaagtgagtagatctaagcatatgtggaaaataaacaacataattctaaataacctgtagttcccgggtctgttttgaaaacatatgcagaatgacagctgtattagttatattattaattagctccatgttgtattttattacctacttaattatctttatatgcctcaacctcatgcacaatcaatcattaactttccttcttacccctattccttgtttacccactgattatagacacttaatggggaccagatggaaacaattatcttgatactatctgacaaggtcttgaatggtgactcattttcaagaagaatgcagagctccagatgtttcaaggcccaccctctcaaggtttccaaaatcacctcaccctcctctcatattactcacctccttcctcaaacatatagaagctgtcctttgactccacagaacaaggcagctttgggaatgatccccagccttctcattggactgtccttgtgataatgaagcttcgtttgcttcaaaaccggtgtctcagacattggcttactgtgcattgggtgcttgacaagtctgagtttggtaacgcaaccaatagatgaaagacaaattcaaaaggaaacaaataatgatctcaaacaagtgagaatatgaaaatagatcaaatgtcatgggttgcagcaaatgcagttctgaggggacgtttatagtaataaaaattaggaagatctcaaaaataattatctacctttacacttcaagggactagaaaaacaggaacaaattaaccccaaagttaacaagaggaaggaagtaatgcaaaccagagcagaagtaaatgaaatagagaccaggagaacaatagaaagtatcaatgaaataaaaagctgattcttgaagatgatgaacaaaaattggcaaatgttagctagtctaaataagaaaaaaagagactcaagaaaataaaattagaaataaaagtgagctattacaactgataggatggaaatacatagaatcctaagagactatgaacaattgtcacactgaaggggctgaatgaagatatcagcagtcagcctcagaatctgttcttcccaggaccattggctacctgacaaattaaagtgatttgaagcctttttttttctaaccagggctcattttgtcttttgtttctctggctctgttgggatcctttatcctgaggcagaaactcctcaaagatagagaggatgggggttaacccatggtggggaattgactgggcagtggctgtgtgcaaggccaggcacttggtcctgagcagacagggctgggggaggtaggggactgaaatttaggtgaactcagcaaacacaggaccccaagacagggtacatgtgctgggagccacagtgtccttgaggagggttcagttggactctcatgcttctcagtgattccctggtcataattagaggggagcagaacagcacacaggagttggtgtgtccttcctggggaggccctgagtctgggctctgtgtccctgggcctctgtggtggcctgtgattaatggaggaggcccctgtgctgaggagggaaggctttggtcctgtggttagagcaagctatgaaagctttccatgaggataggaaggctttatgttatcagggttgtgggggtccccaccccatgagcataatgagtggtaggaaaggctctgctcctgctgggaactgttgccagccctgagccctgtgtctgctctgaggtccagagctgtgggctggccctgcctcgcctctataggtgttcacctgcttcctgccctgtgtctccccagctctgaggaaatggaggatcgctgtaggggctctttgctctcccatctcccctccctgcttctcctcttccagctgccctttgggggtctgcaggtgagtgtgtgccctccccctgcctatgtctccgtcaggtggatgagagtctctgggagccctgatggctattggtggaagccctggctctaggaagatgctgcaaacctagtttgcaaactgcaaaccctagttgcagttaaacttttaagaagagtctttaaaccataaaataggacaagagaccatagcagttgtctaatgaggagtttatgtcttataaagtaaaaaatgtgaatttcattatgaagaatgtgaaaataaatttcccttcattgtttgtttcctgactttattggtctttaagcagttattcagttattaattctttacactggagatatttatagggtatcaagtttgtgttaggtgctactctatgttcaaaacagacagagtgcctagcttcacagagcttatattccagcaagagaaagtgaatactaaattccacaaccccatataatctttttttttttccatataatctttatcttttagaaaatttgagatcataggtcaagaaagtagagcaaggcagtgtagtcaggggtacaggagttgctctgggcaggcagcagtactccataaggtggccagtgtaggcagtgagatgggaacaaagatgtgcaggaagtggtgtaccagtctgtgaggatccccatggaaagaacatctccacagtgaggagcagccagagcaaagctggcagtgtgcctaggtgttcaaaggtcagaggaggcaagtgttggctggaactgagtgagtgagagagagaagcaagagttggggatcagagaacacttggcggtcatccctatgaggctttcaggtcacttggggaaccagagaggcattgtaggtctttgagcagaggaaggacatggttttacttataggttgaaagggtcataactatggagttgtagaaaagatgtcatagggagactattcattttcatccccaggtgagacagatagtgactcaggctatcattgactaccactggaggtgagaagttgctcttgagattcactggggcttgtcctacagaacagtcatgtcatagcatatccaccagggctcagaaggccaggggctatgaaggggtagtggatttgggatgaactttcttttttaacaagtagtgatttaagccctgagcatgatgtagtggagtaggttttaacagaagtagccgtggctctaatttgtgtacattgaattcagcaaaagacaaagacatgtgcagaaataataaactgaggaatgggtgtggggaagttcttgagtatggctgaatgagcggagagtttccacctatgccacaggtgtgttctttggtcagttttcactcctgtcccaggggaaccagggtagagctgtggttctctgagtgtggcccttggaatattagtatcaggatcccatctacctccttagacatgcacatagttggacccaccccagacatactgagccagaatctctggaggtggagcttagcagtctgtgattcttaagcctcccagatggttgtggtgcctgtgaatgttacaactactgagttagagagtccttcatggaagggcttggagccaggagcacaggctactgacagtctttttgatatcattactgggtctcaaagttgtggtaagaggaaattgaccccattcagagtagtcacagctgagtccctcaggtcagcgccccccacttgacacttgctcacctgcttgcgtctgctacctgccagtgtgagttccctgcatctctctagctttttcactcctgtgtctgtgtccacagaggagttcatggtgattggcccctcaaaacccattgtggcagtgctgggtgggaacatcacattgctgtgtcatgtgtccctacccatggagaacatggagctacggtggtttcattctaggttttcagaagtggtgttcatatatcaaaaccagcgagagcagcaagagggacagttggcgcaatacacagggcggacgtcgctggtaaaggacttcctcccctggggggaggctgctgtgagcatccacaaggtccaggctttcaacaatggtctatatacctgcttcttcagaaagggaagcatctatgaatctgccagttttgaactgatggtggcaggtgagtggttgacctctatctagagtcctatagtattggagttgggagcaacctcaggggctcagtaaaccagcccctccttttaaatatgagggaaagaagtgtcattctcatttatccatttattcaacatgaatatatagaattcctaataagtgccagatccccttcaaggcacctagctacatcagtgaaccaaacaaagacccctttcctgcagtttatattctagaggaaataatagatgtacagatgattatagaagatgttagatggtagtgggtagagacttaaccaagtcgatatctgaggatggatgagagttccaagcagaggaacaccaatgtgaaacaactgagatgggagtgtgtccagtgtgtctgggcacacaaggaggccacatggttggtgagacaagtggatgggagggtagtgagaggtgagaatcctggaattaagaggtgttgctggcccatgggcacagaaacagggttgatttggaaaagttcatgaggagtatgtacttgagcaggtacttgagtgaaccagacagtgctctaaagatcccctctggttcatggactggatcatgaggagtatgatgactgtggttatgaccagttaaccaaatagtcctgggctggaatatgtgtgtctttaggggggaaggtgagggaagttgggaaggaagtggacagggattttgtgggtggcagtgatgccagattataaaaggctttgtgtgctgtggtatagagtttggatgcagagatgagagaattttaaacagaacagtagagggaagggtgtgtctattggaaagtttgctttgagagctctaagtatgtgtatatggaagatgagtaagactggaggcctggatatagttatggcatggagaggagggctgcctgtattcatataggggcagtagggtgagaaaggtgggatctggcattagggaggtttaaaaagtagacccaactgagtgagtaattttagagacagagtttgggagtgggcaaagaagggattgcaaagtttcccaaggtgttttttgtttttcttccttttctttctttccttccttccttccttccttccttccttccttccttccttccttccttccttccttccttccttccttccttccttccttccttccttccttcctttttctttctttctttctttctttctttctttctttctttctttctttctttctttctttctttctttctttctttcgattgttgtttaataatagaaatactaatacagttgccatttgctgcaatagtgttgttgtaacatagacctagaaatcttactggcatatagcaacaaccattcatttaatttgggcattaagggagttcagctcatctgtactgtatttagctaatcttaactgggcttacgtatacatatttggtgatgtaggggaaacataattaaaaagaaatctcctatggggcgcctggttggctcagttatttaagcatctgactcttgattttggctcaggtcaagatctcagtgtcctgggatctagacccacatagggctctgcactcaggtggaatctgcttgaggatttcctccatctgcccctcctttgctctctttctcttccagaggaataaataaataaataaataaataaataaataaataaataaataaaaatatataatataatatataataatatatataatatatataatatatataatatatatatttattattttataggagttcaatttgccaacatatagcataacacccagtgctcatcccgccaagtgccccctcagtgcctgccacccagtcaccccaacccctgcccacatccctttccactaccccttgttcatttcccagagttaggtgtctctcatgttttgtcaccctcactgatattttcactcattttctctcctttcccctttattccttttcactaatttttatattccccaaatgaatgagaccatataatgtttgtccttccctgattaacttatttcactcagcataataccctccagttccatccatgtcgaagcaaatggtgagtatttgtcgtttctaatggctgagtaatattccattgtatacatagaccacatcttcgtaaatacatctttaaaaaacaaaatctcacaatgctgaaatcttcacaaagataatagggaaagaaaatattaaaaaagaaaatgtttaaaaatatttttaacattgaattatcattaattagaatgtgatgagcatcacagagatgcaaagagatacaaagacagaacagatcttatccttttatgcagctatgcagatagaactcattatatacatgtcctgaggataaacaattactaatttttgagtaagtggacatgatagcaccatttgacacagacaatacactctaaatttacttggtagctggggtgatcatctatgatagctagttggctttatctggaacccccccccccccaattatcctatgtttatgacaagaagtggttttataatttggatcctggtgactagtggtgttaggcacctaccctggcacaggaagtgggagagaggagtgctgtcttccttggtgttaatggtttaaagagaggcctttcaggtccttaagacatatttctggatcataatgctggcaaaaagcctatctagttttcacaaaggattttatttttattttttaatttttattattcatgagagacaccgagagaggcaaagacataggcagaacctgctccatgggctttcctcatctgggccactacttcccatccagtgctagggaacatggggtgatggtggtccttggagtcattcataaaccttgggtttattccagtgcttatctatctgctgcattcccagctgtttagctttcagtgcaatttgttctcagtcagaatctggaaaccaaaagtcagctgctgtgagattttgtttaagaaactgtataaataggggtacctggatggctcagttggttaagtggctaactcttgattttggctcaggttatgatctcagggtcctgggattgagccccatgtttggctcctcacccagcaaggagtctgcttcaggattttctctctccctcttctgacccctctccccacactctctttctctcaaataaataaatattttaaaaaggaagctatataaataaatgggggcattaagtttagaagtgtgacccctcaagtaatcaatgcagtgagagtctgttctctttagttcttagaggagctgatcacaaagtaatggttagaggactgggcagaccatgtgttgaagtatggtggtgtgagctgtcagtgctccagaatagctatgtgttttctgagaacgtttgaccacttttaccccagaggtcaccttacctcctgtcatgaaatcacttccctttttgggttatttcccaaatacctctttgcttgataagactgggtgtaataatgatttcttaacattttggagtaatttatattttattccataaaatattttttgtcattgcatacttttttattcatcacaaataaatttgatgcagctagacaaaacattttgaggtttttaaaaaaatttttcactggagtccaatttgccaacatgtagcataacacccagtgctcatcctgccaagtgcccccctcagtgcccatcacccagtcacctcaaccccctgcccacctccctttcaactaccccttgttcgtttcccagagttaggtgtctctcatgttttgtcaccctcactgatattttcactcattttctctccttttccctttattccctttcactaatttttatattccccaaatgaatgagaacatataatgtttgtccttctccgattgacttatttcattcagcataataccctccagttccatccatgttgaagtaaatggtgagtatgtgtcgtttctcccatccaagtactaaccaggcccgaccctgcttagcttccgagatcagacgagatcgggcgcgttcagggtggtatggccgtagacgtatgtgtcgtttctaatggctgagcaatattccattgtatacatagaccacagcttctttatccattcatctttcgacggacaccgaggctccttccacagtttggctattgtggacattgctgctataaacattggggtgcaggtgtcctgctgtttcactggatctgtatctttggggtaaatccccagcagtgcaattgctgggtcataaggcagttctatttttaactctttgaggaacctccacaccgttttccagagtggctgcaccagttcacattcccaccaacagtgcaagagggtttccctttctccacatcctctccaacatttgttgtttcctgtcttgttaattttccccattctcactggtgtgaggtggtatctcattgtgattttgatttgtatttccctgatggcatgtgatgcagagcattttctcatgtgcttgttggccatgtgtatgtcttctttggtgagatttctgttcatgtctttgcccatttcatgattggattgtttctttgctgttaagtttaataagttttttatagatcttggatactagccctttatctgatgtcatttgcaaatatcttccccattctgtaagttgtcttttagtttttttgactgtttcttttgctgtgcagaagctttttatcctgattcagtcccaataattcatttttgcttttgtttcccttgccttcatacattgtatcttgcaagaagtttctgtggccaaattctcctctaggatattgatggaatcttgtctcacatttagatctttcatccattttgagtttgtgtatggtgtaagagaatggtccagtttcattcttctgcacatggctgtccaattttcccagcaccatttattgaagagactgtcctttttctagtggatagtctttcctgctttgtcgaataatagttgaccatagagttgagggcccatttctggattctctattctgttccattgatctatgtgtctgtttttgtgccagcaccacaccatcttgatgatcacagctttgtagtacagcttgaaatccagcattgtgatgcccccagctatggttttctttttcaatattcccctggctgtttggggtcttttctgattccacacaaaccttaagatgattagttccaactctctgaagaaagtccatggtattttgatagggattgcattaaatttgtaaattgccctgggtagcattgacattttcactgtattaattcttccaatgcatgagcatggaatatttttccatctctttgtgtcttcctcaatttctttcagaagtgttctgtagtttttagagtatagatcctttccctcatgttggcaaattgaactctgataaaaaaatcctttccctctttggttaggtttattcctaggtatcttatgcttttgggtgcaatgataaatgggattgactccttaatttctctttcttcagtttcattgttagtgtgtcgaaaaaccattgatttctgggcattgattttgtatcctgccacactgtcttttttttttttttattggtgttcaatttactaacatacagaataacccccagtgcccgtcacccattcactcccaccccccgccctcctccccttccaacacccctagttcgtttcccagagttagcagtctttacgttctgtctccctttctgatatttcccacacatttcttcccccttcccttatattccctttcactattatttatattccccaaatgaatgagaacatataatgtttgtccttctccgactggcttacttcactcagcataataccctccagttccatccacgttgaagcaaatggtgggtatttgtcatttctaatagctgagtaatattccattgtatacataaaccacatcttctttatccattcatctttcgttggacaccgaggttccttccacagtttggctatcgtggccattgctgctataaacatcggggtgcaggtgtcccggcgtttcactgcatctgtatctttggggtaaatccccaacagtgcaattgctgggtcgtagggcaggtatatttttaactgtttgaggaacctccacacagttttccagagtggctgcaccagttcacattcccaccaacagtgtatgagggttcccttttctccacatcctctccaacatttgttgtttcctgccttgttaattttccccattctcactggtgtgaggtggtatctcattgtggttttgatttgtatttccctgatggcaagtgatgcagagcattttctcatgtgcatgttggccatgtctatgtcttcctcagtgagatttctgttcatgtcgtttgcccatttcatgattgggttgtttgtttctttggtgttgagtttaagaagttctttatagatcttggaaactagccctttatctgatatgtcatttgcaaatatcctctcccattctgtaggttgtctttgagttttgttgactgtaacctttgctgtgcaaaagcttcttatcttgatgaagtcccaatagttcatttttgcttttgtttcttttgccttcgtggatgtatcttgcaagaagttactatggctgccacactgtctaattgctgtatgagttctagtaatcttggggtggagtcttttgggttttctaagtatagtaaatgatgagcatcttaatttaaaaatactctattgctgaaaaatgctaagcatcatctaagctttcaatgagtcacagtctgtttgctggtggaggatcttgcctcagtattgatggcagccgactgatcagggtggtggttgctgaaggttggaatgactgtgacaatttcttaaaataagacaatgataaagttggctgtatcaatttactcttcctttcttgaatgatttctctgtagcatgtgatgctgtgttcaatagcattttactcatagtagaatttctttcagaactggagtcaattatctcaaaccctgttgctgctttatcaactaagtttatgtaatattctgaatcccttgtcatttcaacaacctttatagtatcttcaccaggagtagattccatctcaagaaatcactttctttgcttttccatcagaagcaacccctcatccattaaagtttgatcatgagattgcagccatttagtcacatcttcaggctccccttctgattcttgttctcttgctatttccaccacatctgcagctacttcagccaaagaactcttgaactcttcaaagtcatccatgagagttggcatcaatttgttccaaactcttgttaatgttggtattttgacctcttctcatgaatcataaatgtttttaatggcatctataaaggtgaatcctttccagaaggttttcaatttactcgcccagatctatccaaaggattactatctgtggcagctatagctttaattaattaagttgattaattagaaaaaataatttgagtgtagttaacatacagcattatattagtttcaggtgtacaatatagtgattcaacagttccatatattactcagtgctcatcaagataagtgtactcttaattctcttcacctatttcactcatcctgtcatcctcaacatgtttgtttgtttgttttccataaatagcatggatcccagctcaggatactgagatcaggacctgagctgaaatcaagagtgagaggcttgaccaagtaaaccacacaggcaccctgaaatgtacttaataaataatgagacttgaaagttgatactactcctttatccatgggctgcagaatggatattgtattgacagtcatgaaaaccacattaatctcattgtacatctacataagacctcttgaatgacaaggtacattgtcaatgagcagttatattttgaaagtaatctcttttctgagcagtaggtctcaacaatgggcttaagatattcagcaaaccatgttgtaaacagatgtgctgctatttaggctttgctgatccatctatacaaaacaggaaaaatagatttagtgtaattctggagggtgctctgaaatggcttttgaaatggtaaaggaacattagctttgacttagtctagctgctttctcccctaacaaaagactcagcttgtcttttgaagctttggattcaggcactgacttctcctttcttattatgaaagtcgtagatggcattttctccccaatataaggcatttttgtctacaatgaaaacttatttagtgtagccattttcattacttagctagatcttctggataagttgctacagcttctacatcaacacttgctgcttcaccttgcacttttatgtttgtagagatggcttctttgcttaaacctcatgaaccaaactctggcagcttcaaaatttcttctgtagcttctttacctctctcatccattgtagtagaactgaagagagttagggcctaattctgggttaggctctggcttaagggaaggctgtggctagtttgatattctatccagactactaaaactttctccatgtcagcaataaggctgctttgctttcttattatttatatgtttgctggaaaggcacttttaatttccttcaagaacttttcctttgcattcacatcatggctaaatatttggtgccagaggactagctttcagccttacttagctttcttttattattattaatattattaatattatttttttattggagttcaatttgccaatatatagcataacacccagtgctcatctcatcaagtgcccccctcagtgcttgtcacccagtcacccccacccacctgcccacctccctttctaccaccctttattcgtttcccagtgttaggagtctctcatgttctgtccccatgatatttcccactcattttctctcctttcccctttattccctctcactattttttatattccccaaatgaatgagaccatataatgtttgtccttctccgatggacttctttcactcagcgtaataccctctagttccatccacgttgaagcaaatggtgggtatttgtcatttctaatggctgagtaatattccatcgtatacatagaccacatcttctttatccattcatcttttgatggacaccggggctccttccacagtttggctttgtggacattgctgctataaacattcgggtgcaggtgtcccggcgtttcattgcatctgtatctttggggtaaatccccagcagtgcaattgctgggtggtagggcaggtctatttttaactctttgaggaacctccacacagttttccagagtggctgcaccagttcacattcttagctttcaacatgtcttccccactaagcttaatcatttctagcttctgatttaaagagagacatgtgactcttcctttcacttgagcactgagaactgtcacagggttatttactggcttaatttcaatactgttgtgtctcagagaatagggagacagtcagtcagacagacagacagcacatctgaacactgcacagcacttgtcagttaagttcatcatcttatatggctggggttcatggtgcccccaaacaattacaacagtaacatcaaagatcactggtcacagaccaccgtaacaaatataacaataatgaaaagtatgaagttttttgaaaattaccaaaatgtgacatggagacaggaagtgagcaaatattggaaaaatggcaccaatagacttgcttgatttagggtttccacaaaccatcagtttgttaaaaaaagggggagggaagagaaagaaaaagaaaaaggaaaaggcagcatctgtgaaatgtgataaagtgaagtgcaataatataaggtttgcctgtattaagaatgaactatttcttagtcactgccatctcctttgctgtcaatttgctcctattcactatccatcatgctcctaaaatgtctcctccatggacttaactgcaactgttttattcctctgtcaagtttttgttctcttttttcttacatgctatttctcagtttctttgcttgttctccttccttttttttttaaaactaagtttcaacaaagcacaactatgtaggcttatagtctgtcttttggagatctgatctaattctcattatttgaatatctcctacaagaaatgaccctttaacctgtaccctgttcgtatccataattacatctctcctcaatctaaacaattttttatttttctccttgtggatttcccttctatgattgatgtttttatgttatcagttaccatgcatcaaattggagtcatcttgaatttctccatgtcacatacattcagtttgttgttcaagtcagttcatttctcttttgaaatgattctcacatgtgtttctttcattttattctcattgcctccaaattagttaggctgttgccttattttctggctgtatcattacagtcatcttctagttgatctcttagtcttctttctgttgtctaacccaccagtttacactttctgaaagacaactcaggttatatctgttgcctatgaaataagtggaataaaaatccacttaaaagtttaagctaataaataaaataaaagcttaagtccctcagaactctggtttcttattccaaccttattttcttctaataccctcagcatttgccaatttcaatcatttaggtttcaccatttgtcatgatttttagtatatctaaatagaattacactattttttactttttaaattgactcaccatacttaatctcatcttactctataatttcaaaaatcatgggcttgatatactttaaaaaatttacataaaagtaaacattaaatattactataacaatgtttatttggggaccacctgaaatcatcttctacatcagtggggtcctcattcccttttgtgtccttatccttgaggagctttgctgtactcaaattctctgctctcctctctgcctttacaatagtctttccatgttctaaactttttttcttctcacttcctttcccagtcaattaaatttaataaaccttgtggtaggcaccgaggatggagatcatggtaagacacagatcttccttcaaggggtttatcctctggtatagagggattactaatccaggggccccaaacaatatacaaatccttcccatcgtcttttgatgcccagttcaagttctactgcctgtgaaagtctttaatgtattatccctaaacaaagagattttccttttcttattttttcctgttgtatttttgctctgaattttttgatatttatatttttaacatggttttactgttttcatttctgtttatattattgataaagatattttgcatacctttacagatgttgcacctagtagagactaagtatatagctatttggttagataggaaaacaccatattttttgagaaaatacagttctacatttctttaatcagagtttaatttttatttgtgttttcctgactgatacctcgtgagtgtgtattctgaaaaactcatatttagaagctgaagtttgagactgagggatctacaaagaagcattttatgaagcttttgccagattataaacaaagaagcagaaaatttgtgactaaaaagaatggagtatattatcttaatctcaatcacagaagatggagagctagttttgaagtctatgtgctagagcaaaattattcaattctgttttgttagtttatgaaatctagtgttattttttcttccatgagatctttcttttactgctcattttctttccttcgcctacttttgggtctatattcttgttctctttagccaccttgtttttatacttttttttcatagaatttcctttcatattcttgtcctttctcttgccttcaccttcattcttgcccaggtcctttgtcccgttctcctctcccttatagtccttgtcctcatccttctttatatagtcctctccattcttgtccatgtcctctgtcctgtcctcctcctcctcctcctttatatactcatgtcccttcttgtccatgtcctctgtcccatcctcatatcccttatagtccttgtcctcctccttctttatatactcatctccctttgtatctatgtcttctgttctgtcctcatatcccgtatagttcttgtcctcctcctcctttatatactcatctccttccttgtccatgtcctctgtcctgtcctcatcttccttattgtccttgtcttcatcctcctttatatactcatctccctttgtatctatgtcttctgttctgtcctcatatcccgtatagttcttgtcctcctcctcctttatatactcatctccctccttgtccatgtcctctgtcctgtccgcatctctcttatagtccttgtcctcctcctcttttatatactcatctcccttcttgtccatgtcctctgtcctgtcctcatatccctttatgtccttgttttcatcctcctttatatatttatctctcttcttgtccatgtcctctgtcctgtccttatctccctttgtgtccatgccttctatcttatcctcatgtcctttcttgaccttatccttctttttgttcatttcctcccccttgtatttattcttctttaagcctttgccttccttcttgtctttatctgcttttgtgtctttgtcctccatgtcctcatctcccttctttttcatgttcaccttttcttcttcttcacctttatcttttacgtcacttcctttctttgattggcccttatctatttcctttcctttatccatgtcctcggtatcttttcttttgtcttctatttctcttctctcttctttactctgagttttctcaggaagcttttcaattttcactccagttttctgtttttgtctcttttcataggtctcagggccacttatttctcccttatgctggtatttaggaccactttggatagtttgggatggaactatctgaattctcaaacgaatatcatgttttggggttttccttgcttctttagtgtttctttttacttctgtttttgcattttctttcaaattacctgaaaatataacagatgatataataaaagtgcatacataattcatatcttagggctttttttattgtcaagttttgttatataacacttatactttgctctaaatttgaaacaatcgatttgttttctcaataatacaaaatttgtgaaactgtacacatatgaaggattagataagaagttcttgaaatacagactctccaggaattgaactaagaaaagggaaaaatacaacacaaaggaattagtaattcctcagtagaatatggctagagtgtatgattaaaataaagatgtagtatgaaaaggataaccttctctgagaaaattacattattatatgatatttatgattccttaaggaaatttcatctccttttgagtaataaagagaattgctaagccagcagtttgagagacaatgaggctggaattttccttaactatctttttttttttttttccttaactatcttataggttttcaagaagtgtgttttaaaagtgatttggagatggtagcaatacttaaggtagtaaaatagcttttttttttagtaactttgctaataataggaatatttattgttgtgtgatacatggaaaactaaaattaatgttttcataaataggaaaaatagagcatgattatttgttttattgaaattcagtttcctttagttaatcttttcatgattaatttctcttttaattgatcttgagtgcttgctaagtgtcaataaccctttccttacttaatctagcgccaataaaacaagtagttaccaaaatatgagaggaaacattttaagcaagtaatgagttaggagtctccccaaattgggagtgggtcaaaagtttatgagagctcatagttgtgcatcatagtggcctccctttataagactcccagatatttggcactggacattcagatttattcagttggtacgtataccagtacacgtgctctctaattggctcttctctttggctggagtcaaggtgaatgtggcatgagctgtattggacaacaacccccatccacatttcttcttctctgtgttttattagtgaaggaaaattaatgctggaacatacagcaacttgaaagttatgagagcaagcatgaagtaattcataattatgaaactggacagatgatgttgagggtagagagatgggggaggatatcataaagaccattttcaatagagcttccaacctggaatgtaggcattgtggaataggtctgttcttattttgagaaagcttgttagactgaattcaggatagtgaagagatcattggatgaggaatttaaaaatatttgagttctgtcactatgtggcctttgccaaagactcttaatctttttgtatcttaactttttcatatgtacaatgaagttaataatagtggccttgtttacctcatagagttatgtggggacaaaatgagaaaaagtatatcagacactttaaaaattgctgaaataatagacacaaatacatttgaggttaacaacttacaacacaagaggaaattttaatatcaaacataattagtacagtggtcttttaatttaaaagcaattcatggttctgtgcacatacgattgattggaataaaaagtttgcaaaatattctatttatgtaatcttgtaattaaaaaaaatattattattattattttttaatcttgtaatttttaagccaatctcctattggtgcaaattttaattattgtgaataatgatgtgataaaccacttaatacatatgccttaaaaagttccctttttttccttaggaaacatttctaaaagtataatttcttagtaaaggatgtgcacatcttgtattctgaaacatattgtcaaatgcactcttgaaaagttaaaccaagttgccttagtactaatagggcatagaaatagaaatatggccaacacccaaaaaacatactctgcatatttttacaatttttcataaatatatagctttaaaaaaagctcttcttcattttcctttgattaactagtatttttggatttttagcatttattgataatattacctgtatcttttgctttattttttcccccagagatcattgtatattgaggctataaagtttttatgctgtataaattttgttttcttaatttctatttacttttcagacttgttcatagtggtcatttttacatagaagttaaaaaaatgtagtctaattaatcagacttaaattatagtttctgtattttacatcattcttagaaaataattttgtttgttgagagtactataagattttagtttacaaagtaaaaaatatttcataacacacgagttacctactaatcattttttaattaaaaatagaaatataatatgatccagtaattctactactgggtatttactcatagaaaatgaagaaactaatttgaaaagatatacaccccccatatttactgaaacattatttataatagtcaaaatgtggaagcagcccaagtgcaatcaataggtgaatggataaagacggtatggtatatacatatatatgcaatgaaatattactcgccatgaaatcttgccatttgcaacacagatggatccagaggggattatgctcagtcacataagtcagacagagagagacaaataccgtatggtttcatttatatgtgaaatccagaaaataaaacaaataaacataaaaacccacacttctaaatacagagaacaaactggtgatttgtcaaaggggaggtgaatgagggagtgggtgagtgcgatgaaaagtaaagcatagggaatataaataatattgtaagaatgttgtttggtgacagatatggtgactacacttaccacggtgagcattgagttgttgagaatcactatgttgtacacctgaaaataatatcacattatatgtcagttatgcttcaataaaaaagtcaagtcttgatatgagacagctttataatgtagacattaatattgaaaacttttcaaacttccaaatttagacttgtgcatttttatagaaatcaggctagtgtcaaaaaaagagaataaaatctgaagtcaaaagaactggtttaaataaattggtttatcatttaacagttaagcaacataggaaatgagccactgatctattaaatatattaaagaaattacctacctagccataaattgttattttctggcacataatatatcttcagtaaatatttgtttaaaatttaaaaggatatttcatggttgaaaaatattaattatgagaagttttgaaaaacaaagaggttcaaggacaaaaaatatcactcacagtcccacaactcaaggattaccacccttgattcattttattctagatctagatgcttagattgtattttaaatcaatcaattgggatggcctgggtggctcagaggttgagctgagcgtttgccttcacctcaggacatgatccgggagtcctgggattgagtcccgcatggggctctctgcacggagcctgcttctctgttccttatgtctctgcttctgtgtctctcatgaataaataaataaaatcttttaaaaaaatcaatctttttttctttctttctttctttctttctttctttctttctttctttctttcaatattgtgaaaatgtcaatgttacccagggcaatatacacgtttaatgccatccctatcaaaataccatggagtttcttcagagagttagaacaaattattttaagatttgtgtggaatcagaaaagaccccgaatagccaggggaattttaaaaaagaaaaccatatctgggggcatcagaatgccagatttcaggttgtactacaaagctgtggtcatcaagacagtgtggtactggcacaaaaacagacacatagatcagtggaacagaatagagaatccagaagtggaccctgaactctatgggcaactaatattcgataaaggaggaaagactatccattggaagaaagacagtctcttcaataaatggtgctgggaaaattggacatccacatgcagaagaatgaaactagaccactctctttcaccatacacaaagataaactcaaaatggatgaaagatctaaatgtgagacaagattccatcaaaatcctagagaagaacacaggcaacaccctttttgaactcggccacagtaacttcttgcaagatacatccacgaaggcaaaagaaacaaaagcaaaaatgaactattgggacttcatcaagataagaagcttttgcacagcaaaggatacagtcaacaaaactcaaagacaacctacagaatgggagaagatatttgcaaatgacatatcagataaagggctagtttccaagatctataaagaacttattaaactcaacaccaaagaaacaaacaatccaatcatgaaatgggcaaaagacatgaaaagaaatctcacagaggaagacatagacatggccaacatgcatatgagaaaatgctctgcatcacttgccatcagggaaatacaaatcaaaaccacaatgagataccacctcacaccagtgagaatggggaaaattaacaaggcaggaaaccacaaatgttggagaggatgcggagaaaagggaaccctcttacactgttggtgggaatgtgaactggtgcagccactctggaaaactgtgtggagattcctcaaacagtctttctttccctttctttctttctttctttctttctttctttctttctttctttctttctctctctctctctctctctctttcgttctttctttctttcttttcttcttttctttcttctttccatagttgtggcctaagtataattgcattctaaacaatttaatgctacgtttcattctattaaaagcctttttccatattattgcaaattgtatgtaaacagttttaaatgtgctatgattttttttacattgtaaatacaccatagtatttcagatttatattatttgtgagagggaaagagtacatacttgcatggaacagcacattgtaatgaatgtggaagatttagtaactgttatttatctagaaatatttgcagtgtctttgcaaggtcaagttatatatataatctaaggaaaaatataaaactgatattggtattaaattgagtatttggtattaaattggtattaaacggagttatctgaagaaggcatttaagtgaggcaatccctgtcccaggcatctgccctgatttagaggcatttggtagcttttatttatttagggctataacggcaaatcttaatgatagcaaatttcattataattatgaattattttcaataacttcattttttcggtattttttttattggagttcgatttgccaacatatagtagaacacccagtgctcatcccgtcaagtgcccccctcaatgcccatcacccagtcaccgcatcaccccgctcacctccccttccactaccccttgttcatttcccagagttaggtgtctctcatgttctctcaccctcactgatatttctcactcgttttctctcctttcccctttattccctttcactattttttatattccccaaatgaatgagaccataatatgattgtccttctatgatattttcaataacttcataaagaaatgactgccctagttgaaaacttattttcaaaaacatttggcatatactaatcctgcagctcactggagttcattttaaatgtactgttgagaagggaatataggggaagggagaagaaatgtgtgggaaatatcagaaagggagacagaacataaagactcctaactctgggaaacgaactgggggtggtggaaggggaggagggcgggtgtgggggtgagtgggtgacaggcactgagggggacacttgacgggatgagcactgggtgttattctgtatgttggtaaattgaacaccaataaaaattattttattaaaaaatgtactgttgaactggatttgccaatattttgtttataatgtttatatctatactcattaggaatattggtctatagttttcttctagtgcccttagctggctttggtatcagaggaatgtcagccttgtaaaatgagtttggaagtgttttcctctattcaatttttaggaggagtttgagaagtgttgacattaattattctttaaatatttcatagaattcaccattgaaatcatctagtgccgggattttctctattaagagttttttcccctttactgcttcagctagtcagttgtatgtctataagaatgtatttatttattgtaggttatccaaactgttgcatataattgttcataaaagtctcttagaatcttttgtatttctgcaggatcacttgtaatgtcccttctgtcatttctgattttgcatcttcttttgtttttaattgagctgcagattggttaattttgtatatctttttgaaaaaccacctttagctttgttgatttttctatttttttttctggtttctatttcatttatttatcctctgatctttgttatttccttccttctgccaactttggcttagtttttttttttaccccctagcatcttgaagtgtaaagtgaggttgtttattgtcagcctttttttccttaatgtttttctttttttttcttttttaaagattttatttatttatttattcgagagagagagagagagagagaggcaaagacacaggcagatgggaaaggcaggtgccttcgttgtcagtagttctccattctttgatgtgaaaaggggcggcacagtcatttaaacttgatccaaccgctttgcatcttacaaagttaaacagctaaaagaagtaaaataagaaggcaatgcttgtggaatgtacagtgcatattggcggcgcacgcctctttatgatttgcctgcttgcttctcctgttcaatcgtttctttcgaaggcagtggatttttctcttgcgtttctgtcttcttcaatttcaatttaccgaatttctcaatctcagccatatcgggtttgtcagacatggttgcagaggaagcggagcgaggcgcactagcgagctggtgagaggagagggatccggtctgtgctgcggtcgctgccgaatgccctcctgtatcattctaagttactttattacccccaggacacagggcttctcattgtcatagcaaagttctctatacttaagatctgatattttgatttctgctttcaaagtaagcttatatggcaatcaatattatgtgcatttcactgataaattgcctaaagtcctccaactctaattggatttgaactctagcaacccatgcctctaacattgttttatcctcacccttctccccagctctgtgttgattttttttgacactttaatcctaaatcttttctttaagttttacttctttgacactttttctgtacatgatttcttttctctttttttttagagagagagagaaagctagtgagtgtgggagaggggcagagggagagcgagaatctgaagcaggctccatgcccaggacagaacacaatgtggggctcaatttcatgaccctgaagtcatgtacatgcttttcaatttctctctccttcttcctgttattttccgctgtctggtattgtttcaaactagagagggtttttttttttttttaaattaaagattttatttattcatgagaaagagagagagacacacacaggcggagggagaagcaggcttcatgcagggagcccgacatgggactcgaacccgggtctccaggatcataccctgggccgaaggccgcgttaaacctccgagccacctgggctgccctagagagggttgttaacctatctttagtcacagaccaagaaggtagaagatctgacctgggaatccaggtttgaccacatcattctacctctttctgagatttataaacaaaggaaaagaacataattttcttcctttaataaaacaaatgcttaagagtctactatgttttatgtggtattataatatatactgggagtggagaaatgaacagaggaatactgtgcctgtacttgcagacttaacagttgagtatagaaagcattcaggcacattaataaatagtttcatcaatgtggtggacattcagaataaaggaacattcagtctataaggtatcaaaactctttagaaactattaagatcttctttaatggaagatattttggtgtgctggggaatttgtctttagtgaccagtactgtgcagaagagcattaacaagtatattaaaatcctaaatttgaaggtaaaattctatataaaataaaatgctggaaaatacttccaatggtcttgtgtagagcataggcctctttagaatccccacaacacagaatgtgagaaacaagtgtatttgattacaatgaaattgtgtttcttttaagccagtacatcatagacaaagttcacagacatataacaaattgagaaaagatattttcaaattataaaagtcatgaaagattaatatccataaaatgtaagaaatgcctgccaagtaataagggatgggagcctgaatggaaacaatggacagagaatatgaatagacaacttagaaagggaaagcctgactggctagatacatgaactcaccagtagacactgaaaaacaaattaacataataagaacgttttcttgtaccaaccagaatggccaaaattaggatcatagataaaacaaagtgctctacagtatatgaggtgaagggaacagtcccccaacaagaaccagaatgtagatggttacattagtattggaaagcagtctaggaatgaaattaagtatctgtacatctcatcagtagtactgctcccagttataccttctagagaaataactcacaagatctaaaagagaatgtactctcgatcattaatgtgagctgaaagttgtagtgacaatgccatgtgttgcaaggggagtgaataaatatgctatagttgaagttactgggcaataaatagtatgcaggacttagaagcaactagtgagtccaaggatacattttgaaaatatagttcaaagcaactaaccgggtgattataaagtgatataaataggtcacaaaaataaagtggtaagtgagaaaagtagggaattggactattgcttcatcagtagcctttttcaaaaaaaataagtgaaaagacttatgatcctcaaacaataccacattttctaaagtgatagtagtagatttattttttatttttatttatttatttatttttatgatagtcacagagagatagagagagagagaggcacagagacacaggcagagggagaagcaggctccatgcaccgggagccggatgtgggattcgatcccgggtctccaggatcgcaccctgggccaaaggcaggcgccaaaacgctgcgccacccagggatcccagatttattttttaaagatttatttatttatttatttatttatttatttatttatttgaacaagcaggaagaagagctgagggagagaaacaagcagactctgtacttagcagggagcccaatgcagggctcaatcctatgaccacaagatcatgaccaagagcctgacactaaacagactgagctgcccaggcacccctgatagttgtggatttaaatacacagtccaactcattattgattggatgtcatggtggggtcaccaggaggatttttaaatgtagaaaagtaatatgagcatatgatactgatgagtaggataataaagagggacagattaaagattcagcagggtgggatgattgttggaggtagccccccaaattgataagaagtggggaaatccagatcctggggggaggagttgatctttataatatataatataatataaattataaataaattatataatttataatattacataaagttagttaattttaaagcagcagcagggtttgagaagactgacatcaattctgaaagaagttctgctgtgggtaaaatgctattgaacagcatcccatgctacagagaaatcattcatgagaggaagattcaactgctcctgcagacttcatttttgtcttatttcaaggaatttccacaaccaccccaatcttcaccaaccacaacactataatcagtcagcagccatcaacattgaggcaagatcctccatcaacagaaagattgtgtcttgttgaaagtacagatgatggtttgcattttttttagcaatgaagtattttaaaaaattaaggtatatatatatatttttagacaaaatgccattgcatacctaatagactgtagtgtaaacataacctttatatgcactgggatgccaaaaaattcatttggcttgttttgttgcaacaatcgctttattgaggtggtttcgaattgaacctacagtttctctgaggtatgcttgttattttatttggtggcagaaacctgacgattatgtgtgaatttttttttttttttggtctttccaacatgatgcatagcttctgtggagagagatgtgaagaaattttactttcaaaaaaaaaaaaaaaagaagaagaaattttactttcattttgcatcatgagcaaatttcaatggtttctgtggagaatgggagtgcaagctgatgatggaaagttatgaccagctttgagtaaacacttgaggctggcatctatgatgcatgatagttggtgacattctctagtagaacctccaggtactgagtatcaactttgcttgttatttaaaaatttcttccctcattttatacccttttatttttctattttccttgttatgctttaatttatttaacttaaaactttagtatgtatttttcctctagtaagatattattatgtgttactactaactcatttgatttggattggtaacatcctttttaggttattctttctataattaaatggcttagtttccaaaaattcagtaaaattattattttatcccctactaaaaatgacaaccagtaaagtcaatgatagtctcatgtacactgtaataatccaatatataacataattacaaatatcacaatgttactgagaagttgtgtagctgttgctgaaatacaagaaatataagttttgttaggcaattatgggtacagcatattttccccaaattaattttccactggggaatcttataatcaacaacaataagcacaataacttctgcatcaattattttgatactgtcttgacaaaatggtcacttagaaagtgtgtcagatgctcagtccttgtgtcagaaagaaagcagtaacctagttgctgtgatatccttactgtaataagtgaagaacctttttgtttgcttgtttatattgaagcacagttgacatacaatgttacattagtttcaggtgtacaaaatagtgatttgataagtctatatgttatgctgttcctccaactaaggaactttctttaattactttttttcttttacctctttttttttcgcctcagattttaattccaagatagttaacatacagtgttatattcgttccaggtatacaagatagcaattcaacaattctgtacattactcatcaaaagaatgtcccttcacctatttcacccattctcctaaccacctcccttctggtaaacatcagtttgttctctatagttaagagtctgtttttctgtttctctcttttttttctttgtttattagttgtttttcttcttaaattccacatttgaatgaaatcatgtgtgtatttgtctttctttgattgacttattttacttggcattataccctctagctccatccatgttgttgcaaatagcaaggttgcatttgttttatggctgagtgatatttcattgtatgcattatgtatgtatctatctatctcacatatatacatctgcttccataatttgactactgtaaataaagctgcaataaatatagggttacatatatcttttgaattaatgttttcatactctttggataaatgctcagtagtggaattactggagcatatggtaattccatttttaatttttttgaggaacctccatactgttttccagagtggctgcaccagtttccattcccaaacagtgcataaggttttcttgtatatttctatttttagtttttttgttttagcccttctgataggtgtgagctgatatctcagtgtggttttgatttgcatttccctgataagttgtggtgagcattttttcatgtatctgttggccatctggatgtcttttttggagaaaggtctgttcatattttttgcccatttttaaagtggtttatttgttttttggcattgagttgtaaaatgacttttggacactaaccttttatcagatatgtcatttgcaaatattttctcccattcagtaggatgtcttttagttttgttgattgtttcctttgctgtgcagaaattttttatttcgatgtgatcccaacagtttatttttgctttgtttcctttgcctcaggagatatatgtcagagaagttactgcctgtggtctcatctaggattttcttggttttgggtcttatatttaggtacttagtccattttgattttatttttgtttatggtataaaacataacccattacattcttcacatgtaattgtctggttttccaattaccatttgttgaagagactctctcccactgaatattctttattctttgttcatctttaattgactttatttctgacctatctattttgttccacgaatgtatgtgtctatttttgtgccagtatcatactgttttggttacttcagctttgtagtatatcttcaaatttgagactgtgaatttgtcagttttgttcttttttttaaaatattttatttatttattcacgagagacacagaaaaaggggacaggcagagacacaggcagagggagaagcgggctccatggcgggaacccagtgtgggacttgattccggaactctaggatcatgctctgagccaaagacagacactcaaccgctgagcaacccaattgttccagtttttttttttttcaagattattttagctttgaaggtttttgtagttccatacaaattttggggttatttgttctagctctgtgaaaaaggttgctcatattttgatagggattgcattgaatggatagattgctttgggtagtatagaaattttaacaatatttgttttgcaaatccatgaagatgggacatttttccatttctttgtttcatcttcaatctctttcatcagtatttatagttttcagatgctcagatgctacatgtctttcacttccctggttaagtttattcctaagcattttattatttttcgtgtaattgtaaatggacttgttttattaatttctctttttacaactacattagtagtatagaaatgcaacagatttctgtatattgatttagcatccaatgaccctgctgaatttatttatcagttctagtaattttatggtggagtctttagggttttttatatatagtatcatgtcgtctggaaatagtaaatattttacttcttctttaccaacttagatgccctttattcctttatcttgtctaagtggtgtggctaggacttccagaattctgttgaatgaaagtggtgggagtggacatctttgtcttattcctgactttaaatgggaaagcctttcagtttttacccattaaggatgaggtatctgtgggtttttcttatatagtttttattatgttgaagtatatttcttctaaaccaactttgttgagggtttttattatgaatggatgctgtactctgtcaaatgctttttctgcatctattaaaaaatcatttagtttttatcctttcccttgttgacatgatgtatcatatcgattgatttgtgtatattgaaccacttgcatcccaggaataaatctcctcacctgactgtggagaatgctttttaaaaatatgttgtctgcagcttgctaatattttgttgaggacttttgcacccaagctcatcagagatattggtctgtagttctctttcttgtagtgtctttatctggttttcgtaccatggtaatgctggcatcatagaatgaatttggaagctttccttcctcttctatattttggaataattagagaaaaacagatactaagtcttttaaaaaagtttgatagaattcacccatgaagccatctgaactttggtttgttggaagttttttgatttctgattcaattacattactgatagtctgttcaagttttctacttcctcttgattcagttttgggaatttatatgcttctaggaatctacccatttcttttaggttgtccaatttgtaggcatataatttttcataatattctcttaaaatcctctgtatttctatggagccagttgttacttctcttgtttcattttccattttgtttatagagccttctttctctttactcttttttgatgaatctagctaaatgtttatcaattgtgttgctcttttcaaagaaccagctcctggtttcattgaccttttctgttttttgtttgtttgtttgtttctgtttcatttatttatgctttaatctttatttcctttttttctactacttttgggttttgtttgttcctcatttctaactccttaggtgtagtttaggttgttggagatttttcttgctttgtgaggtaggcctatattgctgtaaacctccctcttagaaccacttctgctgcatcccaaagatttgaaaatactgttttcattttcatttgtcttcatgcattctttttaattttccctttgattttttggttgatacattgccattttgttatttagtctccaagtattatgttcttttcagattttttcttatggttgacttctagtttcatagtattgtggtcagaaaagatgtatggtatgacttttacattttgaatttgttaagatttttttgtggcctaaaatgtgatccattttggagaatgttccatatgtatttgaaaagaatgtattttctgctattttaggataaaatattttgattatatctgttagattcatctattccaatgtgtcattcaaagtcattattttatttcttggttgctattctgtttatattatctatccattgatttaagtgaggtgttaaggtcctctactgttactgttatctgttactatagattatttcctttatgtttgttattaaatactttatgtatctgagtactcccaagttgggtctgtaaatatttacaattggtatatcttcttgttggattatactgtttatggttatttagtgcccccttttttttgtttcattaaagtctttgttttaaagagtatttttgtctgatataagtattgctatttcagctttcttttcacttccattgcttgatgaaggtttttgcatcccttcactttcaatctcctagagtctttatctgaaagtattctcttgtaggaaacatatagattgatcttggttttttatcctttcttttgccttatgtgttttgattggagtgtttagttgatttacattcaaagtaattattgatagatatgtgcttattgccattttgttacttattttacatttgtttttgtagttcttctctgatccttctcttgctatcttacagtttgttggttttctttagttatatacttacacttgtttctctttatttttttcatatctattactagtttttgatttgtgactatcaaagactggcatataatatctgcatataacagtctatgttaagttgagaattgcttaagtttaaacccatatttttttagtcctctctctgctcatgttttgggtatatggtgtcatacactacatccttttattttgcggatcctttgactaatttttaagattttatttatttattcatgacagacagagagagagagagaggcagagacacaggcagagggagaagcaggctccacacagggagcatgacgtgggacttgggccttgatcctgggtctccaggatcacacccgggggtgaaggtggcgctaaaccactgggccactggggctgcccctaatttttatagatatatctaattttactacttttgtgcttcttacttttcttattcctgtttatggtttttcttttccacccaaagtgtccactttaacatttcttgtaaggctagtttagttgtcatgaattcctctaactcttgtttctctggaaaactatctcttgtatctgaataatagcagtgctggatagagtattcttggctgtattagcacttatttagcactttgaatataccatgtcactctctcctgacccgcaaagtttctgctaaaaaatcagctaatagccttatgatgtttcccttgtgtgagctattttcttttctcttgcttctttttaaaactctctcctttccattactttttgccattttaattactattatcttttttctttaaatattttatttatttattcatgggagacacacacagagagaggcagagacacaggcagagggagaagcaggctccacgcagggagcccgatgtgggactcgatcccaggactccaggaccacgccctgggctgaaggcaggtgctaaaccgctgagccacccagggattccccccattttaattactattatcttggtgtggacttccatgggttgaattattggggggctctcaatctggatttctatttcctttctcagatttggaaagttttaagctattatttctttaagtaaatttcctgccccctttgtactctcttctccttctgagatgcctataatgtgaatgttactatgcttgatggtgttgctgatttcttttttttctttttctttttttattttataaatttattttttattggtgttcaatttgccaacatatagaaaaacacccattgctcatcccatcaagtgcccccctcagtgcccgtcacccagtcatcccaaccccctgcccacctccccttccaccacccctagttcgtttcccagagttaggagtccctcatgttctgtctccctttctgatatttcccactcattttttctcctttcccctttattccctttcacttttttttatattcctcaaatgagtgagatcataaaatgtttgtccttctccgattgacttatttcactcagcataataccctccagttccatccacgtcgaagcaaatggtgggtatttgtcgtttctaatggctgagtaatattccattgtatacacagaccacatcatctttatccattcatctttcgatggacaccgaggctccttccgcagtttggctattgtggacactgctgctataaacatcagggtggctgatttctcttaatctattttcatttcatattcttttttccctcctctgttcagctggattattttctaatactctgtcctccaggttgctgatctgtcattttgctttctctagtctactttttcccttctagtatatttttaagttcagttaatgagtttttcatctctgattggttctttttctgttttctatctctttgttgagggtttcactgaggtcctcccctcttttctcaagtccagtgattatctttatggccattactttaaattttctattaggcattggggatccctgggtggctcagtggtttagcacctgccttcagcccagggtatggtcctggagtcccggggtcgagtcccacgtcaggctccctgcatggagcctgcttctccctctacctgtgtctctgcctctctctgtgtctctcacaaataaataaaaacattttttttctatcaggcattatttatctctgttttgtttagctctcttgtaatttagccctgttctttcatttaggacatattcttctgtatcctcattttgtttaattcctgtgtctgtttctatgtgttaggaaagttagctacatctcctgccttcgaaagtagtggccttatgaagaagaagatgtcctgttgtatcctgcaatgcactgtctcctgttcagaatctgatgtttctgggttgtctcctatgtgtagtgcgtgtaccctactgttgtgggtaagccatgtttgccttcagtccaatcatctgcaatgggtctcttagcctattgtgggcagagtttgttatctgtgttagtgggccagtctggaactgccccaggcttgaattgaattagaccaggtattatccagagctatggctacaccaaattccagggagtgctctctgtattgtcccccaagaagctttcattggtgggtgggccctacagtcagatcagatgtccacctcagcccattgctggctttgcagtagaactggtgtgagtgtggttttctttccttctctcttaggcaggagtcagtctgaggtggtgttggcttctgctggggctctttgcacactgccatacttgtgacaccacttacgatggagtctggctaaaggcatgttggatagaatgggtccacaggagaatacaagggtggggcatgcagtgctagcaaggtccgtgcaggtttattgtgggaggctgcatcttcctcagaaaactgctgaagctgagatggggctagaggggtaatatctgctgaaaagtgcaggggtgggtgcactgttagtaaactaggtgaggagtgttcagactgtgctggttcccacaggtgtctatatatatatacatatatatatatatgtatatatatataggctgggggtgtaggggagggcattggagcctgccagcccttttattcttagaaaagtttcccaaagatccgtgccccatcagcatatactgtaagattactgaacagatctgccttctttcccccatatactccaggtgtttttcagactgctgcttctctgctgtatctcagcagggctatttgttgtactgtctccttaagcagggactcagtttcctatcaccctctggctttcctagaatcaagcactctggtttttaaagttccaggtgttaagtctcaaggattgtaagaatttttaaagttaggccctctggttttcaaagccaaatacagggattcatctctcactgtgggtcactcatgtcttgggtgcctagtgcggggtttgctcctctttcctctccatcccagtggtgtctttttctcccaggcatagtctcataagtcagtttggttcctgacctctctctttgatgctacgttcagctgtgaaggctctgttctcccagttttggggtcatttgctggattatttatattgatgtgggtgtaatcatgggacaagttaagtctagggttctcctactccaccattttccctggaagttgtctatttcttgcagagtttctaaaatatctgtatcaagttcagattttttatagtttagatatgcatttattgaccatatctgtgtaatatttacattttggagacacatatataggtgtttattctttttctatttttaaaaaaaatttaaaaggattttgtttattcgagagagagagagagagagagagagagagacagagacacaggcagagggcaaagcaagctctatgcaaggagcctgacatgggattcgattccggatctccaagatcaggccctgggtgctaaaccgctgagggctgcccagctttctcatttcttactctaccttttctaacctatggtcatctttgtcagttgctatccacttatttgaaaaagaatatgtgatttaaagccatgactttttttttttttttttttttttttttttttgttaatcaatggaattttggtctacaaattcatgggcaaatgcttcttgattgcataaaaaatacttagaaagattagggatttcatgaacaattgaaaataaattgccactagaggaatcaattacagaattttatttacctttgtatattgaataacttaaaaatagagaacttattagttagtttagaaaatattaattagggaagaacctgttggaaattattttaacttattacattaatatattaataaactatttaccacatttaggtcgaatctatcaccagtggccaatgatttaatcagtcatgtctttgtaatgagactttcataaaaacccagacagaggggtttgggagagctttccagattgagaaaccagattgcttccgcgtatctccatactggtctccaagcaccaggaagacagaagctcttttgtttaggacctcaccctatttctttatctgccttttgatttgaatcctttagtattctttgtggtaaagcagtaatctggagagtaaacaggtttcttgagttttctgatcctatcaagcaaattaattgaatctcaggaagggtttgtgggaactcccatttgtagcagatctgtcagaagtacatgtaacaatctggacttttgattgccatctgaagtgggggcatctgaaaggggactgagccctttatctgtgtaatctaatagtatctcagggcagatagtgtcagaattgagttgaattgtagggcaccctgctggtgttcagagacttcttggttggtgtgggaacctctccccaacattggaaattttatacagaatcagagtgttttgttgaactatgattactatacagatatactcagtaatgctctgtcatcctaaacattttttccctaatatgttgctttgattctaatgatttgctgaggatgctccagaaaagaggaaccaaggaattttcagaagagatgagactataataattagtaaaaagtcattttaagagttgatgcatcttggaaatttcatgttctttcattttgaaagaactctgtggagtcaagttaattgcttttctgggatgtaacttttatatccgaaagaaagagaaaatgaaatactttatggtatgatattattgcatttaaacattggatcctgtttatctccttctaccttttttctttttgcaaaacctggccttttttttctccatatagatttctctgctattctattgtaaaaagaattttatttgttgtttggtatatgctgttttagttaattggttctggcagacttttaggaatctccaaaattgctgattatggagaggtaaacgttgtagaagaaaaacagttaaattgagatttgtaaggttctacaggataaattttggcctcccctataattctcagacttagcaccatgctgtattacagaaattcagttataataatgctgattatatatttattgttttctttctttgttcactgtctctgcaatgagattttaagaagttccataagggcagatgccaagtctatttcacttaatactatcactgcgcctggtatataatgagtcctaagtagatactgaatgaaggacaacaatgtggactagagccttggagtgagaattgcactggagctatagataatggcagttaatatcacagttggacttacagatgtggaagaggttgctcaggcaactggggaggggaagaatctcatgaaagagttctgaaggagcacaaacatttaagaaataggaagaaggtcagagtaatagtgatattgatacagggcaagagaggtgagaggaaaataaagagagtccactgtgatgtcaggggaaagagtgctataagaaagaaggagtggataccaaacgagattattcagaggtgaagtgaagattaaaaaacatgaaatcacattagctttgtgtggtaagtggagatggaaatcaggttgtggtagacagagaagtgactgttcaaacaatagaggtaaggagtaaggacaactgataagtttagctatgatgtagaggagaaagggcatgactgggttggaggaggtagagataggtcatagaaagatttaaaaatttatataatgatgttgacatgtttaaatgtaatgggtagggtgcctgagtggctcagcagttaagcatctgcctttgggtcaggtcatgatcctgagatcttgggatcaagccctacatcaggctccttcttcagtggggaacatgcttctccctttttctctgcctgcctctccacctgcttgtgctctttctctttcttcaaataaataaaaatgaaattaaaataaatgtgaatgggtaagatccaacaaaagggagaatttgaagatattggaaaggcagacatttcaggtccgtaggtctctaaagtgggtaaagtggcatgggatattgaacccagtgaaggagttgatttttgaaaggtagagtatttctatccttgtaatgggaagagagaaatgaatgtatttcatttgcagattatttggtggcagaaactgagggataatatctgatgttttaaaatatctctgaaatatgcggcccagaatttactgaggagtatcgcagtgatatacttttttaaaatttttatttatttatttatttatttatttatttatttatttatttatttatttatttttagcatgactttgcttttgaaagcttctgtaggtaatgggagaacaagttgcttagggaaatatagaataattgtgatacagcttctagtattcatctgattttagagtctatgaattaatggtgttactgctatgtatggttatatgatatttctagcagaacactgcaatccatttgtaagtgtgcagaaaatgtttgaattgatccatgaggtgattttgtcaagctgttatggtgtcaggggtaatgaagactttctcctctaagttataaatggactaatcatgtaatttaattggaggataaaggaactgaagctccaggaatgttaaacaacaatggagaaattagaaggatcatgaaattgaagacatcagcagagtcaaacactgacatgtgtagaacccagtgatagagctagaaggttaagtgtctcagaagtctgatgcttagggatgttgagaatatccaaaggtagccacatgaaagggtgtccgaggtgaatatttacattctctggtaatgtggaggtctatctttagagttggggatattggctgagtcatctacctgaatctgaagtcatttaggatgtccactagactttcaggggaaagtaaaacagtgggtcctttatcactcagagaatgatgtgagaggaccaagaaattaatagatatacaagaaaaggggtaggtggttgcactgctaggattaaggaaacagatatcttatacgtggcagggattttttattttaacaatgaccttgtcatattctagaattgtcatattctagatatgacaatgatactgatgattcttgggaaaattactgactcaatctttttagtaaagcttagagctgctccattctgtattaaaagccagaatcccagtcagtcaatataatatgttcctctacttaatctcttccagtttcaacaatcctccaagttgattaagctagtcattaaatcttttgaaaacaggtccttctcacctccactgtcactgcccttatttggtctgcaggtatggatgtgatatttctagtcttcaccacttcctggagttgttagctatctggatttctccccctactcttagcctccttcagtatgatatcctaccttgactctatcccttgtatactaaacaaacattgctaatattctgcctgcttggcgtcatggtgaagcccatatgcttttctttgaggtctggttcacttataagctggtcacataattccatgtgttctctttgaaagctttcatgtagagaaaaagtaactcatgtattgttggtaggaatgtaaagtggcacagtaattatggaaagcagtacggtggttcctcaaaaagttgaaaatagaactaccatgtgaactagctatctatctatgtgaaccatagaactatcttatgatccagcaactgcctctctgagtatatatcagaaggaagtgaaatcaggatcttgaatacatgtctgcattccagtgtccattttagtattattcacaatagccaagatacagaaacaacttacatgtcctttgacagaggaatagtaaagaaaacatatatgtatacaatgaaatgttattcagcattaaaaaaaaaggaatttctgttatttgcaacaacatggatgagtctggagggcattatgctaagtaaaatcagctgggcagagaaagacaaatgctgcatggtatcacatgtgaaaatctaaaagaaacaaaataagagtcggtttcttagaaacaaagaatagaatgggttgctaggactagggagaggggacaatggggagatgtaggtcaaagggtacaagctttcagttataagaagttctgaggacataatgtacctcacggtgggactatagttaatgaatggtaacaaatacttttgaaagttggtaaagaggatctaaaacattcttatcacacacatacaaagagttaactgtgaggtgattgacacgttaattatcttgatcttggtaatcattcacagtcttggtcattagtcaaaatgtatatgtatatcaaatcatcatattttgcactttaaatttttacaattatatttgtcaattatttctcaaagttgggggaattttttaaataaaactctaattatgctttttatttttttttataattttttaaaaaatttttatttatttatgatagtcacagagagagagagagagagaggcagagacacaggcagagggagaagcaggctccatgcaccgggagcctgacgtgggactcgatcccgggtctccaggatcgctttttatataacttttataagattaagacttataccataacctattatgttcttaattaggccccacacacttccctgtcctattcactccagccccacagtggagatcagattaaattctatggattttagagatctttttattataaaagccttttgaatatttttttctatcttagttaagataggagctaggtattgactgacttccaggatatatatatatatatatatatatatatatatatatatatatatatatatatatactgctcactatctaccaaatctgacaggtttctggtcaatagttgtttgctcattttgtagtcttttaagttattgtattacttcagagctgttaatattgttaacaatgctagtgctgtacaattttgaagtctgccttcccaaagttcatatttatggtaacttttagatgtgtcttccttatttaccacaacatctaagtttatgtgatcttttgccaaaattttaattattttctcttactagtacaacctatttttctttgcataagttaggttgggagtagtactcctatttgctttttctacccatggtaagatgattaaagtccatttgaatttgtttaactttgttgtttctattttcttaccccacttacttttattttctactatttttccattccattagaaaaatggtatcctttccaattataccctatcgattttgatatccaggagaaatatggagatggccagttcttctattcacttcctttattatctaggcttctgatatactttggggaactaggtataaggtttataaatttccttatgatttttcttcctcatttcttctgtttctgttttctttacccagttttaactcattttatttaaattctttgaatattttcttattcctcttctcaagaacataacttgatacaatggtaaatgttttcagcttaacttttctacaaatcagtgaagtttggcttcaaggtaattattaataatttagtaaaattcttatcttgtgccccaatgacaatgacaaccttcaaagttagtagaaggcccataggactataatagtcattgagtagtgaagttacaaataaaataatgtacttaccaataggaggtgctgcttttgttgaaatataaacataaacaattatttgttaacttactattggacaacacattttcctcttaatctttcaacagtaatcttatgaaatgatacccaagcagcacaaacacttttgcaatcattattttacatctttaaatcctggccaaatggttctttatggggtatgtgccatacttggtgttaagatcggagaaaactgtggtgagattctcatttcatcacccacttgctgtggtggcccctttgtgacatccctgctgtgtgagaagcttatgactaggactctttattgaaagggaacccattactttaccctatttcctatttttaactttgaccaacttattcattttttcttcctggcctctcaagtgatctttctctttattctcaaatgttgactcttttctacataggttccattctatatttttttttgaaagtagttcttgattgttttgaggaatatatcctcttagttacttagtacatttaagtttttcagcaaactgtgggcaatctctaaaaattctcactaatggaaatgaagacataataagaaatactaacaagaaatttcaaatttgccagagaaataaaattgccatggaaattttaaaaatcttcatgcatttatttctccagaaaccacttgtattgagaaatagaaagacagatttattaccttaaggacagatctattactagttcctaaaccataatcagatatgagactatagtttaatttgcagattacactaatacacttctttgaattattttaatatccaatttccttagagtaccaaagcttccatagcatttattaaggcctatttaggaatcacacattgatttgcagtttgtttacagttataaaattaaaatttctttcttaattagtaagtttttgagtatgagagaaaaggcaaaggatatttaataaaattaattttagcagcattggacatagatgcaagtggattcagccaaagtacaccacagccaaaaagtgaaatgaccttggagtaaagacatggaaaaggaacttaccactggctctcccaactctatctgtaataaaagcaatgaataaatacaaaaattcttcaatgtaactttttccttgaataccaaatacatacattatactgattgattaacatgtgcccaggcattgtttcaagtgtttaactattttaatatccacagaagtcccatgaggtggctattattgttctcttcattatccagtgaaaaaactggggagagatagacatctcttaggcatctacctaaaataagacatcacttaaatggcggggcctgaatttatatctaagcaccaaaacctcagagcctaaacttttatggtcttttctttatgtattgtcctgattctttaaagtgtcagctttaaagttggctgctttggcactataattggagacagcaaaatctgtttaaacgttaattctttgagtttctaatacatgatcctccatgatcctttttttttattttttattttattttttattaactgtctttaatattttctgaggcagagaagattattaacttatttgcagtcactgatcaaataagtagtgatctggtattccaatccatgcttgtttaacttcaccttatatgccttgtagaagcgagagaagatttttttttctgattataaaactagtgttcaataagtgtctataatatttgaggcatcatactaggtgctttcccccctgccctcccaaagactacgtctgtgggaggaactgggcatgttattgcagtaattgcactcatgttgaaagaactcactaaaggcaccacaggatattgaaaacaaatgccacattacctttttttttttttctcagtctttctaaggagttagaaccttttaggaagtatgtgctctctctttttagaagatagtctgctgtaatgggaagatctgtctttatggagtcagctggtatagtgggaaagagaatgggcagatgaatgaaggatttaaatgtgaaagttaaaatgtggaagaaaatgagagatcatcttcaagatcttgcatgagggcaaggatttctttgaacccccaaagtacaaaccataatatgaaaaactgccatatgtgagcacatgcaaattaaatatttcttttcaacgagaacatcatacttaatagattagagaaaatagttttaagtccaaaagtcacaaagaattaatattagaatatagaaggtgttatgagctgaatgtctgtgccctcccacccccaattcatacgtagaagcttaaacctacaatgtgatgctattaggaagtggggaggtaattaggtttagataaaattgtgagggtaaagttctcatgatgaaattaggattctttaagaagatacctcagagaatggaaggagacaataagaagtggctgtctacacaccaagaaaagagggccctcatcaagaatctgaccatgctggcatcatctcagacttctagtctgcaaaaccatgagaaatgtttgttgcttaagccactcagtatggtagtccattatagcagcctgagctaagacagaatggatggttggttataaaggaacatgaaacagataagaaaccagttagagaaagaatgatgagctcatgctcatcatgctatacgttaatggctaatattggctaatatggctaacatataaagaaacgtatgaacaacttatataaattaaagacaaatacctttgaaataccctaaataatttgaaatgataaatatttaaatgtaatcacccaatgttgtgcttaattctggttttgcttcacagctgtaggattttaaatatgttctttgatttcagtaaatctgtttcttcatctgtaaattctgtcagttagtatgtgtctcatagaattcttatggttttaagagatacatttatctaacgtgcctgacactttaaaaatgtttgatttaagttgctttcctttccattttctccattctcttttgatacataccattctctgctcctcagtgttcaaatatttaaactttgctgcctggactgaaattaaaaacaaagttccctcaatcttcctgtttaccagagagccactctaatcaatcccaggatttattctgcttttccttttttgcctatgggctttttatttttgaaaaaaaaaatcggtaacttttgaggagactgaattcattggaaataaaatattgagcagaacatgagcatcttggtgaaaattgcaagtttaggagtttcccagacagattagagaacaccaaaattgagaaccaaataactttatagatcttggatactagcactttatctgatgtgtcatttgcaaatatcttctcccattctgtgggttgtcttttagtcttgttgactgtttcttttgctgtgcagaagcttattaaactcaacagcaaagacacaaacaatccaatcatgaaatgggcaaaagacatgaacagaaatttcacagaggaagacatagacttggccaacaagcacatgagaaaatgctccgcatcccttgccatcctggaaatacaaatcaaaaccacaataccacctcacaccagtgagaatggggaaaattagcaagacaggaaacaaccagtgttggagaggatgtggagaaaggagaaccctcttgcactgttggtggaaatgtgaactggtacacccactctggaaaactgtgtggaggttcctcaaagagttgaaaatagagctaccatatgacccagcaattgcactgctggggatttaccccaaagatacagatgcagtgaaatggcaggacacctgcaccccaatgtttatagcagcaatgtccacaatagccaaactgtggaaggagcctcagtgtccatcgaaagatgaatggatgaagaagatgtggtttatgtatacaatggaatattactcagccattagaaactataaatacccaccatttgcttcgacgtggatggaactggaggatattatgctgagtgaagtaagtcaatcagagaaggacaatcattatatggtttcactcatacggggaaaataaaaaatagtgaaaagggattacaagggaaaggagagaaaatgaatgtgaaaaatcagaaagcgtgacaaaacaagagagactcctaactctgggaaacaaactaggggtagtggaaggggaggtgggcgaggggttggggtgactgggtgacaggcagtgaggggggcacttgacgggatgagcactgggtgttatactatatgttggcaaattgaactcccataaaaaaataaataaataaaaaagagaaccaaacaccttaccagaaaatggaaattcatcaaaaaaaggaaatagggagggggggcacgatggcggaagagtagggtctccaaatcacctgtctccaccaaattacctagaaaaccttcaaatcatcctgaaaatctacgaattcggcctgagaattaaagagagaacacctggaatgcaacagtgagaagagttcacgcttctatcaaggtaggaagacgggaaaaaagaaataaagaaacaaaaggcctccaaggggaggggccccgcgaggagccgggctgaggccggggcgagggtccccaggataggagagccccgtcccggagaagcaggagctgcaccgaccttcccgggcggaaaggggcccgcggggaggtggagcaggacccaggagggcgaggatgccctcgggttcccgggaaaaataacaggcacctgcgcccctggagagtgcgccgagctccctaagggctgcagcgcgcacggcgggacccggagcagctcggaggagctcgggggcggctccgcggaggcggctgcagggcgggagcagctccgggggctcgggggcggctccgcggagggggttgcggggcgggagcgcgaatccaacagcgcaggactcggagcacagggcgccgggacacagcccaggatcccgcctccccccgggacaggcagaggccgggagggcccaggacagcgaggacgctcctgccccgagctgaacagagcagcggccccgccccggagcctccaggccctgcagacggagagctctggagttcctgcgggcgctgaatccagggctccagagctggccccgccactggggctgttgctcctggggcctcacggggtaaacaacccccgctgagccctgtaccaggcaagggcacagcagctcccccaagtgctaacacctgaaaatcagcacagcaggcccctcacccagaagaccagctagactgacaacttccaggggaagccaagggacttaaagtacacagaatcagaagatacttccccgtggttcttttttttttttgctttttgatttgtttccttcccccaccccccttttttctccttcctttttctttctctttttcttcttcttttttttttttcgtttttttccttcctttttttttctctttctcttttctttccttctttctctcctctctttttctccttttctcaatacaacttgcttttggccactctgcactgagcaaaatgactagaaggaaaacctcacctcaaaagaaagaatcagaaacagtcctctctcccacagagttacaaaatctggattacaattcaatgtcagaaagccaattcagaagcactattatacagctactggtggctctagaaaaaagcataaaggactcaagagacttcatgactgcagaatttagagctaatcaggcagaaattaaaaatcaatcgaatgagatgcaatccaaactagaagtcctaacgacgagggttaacgaggtggaagaacgagtgagtgacatagaagacaagttgatagcaaagagggaaactgaggaaaaaagagacaaacaattaaaagacgatgaagacagattaagggaaataaacgacagcctgaggaagaaaaacctacgtgtaattggtgttcccgagggtgccgaaagggccagagggccagaatatgtatttgaacaaattctagctgaaaactttcctaacctgggaagggaaacaggcattcagatccaggaaatagagagatcccccctaaaatcaataaaaaccgttcaacacctcgacatttaatagtgaagcttgcaaattccaaagataaagagaagatcattaaagcagcaagagacaagaaatccctgacttttatggggaggagtattagggtaacagcagacctctccacagagacctggcaggccagaaagggctggcaggatatattcagggtcctaaatgagaagaacatgcaaccaagaatactttatccagcaacgctctcattcaaaatggaaggagagataaagaggttccaagacaggcagcaactaaaagaatatgtgacctccaaaccagctctgcaagaaattttaagggggcctcttaaaattcccctttaagaagaagttcagtggaacattccacaaaaacaaggactgaatagttatcatgatgacactaaattcatatctctcaatagtacctctgaatgtgaacgggcttaatgaccccatcaaaaggcgcagggtttcagactggataaaaaagcaggacccatctatttgctgtctacaagagactcattttagacagaaggacacctacagcctgaaaataaaaggttggagaaccatttaccattcgaatggtcctcaaaagaaagcaggggtagccatccttatatcagataaactaaaatttaccccgaagactgtagtgagagatgaagagggacactatatcatacttaaaggatctattcaacaagaggacttaacaatcctcaatatatatgccccgaatgtgggagcagccaaatatatcaatcaattattaaccaaagtgaagaaatacttagataataatacacttatacttggtgacttcaatctagctctttctatactcgataggtcttctaagcacaacatctccaaagaaacgagagctttaaatgatacactggaccagatggatttcacagatatctacagaactttacatccaaactcaactgaatacacattcttctcaagcgcacatggaactttctccagaatagaccacatattgggtcacaaatcgggtctgaaccgataccaaaagattgggatcatcccctgcatattctcagaccataatgccttgaaattagaactaaatcacaacaagaagtttggaaggacctcaaacacgtggaggttaaggaccatcctgctaaaagatgaaaggctcaaccaggaaattaaggaagaattaaaaagattcatggaaactaatgagaatgaagatacaaccatccaaaatctttgggatgcagcaaaagcagtcctaagggggaaatacatcgcaatacaagcatccattcaaaaactggaaagaactcaaatacaaaagctaaccttataccnnnnnnnnnnnnnnnnnnnnnnnnnnnnnnnnnnnnnnnnnnnnnnnnnnnnnnnnnnnnnnnnnnnnnnnnnnnnnnnnnnnnnnnnnnnnnnnnaaccattagccagctcttattaaaaagaagagagagaagactcaaattaataaaatcatgaatgagaaaggagagatcactaccaacaccaaggaaatacaaacgattttaaaaacatattatgaacagctatacgccaataaattaggcaatctaggagaaatggacgcattcctggaaagccacaaactaccaaaactggaacaggaagaaatagaaaacctgaacaggccaataaccagggaggaaattgaagcagtcatcaaaaacctcccaagatacaagagtccagggccagatggcttcccaggggaattttatcaaacgtttaaagaagaaaccatacctattctcctaaagctgtttggaaatatagaaagagatggagtacttccaaattcgttctatgaggccagcatcaccttaattccaaaaccagacaaagaccccaccaaaaaggagaattacagaccaatatccctgatgataatggatgcaaaaattctcaacaagatactggacaataggttccaacagtacattaagagaattattcaccatgaccaagtaggatttatccctgggacacaaggctggttcaacacccgtaaaacaatcaatgtgattcatcatatcagcaagagaaaaaccaagaaccatatgatcctgtcattagatgcagagaaagcatttgacaaaatacagcatccattcctgatcaaaactcttagagtgtagggatagagggaacattcctcaacatcttaaaagccatctatgaaaagcccacagcaaatatcattctcaatggggaagtactgggagcctttcccctaagatcaggaacaagacagggatgtccactctcaccactgctgttcaacatagtactggaagtcctagcctcagcaatcagacaacaaaaagacattaaaggcattcaaattggcaaagaagaagtcaaactcttcctcttcgccgatgacatgatactctacatagaaaacccaaaagtctccaccccaatttgctagaactcatacagcaattcggtagcatggcaggatacaaaatcaatgcccagaaatcagtggcattctatacactaacaatgagactgaagaaagagaaattaaggagtcaatcccatttacaattgcacccaaaagcataagatacctaggaataaacctcaccaaagaggtaaaggatctataccctcaaaactatagaacacttctgaaagaaattgaggaagacacaaagagatggaaaaatattccatgctcatggattggcagaattaatattgtgaaaatgtcaatgttacccatggcaatatacacgtttaatgcaatccctatcaaaataaatggactttcttcagagagttagaacaaattattttaagatttgtgtggaatcagaaaagaccccgaatagccaggggaattttaaaaaagaaaaccatatctgggggcatcagaatgccagatttcaggttgtactacaaagctgtggtcatcaagacagtgtggtactggcacaaaaacagacacatagatcagtggaacagaatagagaatccagaagtggaccctgaactttatggtcaactaatatttgataaaggaggaaagaatatccattggaagaaagacagtctcttcaataaatggtgctgggaaaattggacatccacatgcagaagaatgaaactagatcactctcttgcaccatacacaaagataaactcaaaatggatgaaagatctaaatgtgagacaagattccgtcaaaatcctagagaagaacacaggcaacaccctttttgaagtcggccatagtaacttcttgcaagatacatccacgaaggcaaaagaaacaaaagcaaaaatgaactattgggacttcatcaagataagaagcttttgcacagcaaaggatacagtcaacaaaactcaaagacaacctacagaatgggagaagatatttgcaaatgacgtatcagatgaagggctattttccaagatctataaagaatttattaaactcaacaccaaagaaacaaacaatccaatcattaaatgggcaaaatacatgaacagaaatctcacagaggaagacatagacatggccaacaagcacatgagaaaatgctccgcatcactggccatcagggaaatacaaatcaaaaccacaatgagatcccacctcacaccagtgagaatggggaaaattaacaaggtaggaaaccacaaatgtttgagaggatgcggagaaaagggaaccctcttgcactgttggtgggaatgtgaactggtgcagccactctggaaaactgtgtggaggttcctcaaagagttaaaaatagacctgccctatgacccagcaattgcactgttggggatttaccccaaagatacagatccagtgaaacgccgggacacctgcaccccgatgttcatagcagcaatgtccacaatagccaaactgtggaaggagcctcggtgtccctcgaaagatgaatggataaagaagatgtggtttatgtatacaatggaatattactcagccattagaaactacaaatacccaccatgtgcttcaacgtggatggaactggagggtattatgctgagtgaaataagtcaatcggagaaggacaaacattatatggtctcattcatttggggaatataaataatagtgaaagggaatataagggaagggagaagaaatgtgtaggaaatctcagaaagggagacagaacgtaaagactgctaactctgggaaatgaactaggggtggtagaaggggaggagggcggggggtcggagtgaatgggtgacggcactgggggttattctgtatgttagtaaattgaacaccaataaaaaataaattaaaaaaaggaaataaaaataaagttatgctttatagatcagtgaccacttattaaccaaatttgggagtcaaggtaatgtaagtcatcttttaagagaattatccacatttcagagtcactcagtctatttatatatttttgggatggtcagcattctctgacctaatctgagagcaatgcttgttttttgatttttataaaaccttaatttggtaagtcttcagggtatggcaaattagaaatagcatgccatttatttactaaagaatgaaaatgacctgatatatgcctggataaagctaatgtaagacaaattcttttgtcttctattagtaaagtctcattcttaaaaaaacaaaacaaaacaaaaaaacaaaaacaaaaacaaaaaaaacactgcttccagtccaaataatcagaccaaggttaaagaagcaaatccaaagctattattaagaataaagaaactaaatcatgctagatcttttctgtacactttatgccaaaatgaattccagatatattaaagattaaatagaaaaataagttataccaaatagaagaagaaacacaaacttttaaaaaatattttattaatttgtttattcataagagacatacagagagaggcagagacataggcagagggagaagcaggctccctgcagtgagcctgatgtaggccttgatcccaggactctgggatcatgacctgagccaaaggcagttgctcaaacactaaaccacccaggcatccccaaacacttttcacataatcttggagtggagaggtactctccagccatatgcagaaacccccaaaaaagattaacttcaaacttttcaatgtaaaaaaaatcatttatttattgatagcatattagaagatatttgttttattaacttcttaacacattaaatgagttattttataagatcaaatattacataatacaaaagattttaaatgtcactgaaaagactccttaggtaactaaccaaataagaaaaataatctcatgggtaatatgttttagagacaaagggttaatattaattaatataaaaagcttttacaaactaataaaagactaagtatatgaataggcatgtcacaaaagaagaaatacaagtggacaaaactgtaaggaaaatcttcagcttaaatagtaaacaaataagagattaatactattttcatctctctagttgacaaagatttaaaaaattgctaatatttggtgttgnnnnnnnnnnnnnnnnnnnnnnnnnnnnnnnnnnnnnnnnnnnnnnnnnnnnnnnnnnnnnnnnnnnnnnnnnnnnnnnnnnnnnnnnnnnnnnnnnnnnnnnnnnnnnnnnnnnnnnnnnnnnnnnnnnnnnnnnnnnnnnnnnnnnnnnnnnnnnnnnnnnnnnnnnnnnnnnnnnnnnnnnnnnnnnnnnnnnnnnnnnnnnnnnnnnnnnnnnnnnnnnnnnnnnnnnnnnnnnnnnnnnnnnnnnnnnnnnnnnnnnnnnnnnnnnnnnnnnnnnnnnnnnnnnnnnnnnnnnnnnnnnnnnnnnnnnnnnnnnnnnnnnnnnnnnnnnnnnnnnnnnnnnnnnnnnnnnnnnnnnnnnnnnnnnnnnnnnnnnnnnnnnnnnnnnnnnnnnnnnnnnnnnnnnnnnnnnnnnnnnnnnnnnnnnnnnnnnnnnnnnnnnnnnnnnnnnnnnnnnnnnnnnnnnnnnnnnnnnnnnnnnnnnnnnnnnnnnnnnnnnnnnnnnnnnnnnnnnnnnnnnnnnnnnnnnnnnnnnnnnnnnnnnnnnnnnnnnnnnnnnnnnnnnnnnnnnnnnnnnnnnnnnnnnnnnnnnnnnnnnnnnnnnnnnnnnnnnnnnnnnnnnnnnnnnnnnnnnnnnnnnnnnnnnnnnnnnnnnnnnnnnnnnnnnnnnnnnnnnnnnnnnnnnnnnnnnnnnnnnnnnnnnnnnnnnnnnnnnnnnnnnnnnnnnnnnnnnnnnnnnnnnnnnnnnnnnnnnnnnnnnnnnnnnnnnnnnnnnnnnnnnnnnnnnnnnnnnnnnnnnnnnnnnnnnnnnnnnnnnnnnnnnnnnnnnnnnnnnnnnnnnnnnnnnnnnnnnnnnnnnnnnnnnnnnnnnnnnnnnnnnnnnnnnnnnnnnnnnnnnnnnnnnnnnnnnnnnnnnnnnnnnnnnnnnnnnnnnnnnnnnnnnnnnnnnnnnnnnnnnnnnnnnnnnnnnnnnnnnnnnnnnnnnnnnnnnnnnnnnnnnnnnnnnnnnnnnnnnnnnnnnnnnnnnnnnnnnnnnnnnnnnnnnnnnnnnnnnnnnnnnnnnnnnnnnnnnnnnnnnnnnnnnnnnnnnnnnnnnnnnnnnnnnnnnnnnnnnnnnnnnnnnnnnnnnnnnnnnnnnnnnnnnnnnnnnnnnnnnnnnnnnnnnnnnnnnnnnnnnnnnnnnnnnnnnnnnnnnnnnnnnnnnnnnnnnnnnnnnnnnnnnnnnnnnnnnnnnnnnnnnnnnnnnnnnnnnnnnnnnnnnnnnnnnnnnnnnnnnnnnnnnnnnnnnnnnnnnnnnnnnnnnnnnnnnnnnnnnnnnnnnnnnnnnnnnnnnnnnnnnnnnnnnnnnnnnnnnnnnnnnnnnnnnnnnnnnnnnnnnnnnnnnnnnnnnnnnnnnnnnnnnnnnnnnnnnnnnnnnnnnnnnnnnnnnnnnnnnnnnnnnnnnnnnnnnnnnnnnnnnnnnnnnnnnnnnnnnnnnnnnnnnnnnnnnnnnnnnnnnnnnnnnnnnnnnnnnnnnnnnnnnnnnnnnnnnnnnnnnnnnnnnnnnnnnnnnnnnnnnnnnnnnnnnnnnnnnnnnnnnnnnnnnnnnnnnnnnnnnnnnnnnnnnnnnnnnnnnnnnnnnnnnnnnnnnnnnnnnnnnnnnnnnnnnnnnnnnnnnnnnnnnnnnnnnnnnnnnnnnnnnnnnnnnnnnnnnnnnnnnnnnnnnnnnnnnnnnnnnnnnnnnnnnnnnnnnnnnnnnnnnnnnnnnnnnnnnnnnnnnnnnnnnnnnnnnnnnnnnnnnnnnnnnnnnnnnnnnnnnnnnnnnnnnnnnnnnnnnnnnnnnnnnnnnnnnnnnnnnnnnnnnnnnnnnnnnnnnnnnnnnnnnnnnnnnnnnnnnnnnnnnnnnnnnnnnnnnnnnnnnnnnnnnnnnnnnnnnnnnnnnnnnnnnnnnnnnnnnnnnnnnnnnnnnnnnnnnnnnnnnnnnnnnnnnnnnnnnnnnnnnnnnnnnnnnnnnnnnnnnnnnnnnnnnnnnnnnnnnnnnnnnnnnnnnnnnnnnnnnnnnnnnnnnnnnnnnnnnnnnnnnnnnnnnnnnnnnnnnnnnnnnnnnnnnnnnnnnnnnnnnnnnnnnnnnnnnnnnnnnnnnnnnnnnnnnnnnnnnnnnnnnnnnnnnnnnnnnnnnnnnnnnnnnnnnnnnnnnnnnnnnnnnnnnnnnnnnnnnnnnnnnnnnnnnnnnnnnnnnnnnnnnnnnnnnnnnnnnnnnnnnnnnnnnnnnnnnnnnnnnnnnnnnnnnnnnnnnnnnnnnnnnnnnnnnnnnnnnnnnnnnnnnnnnnnnnnnnnnnnnnnnnnnnnnnnnnnnnnnnnnnnnnnnnnnnnnnnnnnnnnnnnnnnnnnnnnnnnnnnnnnnnnnnnnnnnnnnnnnnnnnnnnnnnnnnnnnnnnnnnnnnnnnnnnnnnnnnnnnnnnnnnnnnnnnnnnnnnnnnnnnnnnnnnnnnnnnnnnnnnnnnnnnnnnnnnnnnnnnnnnnnnnnnnnnnnnnnnnnnnnnnnnnnnnnnnnnnnnnnnnnnnnnnnnnnnnnnnnnnnnnnnnnnnnnnnnnnnnnnnnnnnnnnnnnnnnnnnnnnnnnnnnnnnnnnnnnnnnnnnnnnnnnnnnnnnnnnnnnnnnnnnnnnnnnnnnnnnnnnnnnnnnnnnnnnnnnnnnnnnnnnnnnnnnnnnnnnnnnnnnnnnnnnnnnnnnnnnnnnnnnnnnnnnnnnnnnnnnnnnnnnnnnnnnnnnnnnnnnnnnnnnnnnnnnnnnnnnnnnnnnnnnnnnnnnnnnnnnnnnnnnnnnnnnnnnnnnnnnnnnnnnnnnnnnnnnnnnnnnnnnnnnnnnnnnnnnnnnnnnnnnnnnnnnnnnnnnnnnnnnnnnnnnnnnnnnnnnnnnnnnnnnnnnnnatccccacatgccactgaaagatcaaaggtacaatttggctgacaagcatattaggacataagaaagaaaaaaaaaacttcaaaaattactctatcccagtttcctctcggttattaactatcatgttacaaatatttcaatctttaatcatgaaaattaagatgatttggactgcattagaagaaattacagatttgcaataaggaggacaagccattaagagagaacaacatataggagtttgatacataatgaaaaatgtatggaacttcgaaataaaaatggtgggttaacacatgtacctacttgaactctttctgtaagtgttctaaaataacaatgaaggaatttttaaaaaatgtttgagcttacaaagcttaaaaagaattagagaagattacaaaccttgggaggagtggctatttagcagataaattaaggaaggctgaatcctaaatggagaaagtcaagaagcaacctactttcactacagattccccaccatcctcaaaaaagtttcaggatttggcaacagcatcattaaataagatgactacttggtagtggaattgccatgtcaagtacaggaatatctacagcttcactaggtaatgtcaaaatgatttccaaagtggttttactgataactctgttatattgggcaatatctcctttgatttttttagttgagttcttttcttttgtattgttatagtatcaaggcatggtattatgaggtaatctaatctctgagtcagagaatgttagggacttactctccttttctgggctttgctgtgtcattgtctgcggactaaataaaagttaggaactatatgattgcaaaatgtttcttccacttcctctgtattttctatttctccaagtaaaagcatagaagtctctttcctttggtcttcttacagtagctacactgtggtgagcatagcataatatatagacatactgaaccattatgttttacacttgaaaataatgtgtcaactatactcaaaaattttttaaaggtattagggcagccctggtggctcagcagtttagcgctgccttcagcccagggccagatcccagacacctgggattgagtctcacatcaggctctgtgcatggagcctgcttctccctctgcctgtgtctctgcctctctctctctgtgtctctcatgaataaataaataaaatcttaaaaaaaaattaaaggtattaaatggaaaagtgaagaaaccagaagaagtgaaaacttgaaattaattttcatcataaggtaaagggtgcaaataacctggtcatggtctagtttaagtagcatcatttgaaacaagaccttaggacaagattaaaattagacatttttcattcttcccaacatgatgatcagaagaaggagacactggaagaccttctgtttctatgactttgggaatgcttctttgtttctgacagacttggaaccaaaagtacctgaaccattttttcatgtacatgatgcccattgttgataaatctgatatgcttttgggcgaatggcctaagctttctcagtgttctgaaatgtttccttttttcttgaaggaatcataatttctcatagtatgacagtcttctaagtttataagtggaacttttgaagttggctttttaaaaatttagtctagactatatgacaatttttagctgtttatcctcaattatcataaaatctaatctcatgtaatctcttacttttaaaaatacttttttttttattgatacagctccttttgttagtatgaattgggtcaatagtaattctaattctattaagttagtaatagtcaatagtattgggtcaatagtaattcttctatacagtatagtatcttgatatttgatttttttgcactttgttgttttggtttcccacattatttatcttttactttttaggatttctcttcccattctatttgtaatattattcctaattgattatattcttttaattttgataccttagaagaaatataagcatagtcaattcttttaatttctttaattgttcagacttctaactaaatttttggatcctgtgtgtatgatttagaagattcatagaggcttttgttaaaaattatccctcttccttgtatttttcttttcttttttccccccttagttccaacttatttattttgctagttaaggacattcttctttgttaatggcaagtcagctgacttgatcgaatgatagtgcacttctatgtttattctttctataaatcctttgggtttagtttcaagataattgaattgaattgataaataattcagtaacacagtaaaattcttggcttttcctccagtgaaaaacaatgataatagaacttaattatagtcctgtgcatgtagcaacatactattgcagtcgacttataaacaagatactgtacttacaaggaggtggtggagcttttgctaaaataaaaacaattattattattattattattattattatcatcatcatcctagctgttaagtatacaacatatttctcttataaatatcccttggggtgtccaaaaaataacactaaaaaaacacatacacttctatatagttagtttgatgctatgattcctagcaagctggtcctttaggaggcatgtgagatacagtcttaggactggagagaacctaaattcatagttttttagactgagtggatcatagtttactcactcatctgctatgggtctataaaatccatgctaactgaaaaatttttcttagaactctacattaaaaagtaactcattcttttgtgcattccttatatattaaaatccttgcatagcccagaatttacatacataagtattataaatgagttcatcctttttacaaagaagttgattcttttcctttagcctctcaagtgtctctagagcctgcaagactcagaaactctgcttctttccttttcagtcttcctcaatttttttcacttccacctctctccctcatcttatttctcagctacccttcatttatttgattaagaatgtatgactaatcttatagacttttgtactacttaaaagatttttgttcattagtttatttttctggtttaaaatctcatcagggaaagtctttttaattagcttggggagaaatggaaaaaatatcagaatctacagaaactatttttttgaactataggaatgttaattgcagcattatttataatagccaagatgtggaagcaacctaagtgccgtagatgggtgagtgaataaagatgtaatgtaggcaggagaggaaggtggtgacagactaggaggaccccaggctcatcttgtcccacaaatacaactagataactatcaaatcatcctaactaatcctgagaaatcaacccgaagactgatagaacaaaccccacaactaaagggagagaagaggccacatcaaagaacataggaaatgctgagatatgttttagaggagaaatagatcctagatgctatggaaaggaagaagctgtggtctggagaaggatgagagaggagcatgtaggagagcacataaggagagcacctccccaaatcccttgggttggaaaacaagaggggctgaatttcatgagttcttgcaaccaacaaggcttaaaatctggagttttaaagatcagtgggcttggttgggatggagccagagggtactactgtgctcttcctggaaagaaggaaggcaaacaacctggggacagacagcatggaaacagtgatctgaaaaatgcctggagggaatacagaggggagattattgactatttcaagaggactttccaagggcaaaggagctggctggtgccattcccctctcctgatcctcagcataaacacagagccacttatgggaggaagcatcaacactggctgcctaacttgctcataccaagttccacacacctgagctctggcaggactgcccttctgagttagtcaagtctgcctcagacccattgtggcagacccctcccgtagaagatcagtacaaactcctgcccacaccatgtgtccctaccagagttcaaaagggactcagttctggtggaattggtgtcaggtttcgttatttcataagcagaccagaatgcacctagttaaaacttaccacgttcaagtgagggaacaaacactgttcacagcaggtaaggagagcctctgtagatggctgacctaaaagatagagcagccaacatacaaaagcaggacacacacagcacacaccagagacattagctgaagcaacaaggccctggacactacatgacttcttcttaataagaccaatgctttcagtagcaagatacataagtggcttttgtaacacaaagacttagacaaaatgccaagacagaaagacagaagaatttatcctaaataaaagaacaaggtaaggccatggccagagatctaagcaaaactgatataagtaacatgtctgaaggagaatttaaagtaatagtcataaagatgcttactgggcttgagaaaagaatagaatacatcagggagacttgtaacacagagatgaaagagtaaaaaaaaatcagagatgaatactgcaatacatgagactagaaacaggcatgatgcaattcacagaaggatagtagaaaaaggagaatgcattagtgacctagaagacaaaataatgggaaacaaggaagctgaatgaaggaaaggaagaagaattatgcaaaatgaggttagatttagcgagttcgatgactccatcaaatataataacttttgtatcttaggagtcttggaagaagaaaaagaaaagagtgcagaagttttatttcaaaaaataatagaaaatttccctaatttggggaaggaaatagacatccagatccaggaggcacagagaactcctatcaaaatcaacaaagcaggaccaattccaggatatattttaattaaatttgaaaatatagtgataaagaaaaaaatcttaaaagcagcaagacaaaataagttcttagcttacaaggagaaacccatgaggctagctagagatttctcagcagaaacttggcgagtcagaagagaggaacatgatatattcaaagtgctgaatgggaaaaatctttggcctagaatactctatccatcatggctattattcagatagaaaagataaagactttcccagacgaataaacactataggattaaatcaatcctgcaagaaatattaaagggggatctttgagtgcaaaagtgagatcaaaagtgacaaagacaagaaaggatcacagaaaatcttcagaacaactgcaaagcaagtaataaaatggcattaagtacataactatcaataattacttcgaatgtaagtggactacacacacccacatagggtgacagaatggataaaacaaacaagatccaccgatgtactgcctataagagactcactttggacctaatgacatcagcagattcatataaggaggtggataaacatgtatcccataaatggatgtcaagagaaagctagagtagcaatacttctgacaaattagactttaaaacacactccaaaaagagattttaaaaaaggcattacataataataaatggaacaaaccaagaagaaaatctaacaatcgtaaatattgaagcccccaaattgggagcatccaaatgtataaaacaataataataaacataaaggaacacattgataactacagaataatagtaggggactttaaaaccactctcacatcaatggatagatctcctaaacagaaaagcaacagttaagtaatgactaaatgacacactggaacagatggatagaacatatattgaatatattaatatattatatataatataattatatttaactacataattatataatatattaatatattttgaaaatactccatccagaaacagcaagtgcacatagaaaattctccagaatagatcacatactaggtcacaaaacaggcctcaacaatacaaaaatattgaaatcataccacatatgtattttgaccacaatgctatgaaactagaattcaaccacaagaaaaaatcttgaaagatcaaatacataacctaactttacacctttactaaaggagctgaaaaagaaagataaacaaaaacaaaagccagtagaaggaaggaaataatgaatattagagcagaaataaatgatacagaatggacaacaacaaaaccaccatagaacagatcaatgaaaccaggagctggttctttgaagaagttaaaaaaaattgataaattcctagccatgcttatgaaaaagaagaaagaaaaggcccaaataaatgaaatcacaaaaaagagagtataaataacaacaaataccacagaaatacaaacaattatgagaatattatgaaaaactatatgccagcaatttggatgacctagaagaaatagataagttcctagaaagatataaactgccaaaactgaaataggaaaaaatataaaacttgaacaaacaagcaaaaaagttgaatacctaatcaaaaaacacccaataaacaaaaatccaggaccagatggtttcataggcaaattctgccaaacatttaaagaagcattaatatctattcttctcaaactgttacaaaaaattagaaaaggaaagaaaacttccaaatttattcaatgaggccagcattcccctgagaccaagaccagataaagactttgctaagaaagagcactaaaggccaatatccctgatgaatatgaaagcaaaagttctcaacaaaatactagaaaacagagtcaacaatacattaaaaatttcattctccacgatcaagtgagatttattcctgcgttgcaagggcagttcaatatttgcaagtgagtcaacctgatcatcacattggtgaaacaaatgataagaaccatatgatcctttcaataggtgcagaaaaagcatttgactaagtacaacattcattcatgataaaaaccctcaacaaagtaggtttagagggaatatacctcaatataataaaagccatctatggaaaacccacagtgaacatcactctcaatggaaaaaaactgagagctttcctctgacaggagcaagacagagatgtcaccactattatttcacatagtactggaagtcctacttcagcaatcagacaacaaaaagaaataaaaggcatctgaattggcaaggaagaagtcaaactgttgctatttgcagatgacatgatactccctatagaaaacctgaaagaccaccaaaaaactactagaactgggcagccctggtggctcagtggtttagcgccgccttcagcccagggcctgatcctggagacccgggatcaagtcccacgtcgggctcccgccatggagcctgcttatccctctgcctctgtctctgtctctctgtgtctctgtctctctctctctctctgtcatgaataaatgaataaagtcttaaaaaaaactactagaactgataaatgaattcaataaagttccaggataaaaaatcaatgtacaaaaatctgttgcatttctccacaccaataagaaagcagtagaaagagaaattaagaaataaatcccatttaagttatattacagaggtagtgatgaaaacagtatggcattggcacaaaaataaatatatagaacaatggaacagaatagaaaacccaggatagaaaacccaggaatgaactcacaaatatatagtcaattaatttcaaaaagaaggaaagaatgtttaatgagaaaaagtctctttaacaaatggtgttggaaaaaaaatggtgttgggaaaactggacagcaacatgcaaaagaaggaaactgaaccactttcttacaacaaacacctaaataaatgaaaaatgacagaaccaaaaggcaactcccagaatgggagaagatttttgcaaatgacatatctaaaaagtgctagtatccaaaatttgtaaagaatttagaaaactcaacaaccccaaactatccaatttaaaaatgagtaaaataataatccaacttaaaataatccaatttaaaaaatgagtaggatatatgaatagacatttccccaaagaaaatatacagacagccaacagacagttaacagttaaaaaggtactcaacattactcatcatcaaggaattacaaatcaaaactatgatgagatatcacctcacacctgtcagaatggctaaaatcaacaatacacgcaacaacatgtgttggcaaggatgtggaaaggagaacacttttgtactgttggtggggacataaactggtgcagctcctctggaaaacagtatggaagttcctcagaaatttaaaaatagaactaccctatggtccagcaatagtactaccagatatttacccaaagaatacaaaaatattaattcaaagggatacattatatatataaatatatataatattaagtctttgaaaagaatgaaaccttgccattttcaaggacacggatggagcaagagagtattatgcaaagagaaataagtcagagaaagaaatttatcatatgatttcactcacatgcagcatttaagaaacaaaacaaatgaacaaaggaaaaaaaaaagagagagaggcaaaccaagaaacagattcttaactataaaggatgttggttaccagagggcaggtgggtggggtgatgggtgaaataggttgatggagattaaggagtgccttgctgtgatgagcacctgctgttgtagggaagtgttgaatcagtatatggtatacctgaaactaatattacactgtatgttaactaactggaatttaaataaacacccatcctgggaggttccagaagacctatctttcaccagtactttgaaaaataaatttttttttattggtgttcaatttaccaacatacagaataacccccagtgcccgtcacccaatcagaaaaatacattttcaaggggagctccagctaaaaaaagaaatgtggtatatatatacacacacacatagaggaatactattcggccataaaaaaaggaaatcttgcatacacaacagcatggatggactttcagggcattatgctcaatgaaataagtcagagaaagacaatgtgtgatctcacttatatgaggaatctggacaaacaaaatactgaactcttggatacagagaacatactgtggttggcagagttagggaggggagagggtaaaatgggtaaaaatgattaaaaagcacaaacctctaggtataaaataaaaaagtgatgaggatataatatacagaatggtgactacagttaattatattatgtggtagggtccctgggtggctcagttggttcggtgttggactcctgatctcagctcaggtcatgacctcagggttgtgagattgagccctgtgttgggttacatgctgggtgtggagcctgcttaagattctccccccgcccttcactttctctctccaaaaaaaaaaaaaaaaaaaaaaaaaataaataaataaataaaaatgatgctctatggtatatttgaaagaactaagaaagtaggtcttagcagttttcatcacaaggaaaaaaaatgaccactctgtatgctgatcaatgttaacgatacatattatggtgatcatttcaaaaatgtatacaaatatcaaatcattatatggtatacttaaaaccaataccatgttgcatattaattatatctaagttaaaaaaacactcgagccataaattccagactattatttaagctaaaagacataataattcaagaaaagaaaaacacttaccaattggttcagcaaatcctgattgagaaaattattgtcagttttaattataatgtcatttattatcagattaacaaacaattattctatggctatctggactatgtttgagattatggccatagatacatagttggtaaatatattttcagaaattattttcttttcctttgttttatattcttagaaattcccaaaatggagttttgggctaaaatacattcataatcaattacttttggaaacttgttacttatctttatttttatttatttatttatttatttatttatttattttatttttataataaatttattttttattggtgttcaattttgttacttatctttaaatctagaagtaactaaatctagaaacgtacatgaaaaaacttttttttttctatagcatcttcaatttgtttatgctcatggaatacacattaagaaatacatcatagtagttaaaactggaattcatttaatgacttttgaggcttaaacattttctgaatgttaagtttgacttttggattaattaactgtacatgttcttctaccatttgccaatagaaaagctgctgacctataaaaaatgtcacaaacatttttggtaggtcaaacttgcaataataatatttactgtatcatttctacatagttgatgttgttggtgtccttgttgttttctaagggaagacctggatggttgggggtaggatctccttactctgatagaagaacaaagcaaatgatctttctggagcttattaaactcttatgttattgccttttgcaatcagtttataccatttttgaaccaatcaaggagttatacctcttaatctcctttcttattacacttttattaacttttcccatctctttgcttatgcttatgaatatcacattggattcagattaaagactggtttgataatggtattttggttagtgagtataatgtattaatttttgattcttaatctttcatcaattatttatctatatcacaaagagagaaattgtagagatatattagcattgaggttttaaaccactaacactatgatagcaatagggagcaaaattagcttacattctatggattttaggatttcaaaaggaacttactaatggatgatgtaggttctttaaaacagaaggaaaaataagacatgagtaatgtgaagcatataaaaatatatccagtaaagaaacttctctaggttttgagttagaacaaaattgtcttatgcaatttttagaaggtgcctccaaaaagaaaagtcaagggaatatcagtacagttgaaactatttgtgtttaatgaaagatcattttaatacctgattaatcctggatattttaatgtttggcttgaaggacctctattgagacaggtttttttgtgtactatatctttcttatccagggcaaagagattttcaaatcttttaggaaggtggtatgatattacagtagtatctatcactctacttttctttcaaaactcaactcttgtcttctttacagtttccttctacattttgttttgaaaaggatttttatttattttgtgatagtcctataataaatgcttttaagctttcctccaaattgtcagtaatctctaaaaaaaggctcactaatatgaggggaacacagaaagtgaaataataacattgagatttgcaaatttgattacggctatggctggacttgtttatcaaatagatccattatacagcatatttttccagatagtattcacagaaaagtaacttactggaaatgttctgaacagttcctgaaaagcaaaaataaataaagaattatttgacccacaatcataggcctacccaaaatatttatttgtcttatattaaaatctagttttcaaggcatctatgatgacctttgattttggaagttctagcagaaacataggtctatggattattcttgcattcacctcctcctcaattgtctatccttttactgacatttagtgtactgtgtataaagtttatacatctctttagttctttcctcattccccattcctttaattcaatgactgatttcctccttggtcaactgcatttcatttaaaatgttggtatttttttctgtcctagtatggacatttacttattttttttaaagattttatttatttatttgagagagagagagcagagagcacaagtggggaggaggagagaagggcagagagaaagggagaagcagactccctactgagcaggaaacccaacacagagcttgatcccaggactccgagatcatgacttgagctgaaggcagatgcttaacttactgagccacccaggcaccccaaggacatttactttttttttaagtagacaaatcagagttcttgatataacaatacatttctccatttattctttctataaatcaattggcttctattaaaagctaatcactgataactctaaattagcttttgatcttctgaaaatgatgcaaaacttacctctggttgctgaatatctgcctagaataaaacataagcaagtgagtgtggtgtagtttgctaacatgcttgataagaaatttgtttaggcttaaattatcttcaagcagtaaataatatcatgtcatttatgttgattaagttaccacatgcccagtacttatataagagcattatgtgattgaaattatttaatcttcagcagccctatgatgaagattatgtgcatggaaattacccacgatcacacagctaataattagtgcaaccaggagctgtctccaacaatccaggatctagtcctgctttgaaaaactgttttttggtcaatttaacaccattatgtctgagtctttagatgttcttccctcaccccttaatgttttttttttattttttttaaaatttatttattgagagagagaaagagagagagaggcagagacacaggcagagggagaagcaggctccatgcagggagctggatgcgggacttgatcccaggtctccaggatcaaaccccaggctgcaggtggcgctaaaccgctgcgccaccggggctgcccaccccttaatgttatagtccaatttcccttgttttctttagtggtaacctggaactggaatctaggtttgttgtactctagagtcttcatgtaattcaatctcttgatctcttgctttttttttttttttttttggacaggagattcctacaaaaggaattagccatcttaataaattattacatcaatgtagtaagtactttaatagaattgtggataagtgctttaggaacacagagaagttccttcttctcaacttgtctgaaagagttgatatatttggggaattgtttttcatttctttgtttccccccacattttggtaattgttaagccattctcatatggaagagagcctggttataatggaaggatgtttctttaacagaggacagggaggggatacagcatggtacaatgggaagagcattggtagatgcattaaaggaaaaaagaaaggtaaaagtaatgaaagaaattgtagaagaatattttcatgaagttgtggttgggtaaaaaccaaaccacaatgtgaaaaattgatatatttgattgaatcaagttttagagtttttgttcaatagaacacataataaatggattttagagataatgacagactaggagaagatatttgcaatatttaaaatctggaaaaaaattgagatgtataagtggcacctgaaaaccaatggaaaaaagacaaaaaatccaatagaaaagtggtaagtgacatgaattaaagctcacaaaaaaggaaaactgaatgattaacaattatgtgatgaagtgctaatgcccattgggactagaaatgtataaattaaagccacattgatatactcttccttcatctgaatgcaaagtttgcaagtggtatggtagatattggtagaaatgtgggttgacagtcatggatggcaggtgggaatagaaattgtatagtgattgtggaaattatctggcatatgctttatgagctagaaatccctttccttgatatagatctcaaggaattcaaacttaagtccagaagggatcacttatcacaatgtccaattacagtgtctttgtgacattagtgaattggatattatgatgtgtctaccatcaggggaatggaattgtaggagaggcattttctgcaatactttacagaattagaagcaacatgtgggatgtatatatagcaatatggacagatctttagaggtattaaatgcaaaaaaggagaagagtaagatgtagttgatgaaattaaacaaacacaaatcaatgttacaggttatttagggttatttttttaaatttttttatttatttatgataggcacacagtgagagagacaggcagagacagaggcagagggagaagcaggctccatgcaccgggagcccgacgtgggattcgatcccggatctccagaatcgcgccctgggccaaaggcaggcgctaaaccgctgagccacccagggatcccggttatttagggttataagaatagttaaggacannnnnnnnnnnnnnnnnnnnnnnnnnnnnnnnnnnnnnnnnnnnnnnnnnnnnnnnnnnnnnnnnnnnnnnnnnnnnnnnnnnnnnnnnnnnnnnnnnnnnnnnnnnnnnnnnnnnnnnnnnnnnnnnnnnnnnnnnnnnnnnnnnnnnnnnnnnnnnnnnnnnnnnnnnnnnnnnnnnnnnnnnnnnnnnnnnnnnnnnnnnnnnnnnnnnnnnnnnnnnnnnnnnnnnnnnnnnnnnnnnnnnnnnnnnnnnnnnnnnnnnnnnnnnnnnnnnnnnnnnnnnnnnnnnnnnnnntgtctatagtcagggagctagctcttcagtctgcgagatatctctgcctctctctctgtgtctctcatgaataaatagttttttttttaaagaaggcgctagataatcctttaatagagagataaaataacccatctagaatagctgaaattaaaaacgctataaccaagatacagtcccaagtggaggctataaaaatgaggatgaatgaaggagaagaaaaaaactatggaaaataatgaatctgaaagaaagagggaaagaaaactattaggccatgaaggtaaacttaggaaattcagtgattctataaataaaataatatcgatatcacaggagtaccagatgaagagcaggaaaaaagggcagaaggtatatttgaacaagttatatttgagaacttccctaatctgtggaaagaaacaggaatttaagtccaggaggcacagagaactccctcaaaatcaacaaaaatgggccaacatcaggacgtatcatagagaaacatgaaaattacaaagataaagaaggaattccaaaagcaggttgggagggtagacacttaaggctggccttttatgtggaagatatgtccacagagacctggaaggttagaaaggactggtaggatatattcagtgtgctaaatggaaaaattatggattcaagaatacttcatccaacaaagatgtcattaagaagagagggagagagaaagtgtttccaagacaaacaaaaactaaaggaattagtgaacactaaaccagccctacaagaaatattaaaggggatacttcgaggaaagagagagttgaaatgtaacaaagaccagacagagacaatatacagaaactgtgactttacaggtaatgcagtggcacttatccatatcttttactaattactctcagtgtaaatggatgaaatgctccaatcaaaagacagagggtatcagaatggattaaaataaaaaacaagacccattgatatgctgcttacaaaagactcattttagacccaagataattccagattgaaagtgagggagtggagaagaatttaccatactaatggacatcataagaaagctggagtagcaatccttatatcagacaaactagattttagatcaaaaactgtaataagagatgaagaaggacattatatcataataaaggggtctatccaacaagaagatctaacagttataaatacttatgcccctaatttggcagcagccaattatataaatcaattaataacaaacttaaagaaactcattgatgatagcacaacaatcgtagggatgttaacaccccactcacagcaatagacatatcatctaagcagaagaaggaaacaagggctttgaatgacacactggaccagactgccttaaaagatatattcagagaattttatcctaaagcagcagaatattccttttgagtgcacttggaacattctccagaatagatcacatatgtcacaaattagtactcaactggtacaaaaatactgagatcataccatacacattttcagactataatgctttaaagcttgaagtcaatcacaagagaaaatttggaaggacatggaggttacagaatacatggaggtcaaagaataacttaccaaagaatgaagaggtcaaccaggaaattaaagaagaattttaaaaaatacatggaaacaaatgaaaattaaaacatgacagttcagaactattgggatgcagcaaaggcagtcctaacagagaagaacatagcattgcaggccttcttcaagaaacaagaaaagtctcaaatacacaaccatagcttacacctaaaggaactggaaagagaacagcaaataaagcctaaacccacaaggagaaagtaaataataaatattagagcaggagtcaatgatacagaaatgaaaaacaacaacaacaaacagtagaacagatcaacaaaactaggagctagtcctttgaaagaattaatagattaataaacccctagtcgggtgtatgataaagaaaacaggacacacatatataaaatcatgaatgaaagaggagagatcgcaatcaataccaaaggaatacaaaaaattataagagaatattgtgaaattgaactccaataaaaaaagaaaaaaaagaaaaaaaatattgtgagaaattatatgctaacaaattaggcaatctggaagaaatagatgcattcctggaaacttataaactaaactgaaacataaagaaatagaaaatctgaacaaacccataaacagcaaagaaattgaagcaataataaaaaatctcccaacaaataggagtcgctggatggcatcccagcagaattctaccaaacttagaaaaattaacatctactttttgaaaactgttccaaaaaatagaaatggaatgaaaacttccaagctcattctatgaagccagcatcaccttgattcacagttcactaaaaagaagaattacagaccaatatcctttatgaacatggatgtaaaaattctcaccaagagtgagctaatacaatataacagattattcaacattgtcatgtgggatttattcctgggctgcgagcgtggttcaaaatctaaaaatcaatcaatgtgatatactacgttaataaaagacaagacaagaaccataagagcttctcaatagatgcagaaaaagcatttgacaaaatacagcatcctttcttgataaaaactttctgcagtgtagggatacaatgaacatacctcattatcataaatgccatatagaaaagacccacagtgaagatcatcctcaatggggaaaaacgggagcttttcccataagatcaggaacgtgacagggatgtccgctctcaccactgctattcaacatagtactggaattcctagcctcagccattggaaaacaaaaagaaatgaaaggcatccaaatcagcagagaagaagtcaaattttcactcttcacagatgacatgaaactctatgtagaaaatataaaagacttcaccccaaaaatgctagaactcactcagcaaagtggtagaattaaaatcaatgcacaaaagtatgttgcaattctatacatcaacaatgaagaagccaaaagagaaataaaggaattgatcccatttataattgcaccaaaaaccataagatacctaggaataaatgtaaccaaagaggtaagagatctgtacccttaaaactataaaaaaaaggaaactatatgtaaaaaatttaggaaaacacaaagaaatgaaaaacattccacactcatgaattggaagaacaaatatcacaaaaatatctatactaatcaaagcaatatacacattcaatgcaatatagatagatagataaatagatagatagatatagatatctagtagtgcaattgctaggtcatattagagctctatttttaactttttgaggaaccttcatactgctttccagaatggctgcaccagtttgcatcctcatcaaaagtgtaagagggttcccctttctccatatcctttctaacatctgttatttcctgagttgttaattttagccattctgaccagtgtgaggtggtatctcattgtggttttgatttgtatttccctgatactaagtgacattgagcattttgtcatgtatctgttggccatttgtatgtcatctttggagaaatgtctttcatgtcttcttcccattgcttttttttttaaattttttaaaaaatttatttatgatagtcaacacacacacagagagagagagagagagagaggcagagacacaggcagagggagaagcaggctccatgcaccaggagcccaacatgggactcgatcccgcgtctccaggattgcgccctgggccaaaggcaggcgccaaatcgctgcgccacccagggatcccttcttcccatttcttgactgaattatttattttttggatgttgagtttgttaagttctttgtagattttggatactagccctttctctgataagatatttgcaaatatctccccccaattctgtaggttgccttttagttttgttgatttttttcctttgctgtgcagaagctttttatcttgatgacccaccgcatttattcacatttttctttcttgtcaggatcacttttaacattctttgggttttatatctgtttttcttttcttttctttttttttttaagattctatttatttatttgagagagagtgagagagaaaacacagagggagaggcagaaggacaagtagcctccctgctgattgcagagcccaatgtgtggcttaatcctaggaccctgagatcatgacctgagccaagtcagatacttaactgagccactccgctgccctacatctgcttttctaaataacatgtttatagagcttcttcttgacttccatcttaattttttacttcttaccaggcttgaaaaatttttaaaaatgttttatttatttattcatgagagacacacacagagaggcagagacacaggcagagggagaagaggctccatgccggaagccggatgtgggactcgatcgcaggactccgagatcacaccgctgagccacccaggcgtcccccagtcttgaaatttaaaaaaaaaaaaattaactgcggcatagttaacatagagtgttgtattagtttcaggtgtagaatatagtgattcaacaattctctacaatactcagtggttatcacaataaatgtacttttaatccccttctatttcacccattccttcactcatcttccttctggtaaccatcagtttgtcctctatggttaagagtttgtttcttgatttgtctttttttccttcgttcatttgtttcttaaattccacatatgagtgaaatcatatggtatttgcctttctctgactttcttcacttagcattatagtccctagatccatccgtgttgttgcaatggcaagagttcattcttttttatggcggagtaatagtcattgtatctatataccatatcttctttatccatttatctattgatagacacttcttccataattaggctattgtaaataatgctgccctaagcataggggtgcatgtatctttttgaatttgaattagtgtttttgtattcttttcttaccaagcttttttatctcactgtctcccccttctctcatcataagcattccttcatctgatcctcccagtatagtttgttccaatttttatggaaattcattcattcagtgattgatatgttgttacaacccaacttgcctccacagctaaggcatatgctgtgctgtggttatattgtgcttaatgtacaactctttgtatttcctgtacttaatcttttccttttttttcctaaacagattgcttagctggtcctttagatttatgccattttagggccttggttactactttctgtgctctggagtgcatgaaatgagtgtaattgaactgttacctcctcctgaagctctctttaataattttctcacaggtggttttgcaattagagagaataaaagcctgagtgaagcaaaagaagcctttcacatcagtaggagactaaagtacaacagagatgaaacttgaaaaaggaactgagtaatggatcatggggtcttaactactgtgcaaacataaataaaggcccacgtgtagtttgcttgaagggagattattctattcttctcaagaattctttccagggtaatttttaaaatcagaaataataattggagcaaaataatttttaaacaactaggagaccaatttagatatgagaaacagaaaaggaacttatgagtaattctttagttttaactgaaatacaaatacaaataagagaaataaatgtcattctatggagaggagaatacaagtctcttaatagtatgttttcagcaaaatgcaaaatttacattaatatttaaaatagattttttaataatacatgtgtttgtatatcttctaaaaattaaaagttttattggcttattatgaaattagcctcttggcttactcctttctcctttaaacccccaattccctcctcttagagacaaacacttccaaatcttttagatgttttgtttttttggtgtcatttttgtttttttttttacttaaaattcttaaaatgttattttttcaaattacatactatttattgatttactattatgcatgatgtggctttaaccttactctgcttctcctctctttttcttctggtgtcatctagtcacaaattttggttaactcaatagtcagtgttactgttattttatctatgtgaatactcttcactcttcagccaaaagtatattttgatcacgttgtctttattttttagtaatttttaaaaatttggtgaagttaatctctgcctctctctgtttgtctctctctctttttttactgtacttagtttatctgtgtgaacttatgccccatgttatccttctactttaattttagtggtatttcaggggagatgagaggaaaatatatatgattagactgctaagttaaacctgaataccactttaatgccttttcagttctgtgactgaagttgataagaatcagagttcaaaattcaaatgtacaagtctacagaatatcacagataaggaatatttgggtaggttctaaactaaaatataaacaagtaaacacaatattgtgattttcccaagcatagaatgtagttttctctaatgataatttatggtaaaaattatgaagtacagtataaaattcacctgatttcaaaattatttaacttttatttctgtgatagtgacaaatgtaaaaggttgtattcaattaactttacagacctagagcaacaacaacaaaatccaatttttccccattcgtctgtaagtttaattctgtgtgggcaaagagaagcactttaatttttttaaaatgtgttttgcagcatatatctcatataattctatctttaataaatttttgtattaaagtataaatacagggagaatagtaccccaatcagaagtatgtccatcaatgaagtattccaatgtgaacatacccatttaacctccacccatatttagaaataaaacattaacagtaactcaactctcctcgggcaccttcaaatcaatgactccactctccttcccctaaaagtaataattagtctgacttctaaaaccccaagtcttgaactttatacgaatgcaattttggagcgtcttttccccttagttctagcatctttcatttgacattaggttaatgagattctcctgttatttctttttagtacagtttattttcatcgtgtatagcattccactctatgaatatactgtaaatcctttatcccttctactgttgatggacatatgggttatttttagtacttgactattatgaataatgctgcttcgatcatttttgcccatttatcttggtgtgcaatgtgtttacctacaaactttgggtaaatctaggagtaaaatttcctggtcatagagtggtttaactttagtatataatatcaaactttctatttcaaaataaatacaccaatttaacatacattagtagtagtttctactgttccccattctcaccaacattggaagaatnnnnnnnnnnnnnnnnnnnnnnnnnnnnnnnnnnnnnnnnnnnnnnnnnnnnnnnnnnnnnnnnnnnnnnnnnnnnnnnnnnnnnnnnnnnnnnnnnnnnnnnnnnnnnnnnnnnnnnnnnnnnnnnnnnnnnnnnnnnnnnnnnnnnnnnnnnnnnnnnnnnnnnnnnnnnnnnnnnnnnnnnnnnnnnnnnnnnnnnnnnnnnnnnnnnnnnnnnnnnnnnnnnnnnnnnnnnnnnnnnnnnnnnnnnnnnnnnnnnnnnnnnnnnnnnnnnnnnnnnnnnnnnnnnnnnnnnnnnnnnnnnnnnnnnnnnnnnnnnnnnnnnnnnnnnnnnnnnnnnnnnnnnnnnnnnnnnnnnnnnnnnnnnnnnnnnnnnnnnnnnnnnnnnnnnnnnnnnnnnnnnnnnnnnnnnnnnnnnnnnnnnnnnnnnnnnnnnnnnnnnnnnnnnnnnnnnnnnnnnnnnnnnnnnnnnnnnnnnnnnnnnnnnnnnnnnnnnnnnnnnnnnnnnnnnnnnnnnnnnnnnnnnnnnnnnnnnnnnnnnnnnnnnnnnnnnnnnnnnnnnnnnnnnnnnnnnnnnnnnattcacatacactgtttgtccttctccattgacttatttcactcagcataataccctccagttccacccacgtcaaagcaaatggtgggtatttatagtttctaatggctgagcaatattccattgtatacatagaccacatcttctttatccattcatctttcgatggacaccgcggctccttccacagtgtcgctattgtccctttttgtaaagtacattttcaacaactctcttggtggtttttctattgagttatttatctttttcatactgatttataggatcctgtgtgttgtggataaggctcttttttgggtgtatgagatacattttttctccaaaactgtgtcttgccctttcactgtggaaatgttgttttgttttgtttttttgatgaacaacgttcttaattttaatgtataccaacattactttttagggttacttcttcttgtctcctactcaagagaaccttttctttaaggttttattcatttattcaagatagacacacagagagaggcagagacataggcagagggagaagcaggctccctgcagggaacttgatgtgggacttgatctcaggaccctagaatcacaacctgagccaaaggcagatgctcatccactgagccacccaggtgcccccctgctcaagaaatctttacctaactaaggtcaccaagatattctcctatgtaatccttctgtaagtatttttgtttcacttttcacatttagagctaaaactggctagaattgattttgtgtacaattttacttacagagtgagtgatcatcttagtttgcctggcactcagaggaattcctaggatgtagaagtttcagtgctaaaactagaaaagttctgagcaaatgagattatattaattaggggtcaagttttattttccatatcgttattaaatcgatccaatactatttattgaaaaaaagactccttgcctcgatactatgcagtaacaccttattcataaataagtttccagatattcacgaattgtttctcaatcccctactttcttcttctaaaccatttgtctgttttcattccaatagtagtctgttttaattacagtggcttcataatgagacagtctaagttttcctgcttgttcttctgtaagagtgtcttgtactccatgattctttgcttcccactccccctcctttttaataagtatgttttagaatctgtcatttgtgatcaaaacaaaactttggcttttgattacattgaatctacagcttaagttctgaaggattatcattttaacaatactgagttttccagttgatgaatatgacctatttatttgtcttctttaatttctctctctttttaaagatttatttatttatttgatagagagtgagtaagccaggggaggaatagagggagacagaaaggaaaagagaatctctagtggactccctgctgagtgcagagcccaaaacaggcctcagtctatcatgatctgagctgaaaccaagagtctgccgctccacaactgagccacccaaggagaaccagtgttgtagttttctatgtagaaaacttgcacatcttttattaggtttatttcttggtatttatccctttgatgctgctatacatggtaatgtttcttaaattttcattttctaatttttctttatgtgtatagttgtgcataataactgcatttagtaacattgttaaattctcttaataattctaacaatttatctttggagtcttttggatttcttgtatgcgtaatcatatcatctgaaaaaaatgagtttttttctttcaaatggcaatgccttttatttcatttaaaaataaaatcttattgaatggcccagacctccagttctactttattagaagagataatactggccatccttgtatttttcttttatttctaagaagaacttacatatttaaaacttaaaatatgagatttcctgaaatatttttaaacagacttttcagatttaggaagctctctttctagtttgttaaaaagtttttttttttcttaaatctgtgctgtattcgtttctattacttctgtaactaaatgccacaaatttagtggttaaacaacacagatgtattatcttatagttctggaggtctgactccaaaatcagactgagtgcaccacagttgcagtgttggcatggctgtgttccttctggaggctcaaggggagaatctgttttcttgtttccttcagcatctagaggctgctggcattctttgcctctttgccccttcctttatgttcaaagtgcatcattccaaccactagatatctctcctctgactctgagaggccaacctggataactaggtaggccaacctggataactcaggctaatcttttcctctcaagatcccaaaccgaatcacatctgtaaagtcctttttgccatataaactaccatatggattccagggatcaggatatggaaatgtttggggcaagggggagcatcattctatctaacataggtggtgaatcacattgactgatattttatataaagcaattttggatattgaaataaatctaatctggttgtgacaatgtgacagaaaatatactttgtaatttttgctctttgaaaattgttaaagcttgatctatgacttagaatgtggtcaatttttaaaaacattctgtttacatttgaaaattatacatctgctattgtacaatgtaggattctatattcccttatggtatcgatttttatttatttatttattcatgagagacagacagagagagagggagagaggcagaaacacaggcagagggagaagcaggctccacacagggagcccgacgtgggactcgatcccaggtctccaggatcaggccctgggctgaaggcagtgctaaactgctgagccacccgggctgcccctcctttatggtatcaaatttgttaatcattttaaagcttttatattctgtgtgtgcctgtgtgtacttactaactagtgacggtgaaaaatttaaaactaaatgattatagattgctctcttttcatgctttcatagtttgttttatctatatttgaggctatgttattatatatataattgagccttgaacaacctaggtttgaattgcatgagtccacttatacatagatttttttctctttgctttattgttaaaaatatttaattttctaaaagatcacacaaaagctgggaagagaaagaaggaggtcaactagcctacattaaaatctgggctgaggaaggacaaagagctacctaaggaaactgatatctggagcaaactctagagcttgaaatggctgcatgccagggggaccagcagcctgggtcagtcacactgatgagcaccagcagggtgcagtgggcacatcaaagttgctgcaccaattattcctccttttcagtaagggaaagcaggagttcagtgtttagatatgatcttgatggtcttcgggccctttctggtcttcttccagttgctaccattgaattcctcaatgaccacactccaggtgatgccctcaatttcagcatgtgaggtattgaaaagcctccagggtctgagtggtgagtggaaaagctctgaacatcccatctcttacacagaaggtgtgctgtgctttctgtgttgactatgtatgtagttactctctgggctcccttcagaagctggaacaatgaagtatgtatcttcttgaaaattctgcagttgagtcaaagatgtgcagttgtggtgaggccacaatttgagaggactgctccaccatggtgtgctctacggggccctggtaatgcaacgtgtccagccacagcttggtggccccctccgaggtgagcttctgcatttctggagcctgtcccagtgctctccctggcagtggaagcccagcgtggctaccaaggtcttggggaccgcggtggaggatccccctgaacagtctcctcctggggccccagcatgtgcgcctctgcggcctcctgcccactatggcttcctctgctccctggactggctctgcctgggcctagcaggtcggttactgtaggcggccaggccagcagggacccccccgaagttgcggttctgctcccagcctgccagggctctattcctggatttttccggtagactgttgtaaatgtttttctcttccttatggtttacttaataacgttttcttttctctagcctactgtattgtaagaatatagtatataatatgtataatatacagaatatgtgtttaattgtatgatatcgatgaggcttcaggtcaacaggctactaagtttttagggaatcaaaagttatagccagagtttctgctgcgcagggtctgtgatcgtttaagggcacctgttacacaagtttagaattgctgtatttatctggccaattgaacctactcgcattatgtgatcttaatcgctaataatgctttttgccttagattcctgcaatagatatatcggtaaccattctctttaggttagagtttctgtggtgttttttcatcttttaattttccaatcttttgctgtcttcatattttagatttgtcacttgtaagtgtatatatgggtattattttatatttttatttatctagtcagattatcctagtcttttaaatggaagcagttgatccatttgtaattcaaggaatttatgatataaatgagtttaatatcatcttgctgtgctttccccatagtacctataatacttctctgtccttccccagctcatttccctccttcccttcctggctaattcttcacttctttcttctcctcttcttttatgatggtggacttttaattttttcatgttctgcttctttagcttggtattttatattactgtagcattttactagttctttatagagaataaaaattgtaaccttgttttatcaaagtttaataaaaatagtatttttacttgcatgtataaaacaagtaaactttatttatccctgtctctactttatgttattactctcatttattttaaatatacacaaatgaacatcagcatctaagttaaaaaccttcaggatgttattgttttgcagtcagtagttattaagattatctatgtatttatattttcaggtttgatattccttacagcatttttgagactttcatctaggatatttagtaggaatctttcaattaatttacctttttttttttttgcctgaaattgctttttatttcaccttcatattaacaatattttgtttttttatggaattgagcccaactcagggttttatcccagggccctgaggtcatgacctgagctgaaatcaagagttggctgcttaactgactgagccacccaggagccccaacagtgatttttaaatccgtggtattatatctttctggtatgaaagggaaatcccttgttgcaatattctttgtttcctattctttctcttttcttgttctgggatactaatcatgcagatgtttgacttttttctctgtaactggtattactctgatacgctttttttttattctgcatacttttgtctccatgtttcattctaaatattttcctttggccctaaattgattctttgaaaaatgtctgacaaagaaatgactgacaagaatgataaaaagatagagaacacacatttcccaatattaagagtgaagaataagacatctcgatagctactacatgatgatgtgtaactttcaattttgaacaagtaaattcacaacatacacttcacttttctcactttgtatatatcacaacttctgctaaaaatcattattctgtgtttacgttattgtgaccagataatactattaaaatgcaaccaatttgtcagtgtggttttacttcatttctttacaaatttttagtattacccggaatttatattgcttttattttttcatttgattttctttgcattaatcactaacatatctccagaattaataagtgaaatatatagtcttttagtttgttgaaacatatctgggcatttgtctagtttcttttcttttagagacatcttccacaaatcccttagtatttcaactggtctagttgattttttttgcagaatggtagtaattttgggatttttatcaataacaagctgggaagatgcaatttgacctgtgtattgaattgcatgtttttgcaaccccgtttggatcctttgaatttctcttcctcggtttacgtctttgtttgcatgaagtacattcacatatttcttcttgataaagaggacttgggagataaaaattttatgatcttgcattcaggaaaatagcatcatttgatcatcatagttgtttgataggattttgggggatacagaattctccattggaattatatccattagaattagaaagcagtggtacattgttttctaatttcagctgttattattcagaaatctgatggtattctgaaccctgaaccctggtatttgtcaacttctctttcttttcttgtgttctgaaaatgcatgatgcatgtgcctttttccacttagtgtgaagagccttggtgtagtctcgattttaacttttatggtaagaaaatctgaatgactgttctctcttcagccccccccccccaaattgttgcttttgatcaaaaactgtttgatttatgactggtagtcttgttaatgtggagtaaatcttcctgaattgtttttttcttttcacttaattcctattttctttgttttgtttggttcagttgactttctaggaattttgttgacaacattttccgaccattgtacagaatattactatttaattccttcaaatttttagtatcttacagctctcttttcccctaatgtgcttttcataccaccctgttaattcataattgtcctgcactcctgttaaagaggagcacatcttttggtaccattactttgttttattcccatcttctgtgttttatttcatttgcctcaatggaagttttgttttattttgttttgttattaaagactatttattaggtaacagattttcagaggcaaacagttttggattgtttttttctcttgacaacaatgctacaaggatttttcagatatatatgttaagaaatctgctccttatccacactgctctttgccttagtagtcacttggaactaaagaaaaacattttccctaaaggagttatcaatcttatactactttctttaatgcaattatatctgctggtccatttctccaatgaatggggacaaacatctagatggaagaaatatgtagggcaaagtaagtgagaaagacacactgttcttccagtgcttcttccttgtgttcaccaacccactggaagcttgctatttatgtattttttaattaaaaaaattttttagttaaaattaattaattaacaaataatgtgttattagtttcagaggtagagtttatttatcagttacatagaacaccgaatgctaattccatcaagtgctctccttaaacccaattaccccatcctccacccacctcccttccagcaaccctcaatttgtttcctaaagttaaatctcttatggtttgtctccctctctgattttgtcttattttattttccctcccttctcctatgttcatctgttttgttccttaaataccatatacgagtgaaatcataagatatttgtctttctctgaccgacttatttcacttagcataataccttctggttccttccacatcattgcaaatggcaagatttcattctttttggtggctgagtatgtatatatatacacacatacaacttcttcattcatccatcgatggacatctgggctttttccatattttgactattgtggacatttctactgtaaacattggggtgcaagtgcccttttgaatgactctgtatcctttagataaatctagataaatctctagtagtgtaattgctgggtcatagggtagctttatttttaacttttgaggaacctccatactgttttccagagtggctgcactagtttacatttccaccaacagtgtcagaaggttcccttttctccacatggtaccaacatctattgtttcctgagttgctcatttcagccattctcactggtgtgaggtggtatctcattatggttttgatttgtatttccctgatgatgagtaacaatgaacattttgccatgtgtctgctggctatttttatgttatctgtggagaaatgtctgttcatgttttctgcccatttcttgattgaattatttgttttttttggtatttaatttgataagttctttatagattttggatattagtcatttatctgataagatatttgcaaatatcttctccattatgtaggttgcctttagttttgttgaccatttctgttcttttgctgtgcaaaagctttttatattgatcaaatcccagtagttatttttacttttgtttctgtttacttttaagatgtttctagcaagtagtggctgtggcccaggtcaaagaggttactgtctatgttttcctctaggattttggtggattcctatctcacttttaggtctttcattattcttcattttattttttgtatggtgtaagaaagtggtccagtttcactcttctgcatatgactatccgattttcccaacagtatttgtggaagagattatcttttttccattggacattctttcctgcttcattaaagattagatgaccatagaattgagagtcaatttctgggttccctgttttgttccattaatctgtatgtctgttcttgtgctagtaccatactgtcttgatgattacagctttgtacagcttgaagtctggaattgtgctgccaccagctttgatgttttctttttttaacattcctttggatattctggttttttttttttctggttccagacaaattttaggattgtttgttccagctttgtgaaaaatattgatggtcttttcaaagggattgcattgaatgtatagattgctttgggtagcatagacattttcacaatatttgttcttccaatccatgaacatggagtgttttaccatttctttgtgtcttactcaatttctttcatgagtgttctatagttttcagagtacagatcctttacttctttgtttaggtttattcctaagtgtctaacagtttttggtgcaattgtaaatgggatcaatttattgatttctatttcttctgcctcattgttagcttatagaaatgcaacagatttctgttcattgattttatatcctgctacattgtttattcatgtatgaattctagcaatttttgggtaaagtcttttggattttcaacatagagcatcatgtcatctgtgaagaatgaaagtttgacttcttctctgccaacttggatgccttttatttctttttgttttccaattgctgaggcaaggacttccactaccgtattgaacagcagtggtgagagtggacatcctcttgtggtcctgatcttaggggaaaagctttcagtttttcccgattgaggatgatcttcatggtgagccttttgtatatggcttttatgatattgaggtatgttcactctatctctacacagcagagagtttttataaagaaaggacattgtattttgtcaaatgctttttctgcatctactgagaggatcttatggttcttgtcttgtcttttattgatgtagtatattacattaattgatttttggatgttgatctacccttgcagcccaggaataaatcccactttgtcatgttgaataatccctttaacatacagttggatcatattagctcacatcttggtgagaatttttacatcatgttcataatggatattggtctataattctcctttttagtggagaatttgtctggttttgggatcaaggtaatgctggcatcaaagaatgagtttggaagttttccttccatctattttttgaaatagtttcagaggagttaggtgtagcaattcttctttaaattctcctgggaagctatctgactctggacttttgtttagagatttctgatgaatacttcaattttctcactagttatgggtctgttaatattttctattcttttttcagtttagtggtttatgtttcttggaatgcatccatttcttccagactgcctaatttgttgacatataatttctcataatattctcttctaattgcatttctttggtgttggttgtgatctgtcctctttcatttatgaattttgtattgggtcttttctcttctttttttggtaagtctggctaacggtttattgatcttattctttcaaagaaccagctcttagttttgtcaatctcttctactgttctttgatttctttgtcattgatttctgttctttttttttatttaaagattttatttatttattcatgatagtcacagagagagagagagagagaggcagagacacaggcagagggagaagcaggctccatgcagggagcccgacgtgggatttgatcccgggtctccaggatcatgccttgggccaaaggcaggcgccaaacctctgcgccacccagggatccagggattccccccattgatttctgttctaatctttattatttctcttctctttctggatttaggctttattttctgttcttctttttccagctcctttaggtgtaagattaggttgtatgtttgagaattgtttttctttttttaaagattttatttatttgagagagggagagagagaaagagagagaaagacaatgaatgagagagcccaagcagagggaacacaagcagggggagcagcagaggcagagggagaagcaggattctgggatcatgacttgagccaaagacagacatttaagcactcaggcaccccgagacttttattgttaattgaggaaggcttgtattgctatactatatccttccctcttaggaccacctttgttgcatcccaaaggttctgaattgttgttttccttttcatttgtttccatgtattttttaaaagttttttttaatttcctggttgacctattcattctttagtaggatattttttaaaccccatgtgtttgtgttccttccaacttatctcttgtgattaagtcaaagtttcaaagcattgtggtctgaaaatatacatagtataatctcaatcttttggtacttgttaagacctgatttgtaaaaaaaaaaaaaaaaaaaagaaaaaaaaaagaaaaaaagaaaaaagacctgatttgtgacacagtatatgatctattctggagaatgttccatgtgcactcaaaaatagtgagtgttctgctgctttaggatgaaatgctctgagtatatctgtgaagttaatctggtccttgttggtcttctgcttagatgatctgtctattgctgtgagtggggtgttaacattctctactattattgtattattatcattgtatttctttaattttgttattaattggtttatagaattggctgttcccaagttagtggcataaatatttataattgtttaatcttcttgtttgatagacctttttattatgatatagtgtcttttttcatctgttacagtctttggtttaaaatctagttagtctgatataagagttgccactccagctttcttgtgatgtccattagcatgataaatggctctctaccccctcactttcaaacttttttttttaaattttattttatttatgataagcacacagtgagagagagagagaggcagagacacagacagagggagaagcaggctccatacaccgggagcccgacgtgggactcgatcccgggtctccaggattgcgccctgggccaaaggcaggcgccaaaccgctgcgctacccagggatccctgccccctcactttcaatatagaagtgtctttgggtctagattagactcctatagatagtaaatggaggactcttgtttgtttgttttttatacaatctgatatcctgtgtcttttgattggagaatttagttcattcagagtaattattgaaagatatgaatttagtgccattttattacctataaaatcactgttccttttttttgtttaaggttttatgtatttattcatgagagacacagagatagaggcagagacataggcagagggagaaacagtctccttcagggggcctgatgtggggctcaatccctggaccccaggatcacaacctgagtcaaaggcagatgctcaaccactgagccacccaggtgaccctaaagtcactgtttctgcagattcctttctagtcttttttacttttcaactttctcttagctcaaaggattccctttaatacctcttgcagggctggattagtgttcacaaatttttttagtttctgtttgtcccagaagctctttatttctccttctattctgcataacagccttgctggataaagtattcctggctgtatatttttcccatttagcaccttgagtatatcatgccagtcctttctggtcagccaggtctctgtggacaggtctggtgccagaaacatgtttctctacccttgtaggttaaggacctcttgttctgagttgctttcaggattttctctttatctctgaaatttgcaagcttcactattgtatgtcaggcttgacctatttttattgattttgatgggggttctctatgcctcctggacttgaatgcatgtgcttccctggattagagaagttctcagctctaatttgttcaaataaaccctttaccctcctgtggcccctattattcagatattttactttatgatattgcggatttctccagttctccctttgtgaataagtagttttctttttctcatcctcgttcttttcatcattttatcttttatatcatgaactctcccttttgcctcgttcatcctagtagagcatccagttttgactgcaactcagtaatagtatttttaatttcagcctgattagattttagtttttatttctatagtaagagattctctactgtcttctattcttttttttcaagcccagctagtatctttattattgttttgaattctagttctgacatcttacttatatccgtattgattaaatccctgtcagtgagtaccacctcctgttctttctttcgaggtgagtttcttcattttgtcattatatccagaagagagtagatgaaagagaaagaaaagacaaaaatagcaacaacaccaccagaaaaatacaaacaaaacaaagcagaagaaaacagaaaaaaacaaattaagaaaaaaaatcagacaagaagtaaaacagaagaaaacaataaactagatccggatatattttggtctttgttaaaagaaactagattgcaaaataggaaagaaagagaaacctatatatatatacaaaaataaaatacaatgaaatgaaacaaaaaataatgtatatatgcattatataatgtatgcattaaaaataaaaattttaagagaactaaaaaaaaattgacagaattgacaatagatgaggggtgcctgagtatctccattggttaagtgtctgctttcagctcaggtcatgatcctagggtcctgggatggaaccgcatggtgggcttcctgttcagtgggaaggttttattcctgggtctgcttttccctttcctctctgctctctctctctctttcgctgtccctctctctcaaataaataaataaaatattaaaaatagaaaagaactgaaaaaaaaaaaaactctgaaggactaaggaataataattaaaaaaagaccacaaatggtatatgctgttttccccaagagctgaaggttttttagttctctatgatctgtaaacttggtattcactggttgttcgtgcggggcttctgggcaaggggcctgttgcactgattcttaggtgtactagccccggtagaatgtgcccccccttgccagggagctgagctcatttatgtggctccaaattgctctatgtggcactattttgctccctgagggctttcagcaccgatggtgggggatgaaaatggcagcaccctgatctctagctttggagctgaaatttcactccccttacttgtcagtgagccctcatagaaaagcagtcaatcaattcttgtctctctggtttctgtcctctttgtttacccagcctgtgaccaagcatttttatctcactcaggcataggagtccagtttccagtctccaaacgttatggactgttgtggtgcccacttgtgccattcctcctaggggaaagaggggagtcttgccacgcttctgccttttgctggatcctgcttgtaaagcggtcactcgaccatgcagcagttcatagtttatggcaacatcaagcagaaagctagcacctaactcgctcttttcagctggcttccctgtcccgatgtttggaaactctgacacacttaggcacccgcctaatcttttagtgaccctagggaacctgaaatcatgctgttctactctttttttaagaagtaagctctttttttaaatagctgtatcatcttatagattattagtatgtcattttcacatattttaaatatcatatctttttcctttaatgtactttatataatctgttgatttatgagtgaattattttatgtatctaaaatacattttaaaaattttacagttttctccaaattttcttggtttccctaatttcctttttactgtatgatggtttaagtctacaatcttggttttgagtgttttgtttttggtcttttggttttgagtctgtcttacaatgtcttatgatacttggaagtccatttatattgaaaaatgaaactaagtaactgatcttatgtgcctaactacaaattaccaccccggctagtcaggtttatctaaatggcctttcatataagaatctgtctgtcttttctctggggtggttcattttctctaaacatgggttatctatactttctgagttttctgaatacattgggggaaaaatgtgggatctaccttcttataattgtccctctgctatcaggtgtcaccctgattttgcctgtataggaaatccctatatctagggttcctttgatctaacctttcctgggcataaaccatttttcttctactctaccatgtgagaccaaagtagatgggtgactaagaggagtggaagagatgatttatgtaaaactgttttaacaaactttcagctaaccatcctgtcttaatatccaccctcacatgcttgtctgaaatgttatctggtacctgaaaatcctgagccttctggttctagtctttacaattagcctcctaaatttccttaggattcatgttttgtgaatagctgaattattgattattcatccatctgctttacagctttaatagttttgtttcaaattttcatctgcttatttctctgctactttttagatactatagttttgcctttgaaaaaatattttctttaaatttaatgtgtttccaagggaaacctcctatttccttttaacttacactctttgggagtcggggttctagaactaatatttagttgtaaaatgtccatatgatatttcatgatttcccaaatttgtataacacacattgtcttccaactatgagcaacaagtatgtaccttatttttatccacttattgttatattagtttcaggtgtgcagtataatgagtcaacaattctatatatttctcagttctaagaagtgtacttttaatcttctttatctatttaacccatccacccacccatctccctcctggtaactaccagttttttctctatatatttaattgtttgtctctatgtggttttttgtttacttgttttgttttaaattcaacatatgagtgaaatcatgatatatgccattctctgactgacttatttcacttagcattatacccttaagatccacccattttgttgcaaatagcaatatttcattattttcatggctgagtaatattcctctgtgtgtgtgtatgtgtgtgtgtgtacactagagctttcttttaagcaactgggttatgtgattgtgtgagctggcttgacaattctgataatttaaaagtaggccagctgttgggactggctggaatacgtaggctcagtctgagattattgtccataggggaatttcttcttcattagggaagcctcagatgtactcttacggcctttcagctgattgaatcaggtccactcaaatcatctactataatctctcttacttagaattaaattatgaacttgaatcacatctacaaaatacttttccagcaacatttgtattcatgtttgaataacatttttttgtttgctttttgattgaaatgcatgaagaacccaaagtcaacagttgatgttctttgcttctagttcagtggaattgttgtgtccttatggaagcattattcttggatccatgacctctagattagcaaagcctaaattcatggtaatggaaaacaaacattttactcgtggatcactaggagtaatagtgagtgaagccaattccatttaattcctggttgtatattggactgtgatttagagtatatataacattctacaggacattgcttcatcaggaccaggtattgtcttctagttggcactgtaactgagttctttaataccttatattcttttaccaagctagctgcattaagataatggggaatatgacagtacaagtgaattctatcagaatgggcccattgctagacttcgtttactgtgaagtgaatttcttaatcagaagctatgctgtgtgttaaccatggtggtggatgagacattttattagtccactgatggtattattctatatggggaagacaaatcatatccacagtaattaactatcccagtaaaaataaagtgctactccttccatggtgtaaatagttcagtgcatttaacaagccagcacttagctggctaatcaccctggagcatggtgctgcattatagactcaatgctgttctctcctactggcaaattgagcagctagcagtggctgtagctaggtggccttgaagagtaaacacccatgttgccgagcacatgcataacctgctaccatgatcactttgcttatggtttcactgggcaaagaaggataactggtatccacagagtggttccctctattttatttaaatccttttctgatgaggttactctggtgatcattcacatgggacagaaatatctttatattattttcctattcagagatatttatccacatccttctttctcagatctctttgttaccaattcctgtgttcatttcaagtccctgatcatccagtcaaacttttggctacagccaatgaatttacatagactttaatatctgactattgcccctttcagacaaaatgagcaatcaggtgtactgcttgaagttctgcccactgaaaggacttcccttcacgttccttcaaggatgtctaagaaaggggcaatagagccattgtgcatgtccaactttatgggctggttgttcagacaacagctggttcatgataggcagctcagatctcatggcaacctggtagccctcggttaagcattcagcttctactaatactcagtagcaatccaaaagctttttctcaaaatgagaataattatttgcagaggatggcagatacttattttaaaatcctaagagcctcccaaaggctccacacagcatttctatctgccactaatacttcaagcacatcatatctactggatcataaggcctaagtggctcagaaacttgcatagaagcttggatctattgcctagccttttcttgttctgactcctactcaaaactagcagtttttcaagtcattctgtaagtgacccaatgcagcatacccaaatgggtatcatgttgcctttgaaatacaaagaggtcccctaggcattatgctttttttttttccattggtaggaggaactagaggcagtaacttattcatcatcatgaaagatatatcttgacatgccccacagatttgcaccccatgaaattttgctgaggtgaaaggctttgcattattagtggaattgttttctacttctgacatactaatatatatttttaaagattttatttatttattcatgagagatacacagagagaggcagagacataggcagagggagaagcaggctccatgcagggagcctgacgtgggactcgatcctgggtctccaggatcacgccccgggctgaaggcgacgctaaacccgctgagccaccggggctgccccatccgtttcatctttagggacaccattattaactagccaaggtcttaggtctctctgtgagtcagactcttctgattcctgctttggctgtcagtcaactctgcttttaaaggccatacaacagattgaatcaggatcaccagattttctaggataaactcttacctaatgccaacctgttacagactttaatcacaaagtacctttacagcaacgcctagattagtgttcaattgaatatctggtactatgtctagcctatgtggcatatcaaaatactatcacaattaggaatccacattttgaccttctgtactaaattgcatgttttgggatttcttcatttcctcttccttggtttatgttctttgttttgatggagtatattctttactttttcctggagaaagaatgcatggaagattaaaattttgagaacttaaatcatacaatttttatatttgcttgatagatttccttggcaggtaatccattggaagtattttagaattaggatgcatttgctccgtttcttagattccatttttgagaaatatgatgacattctgattgttgatcttttgtaagtgtcaatttttcttcattctcagcatattttgaaaataaatgctgtaatttgacatgtgctttttttttcactgttcattgtgcagagcacttagtgagctttttctttttctttttttttcttttaaaaaacactgggttttttcaattttgatctctcatgcttttctctatccttttttcctctcaccattaaaaacagaatcttttgtctggcactcctattattgtacagtacatcatcttgaactattattttaattttctttctattaccattttctgcttttttgtttattttttgcttcattttatcttctaggagtttcttttgacatcatcttcgaaccattttatagaatattaatgccaattgctcatatttttaatattcggtagctcatttttgttctctgaatgtcacttttttatatcaccctgtccttttttcaagagatcagtaacttcttagatgtcttaaacatataaaaaaaatttctttttttctgagttttcttgatttcctgcaattacctgttctctgcataataggttcttcattttcaaggtaaaatctgttctgcaatatctagtgatcactgaagtacactggaagaatttaatactaaatagttgatcatgtgtatatggatagtgattgtcacccaggtcacttggctttctctgtgtaaccttcaatatcagaatctgtaggtctttcttctaggatagttcattttctcctttgcagggtcgtgtactctcatgtatgggtaataaaactgttaaaattctttgagtattttggggaaagaatataagttgcggactattattttgctctctattatcaggaagcttctctgttttttctgtacatggaggccttgtatctaggattcctctgattccaaactgtcctgaggataaagtccttttcttctactctcatatgttgtgtgtacagtggggaagcctgatggaggggaatggaggagatgatgtatatggacttatttaaacaatgtttttagaaattatcttttcctcagccacgtctttacatctctgattgaaatgttacctggtaccacgtaatcctgggtcaatctggcttctgcagtttaggaatagatctcttgaatttactaatggttgatgttttgtatatcatatagaagcttttgtatatcgtatatataagtaataactaacttagcttttagtgtgattaactgtgtttgtactttttaagctttaacatttttgttttaaattttcatctacttatggtttctatcaccttttttagacttttaggttttacctttttaattatttttaaaagattttatttatttatttgagagagagagagagagagaaaatgagcggggggaggggcagagggagaagaagaagcagactctgctgagcagggagtctgaggcagggctcaatcccaggcccttgggatcatgacctgagctgaaggcagatgcttaaccaactgagccacctggatgtgcctaggttttgccttttaaaaatagtttttctttcaatgtggtgtgatttcaagattcttgaaggaaaattaagtttaaaaaatttttatatttaacttcaatttcgcaattatattttttaatgaaggggtttataagactgttattcatgatacctagagaaaaaaatatattttactaagaaaccaaggatactagagatagaggacagaaaaggggcttactggtttgttctgagctattctcagaaaaacaaacacaaacaaatatttggctaaattagagatgagattgccattttctttatttctctaaagtaagaatttaaagaggtagaaatgatgacagctaagtgtaagttatatttaagtttattttaaaaaactgaaaaatatatatgaaatgtatatttcaaatatatatgaaaaatatatatgaaaaatatattaagcttaaaataaacttaaatataacttatttatgagagagagagagagagagagagagaggacaagtgggggagggaggtgcagagggagagggagaaatagactcttcactgagcagggagcctgatgtggcactaaatcctggaactctgggatcatgacctaaggtgaagacagatgcttaacaactaagctactcagaggccctgtaaatgcagttttaataagcatgacaaggaaagcataaataaggagtagcatgttcaagtgttcttatacttcttaaattgtcttattaatttgtaatgttagatgtagtaatttcagagaacctgggtggctcagtcaggaaagcatctgactcttggtttctgctcaagtcataatcttgcagtcatgggattcagtgctgccttggcctctgtgcttaacatggagtctgcttcagattctctctctgtctgcctcctgctcactctttctttctctctcaaataaataaataaatatttaaaaaatatattaatttatattaaagttttataagataaggatgaatattgtcatctctgtgataatccctaaaaaattagtaaaataatgtgtggttaacatgctatgagatgaggaaaatagaattatgaaaaaaattatttcaaaaaaaaaattatttcaaaagaatgcaaaaaagaaaaaagatgtaaaaagatgggggtcatcatcattagcaaactgattagtaatatgatttttaaaaatacgaatacatgagcaattacactagatgcctaaatatttagactatttattacactagatagtttaaatatttctgttatgtgaaagtatttcagactagattaagaaataaaattcaaatatatacatatttttcattcttttttctttttaatgctctgatgagatgaattcaactgccttgtctttgagttgactgatcctttcttctgcttcacctaatctgcttttgaacctctgtagtatattttttttaactcagttatggcattcttcagttttgacactgctgtttgtaacttccatatatttttatttctctgaagttttcatgtattcattcattctcccaaatttgatgagtatctgtatgaccattgctttgaactctttattggataaattacttatctctgtttcattaagtttttttttttccggaggttttatcattttctttcatatggaacatagtcctctttttcttcattttgctttaattttctgtgttggtttctatgcattaaccgcttctcacaatcttgaaggtttgtccttttgtgtaggagattaaccttatcactcaaccttgcttttggttgtctctcaaacttttatgattgtgcaagcagtctatttgactttaatagctctcagtagttgagagcatgccaagaccagttaatgtcccaaagaggaggatgtcagcagtcagcccacctaaattcaggctgattggaagccagatcctcatgcagcaactctgaatttatatatatatatatatatatatatatatatatatatatatatatatacatatatatatattaagactacaagtataagctctcctggcctcagggccaggtggtctggaggtatctcctgggcagcagttgtaaaaatcagtaatctagaggagtgtataagctcccttgtggagataatggtgaggtgtagtgaggcagaaggaaattatagagatggtattctttgcctatgtttctgagagtgcctctgtagcctctagatgtgtgccaaagctgatatcctctcttaagtctgaagttccaggacttggaaatagtcctttttcacagaaaggctgggggtgtgtttcagtatggtccgtacagtacactggaaattatagcctaccaggagctgtctctgaatcttatagtcccatgggacccaggacaacaagctcctttgctcatcaaagccaggtgatcaacaggtatcccctggtcagcagctgcaaaaactagtacaccagatataaaaataggaacactagacttatataagagctccccaccaaaagatgctgttactctgaaggtagtgtatgtcctctgaaatttcaggaaaagtttacagtctgtttaactagaagtctaccactcttgctgtggctattatgataaactaatgatttctttcacagaatgattgagctcctgagtgttgtctgttgctatgctggaagtactagctgtttaagagctctttctccattcaatgtggaacctgtgcacataagccctgctggcccccaagccaagtgatgtagaggtgttccctggcagccacaaaaatctggatgccagagaaggatataggctcttttctgtaaaataccagcgaactggagcaaagcagagggaaagcacaaagattatattcactggcctccattccctgagagcacttcagtaggcccctaaaagtgtgtcaaaccagaactcaggccaaagttcctggacaagcaaataggtctctttctgaggaagactggaggtattatttcattctgctgtctgtgcagtgacttgagagaggtagtctgcctagagctgattctccaatttgggctcatggaacccaggaaagcaagcctccatggtcttcagggccaggcaagcatggggcatcctctggatgccagcagcaaaacctgtcagtagatacagaaaaaacaactgaggtactagtggtgcccattggttagagtgaggccaaaggagggtcaaaaaagaaaaaaaagaaaagaaaaggaaaaaaagagggagaaaaagatggtaaccattgactctagtaagatggaaggagaataggaaaatagtggtaactagtctccatctccagagagtatccagcagtcccatgcacctcagatcaacactgtaaaactagaaaatgagtctctttcacataatgtctgggcacatttcaaagggctgcttctgtctttcctggtgtaggagcaatgagtctgggtgcccttttaaggccattcctcagttggccacatctggtttttgtgggcatgagccccattggtcttgaaagccaggtattttgggggctcatctctcaagtggtgatcttaaaaattgggttggtagggctgatgtgggttatgaatcctttgcctcctggagaagctccaggttgtgggttctttcccaatgatggattactcctcaatgcgtgggaaatatggcagtgttgtgtcttaacctttcctactcactttgatgtggtttccctctggtttaccccatgtgagggggttacttcaccagttctttttttcccctcagaggaaatcattccatacccccccccacacacacagccatagatttagtgtgtctgtcagagaaggtgagttcatgatcttcctatattgctatcttgaatgggaactagtcagataaagatttttaactggacattccaccctgtatttctgccttcaatttatgagcctttcctgaatttcaaattgacattcttttctctactgtttgtacttgtttcttctatcttctctgtcagtaatctgctttcaaaaattttcaacacttacaaattgctctcatatcttttcctcatgttccttgtcctttgtgtatatgctttttccatttctttatttcattccaatggaattttaggcagggagttgaggtaaatgccttgttaaactaacacacattcccactcccccaaccctgaactcattttgaagctcatatttaaatatgatagaatgaaactggtaatatcaccaggagtcagagatcttccagacaattaatactgaatcacaaatagaaaataaacagagaaaaaagaaacttactgcagggctctgttgtcttttctgaaatataaacaaaaataaatatataagtatcatttgcctatgggaaggaaagtccagatttctttaatactatttttgtgtataacttatagtattgaaaataatagtaagtaaagagatcaaaaccttttcaaagaagtaataaactaaagcccagcaagttaagggagttcctgggagttcaaggatttgctgagggttctgtcttccacagaatacaaatataaatatgtgagtgtggttttctttatggaagaggcccaatctgtcattttcctctgataatccttttgaggagattctttttaaagctagactattttagagccatcatctttatctgctcttcttggtctttatagtaaaaatgtcataggtttgggaaatgtgtgcatccattttgtcctcctttcatctttttttatttcaggagctatcgagatttctataaatttgctgagaaatggggaagtaacttctattttttgttcagaaagttttgctacaaatgatcaaatctttatttttaattaaggaaaaggattctatttttattttttagtgaggaacatgagaaaatgaacctatagtattggaatagaaaagtcagtttcaatggaatcaatcatcttgtgtatcttttgttgtaatttaagaatagtgccaatctggttcttttcagatttcctgagtttagtagattgagggcaacaacattcgtggctatttttctgtgcctttggttgaaacttcattataagtttaaggcattagaatttgtgaatcttgctttattcacattttcatcatattggacaaaaagggaaagggaatgaaatataggaacatggagctttttgtaacatccatagttattaatattgccttctgtacctatcatggacaaagaaaagtagacattttttcctccttaaaatgcttataaaaataaatgatcatgatttgccttagatataaagtaatgtggggtttattttgcctatgattcttttcaagcccacaattctctttatttttttaaaagatttatttatttgagaggagagagcgagagagagcatgaacagggaggaagggcagaaggcaaggagagcaaactccctgcttagcagggaaacctgatgtgcagcttgatcccaagaccctgagattatgacctgagccaaaggcagacacttaaggcagaggtttaaccgactgagccacccaggtgcccccacaattttcttcaaaaagaaattgggatttgaatgcaaccttggagacactacatatattaaatttccatatatatatatatatatatatatatatatataatttttattggagttcgatttgccaacatgtagtataacacccagtgctcatctcgtcaagtgcccccctcagtgcccgtcacccagtcaccccatccccccgtccacttccctttccactatcccttgtttgtttcccagagttaggaatgtctcatgttttacctcttcccgtgttctatcttatttcttctctcatactctcactccattcacaccaccccatcctaagtctgctaaactatttgttgaaaaggcagtattagtaatactaagaggttttatttctacaacttaagaaacatgtaaaattatatacacatatacatgtatgcatgtaggatgcatatgtatgtgtaaatatgtttggtacttctccatccagaaaggatttatggcagcttctcttgctgtttattctttttgttgtaatattgaacaggaaaatttacatagattttattgggtatggagcagttccaattctttcatgtctggcatttgatgtggggttgccagtgacatcaactcatcctaataatattgagtaaagcagagtgagagaaccagaaactatagttaatatttatgaatcttaatttggttagaaaaacattgatttgctgttctcctttccagatttgaacacatttcaaattgctaccattgggctattagcattatttcttacatcattatcgtactgatatataatttgtattattaatttgtaaagagttgatttctttgaataaggcaatggttgaatgatctatgtgctttgcaaggaaaagggactttctattttttaaaaatatatgtgatggaatagaactttcttaataatcaagtgtagtctaattgttctccacaggttatttactttcatgaagagatataacgaagttattagttggttacatggagtttatggttacatgtatggttttcttcaaatgacttctgagttccttagagacagactgatgttaacaacttggcataatagatataaattaatatttgctgaattatactggaaaattatactttaaataacccttatttccaaaaaagaacccattccttgtagaaaatacaaaactagagaacttctcagtccatcagaattatcaaagaaatccagattcactataacttttgcagaaactaaaaagtactagtttatcaagggactatcagttttctgggtgtctgattactgagtcatcgctatgaagttgtagaagaaagggctatcatagcccagtggagagtcagatcaagaaattctagtgtttgcattataaattttgcttagtctctttagtaatactgagggataatctcattacccaggttaattgtcctctggtgaagccaatggctcaattgttcattctctttttaaaaaaaatattttatttatttattcatgagaaacacacacacagagagagagaaagagagaaagagagagagagagagagagaggcagagacacaggcagagggagaagcaggctccatgcagggagcctgatgtgggacttgatgccaggtctccaggatcaggccctggactgaagatggtgctaaactgctgagccacacgggctgccccaattgttcattttccattgtattttgttttgttattattattatttagtcacccaagtcaggtgtgcctgacaatgtggaagatcatcatggaaaggggaagggtagacacatttacttgcatgggctttttccttcttcttcctctgttatcactctggctaataaattggctctagactgccacaatccgacacagtatggtagcagttttatgcttttcttgcttacaaaatggatcaaagcattcccctctttgttccatgcacagataatgatatcttccatttacaaagagagttttgtttttttaatcttagttcctgagaacggtaataaaaatataaacagagtttcagagcttaggtatcaatcatctattttctaatatagcatactttagattttacagactaggaaattaaggcctagagaggttaactgatattcccaaataattaacctaaaaaggattcagagtcagacgagaaatgtctgctgattttaaattcagttcttgtggaatcagaaaaaactctatttgaatagccaggggaatattaaaaaagaaaaccatagctgggggcatcacaatgccagatttcaggttgtactacaaagctgtggggaagaaatgtgtgggaaatatcagaaagggagacagaacgtaaagactgctaactctgggaaacgaactaggggtggtagaaggggaggagggcggggggtgggagtgaatgggtgacgggcactgggggttattctgtatgttagtaaattgaacaccaataaaaaataaattaaaaaaaacaaaacaaaacaaaacaaagctgtggtcatcaagacagtgtggtactggcacaaaaacagacacatagatcaatggaacagaatagagaatccagaagtggaccctcaactctatggtcaggtaatatttgacaaagcaggaaagactatccactggaaaaaagtctcttcaataaatggtactgggaaaactggacagccacatgcagaagaatgaaactagaccattctcttataccatacaaaaagataaactcaaaatggatgaaagctctaaatgtgagacaagaatccaccaaaatcctagaagagaacgcaggcaacatccattttgaacttggccacagcaacttcttgcaagatacatccataaaggcaagggaaacaaaagaaaaaatgaattattggaacttcatcaagatcaaaatcttctgggtgacgggcacagaggtgggaccttgacgggatgagcactgggtgttattctgtatgttggcaaattgaacaccaataaaaaataaatttataaaagaaaaagaatacagtatacaatacaaataaaaaaaagaaggtgtggtctatgtatacaatggaatattcctcagccattagaaaggacaaatacccaccatttgcttctacgtggatgaaactagagggtattatgctgagtgaaataagttaatcggagaaggacaaacattatatggtctcattcatttggggaatacaaaagttagtgaaagggaataaaggggaaaggagagaaaatgagtgaaaatatcagtgagggcgacaaaacatgagagacacctaactctgggaaatgaacaaggggtagtggaaaggggaaagtgggcgggaggttgggatgacttggtgatcagcactgaggggggcacttgatgggatgagcactgggtgttatgctatgtgttggaaaattgaactcctataaaaaaataaataaattcagttctttccacatcataatgttatgtcccctgcttatggatattttgagtgggtcttcagatggtcacagagtatcttctctggtgtaactattatttaaagcatgattttacccaaaagaaagtatttcctcttacttcttaggtctgtttatctgaggggaaaacttaagaacaggaactctggaaattcaagatttcaaggaattgaattcaatgaattcaagacagtcaattatttgtttagctgaaaaaagaaatgtagaatgtataggttgttcactttaattgcttgataatcttagtatgggtcattgttccctaagcatgatacctatttcattctaaaggacttgatgtgccaaattataatcagtgggctcttttctgttgctcttcagcaatatttagtatttatcttatttaatatgtagaatgatgacatgtaatgatgtgagtacattgtgactccctattcttcccactttactctctaaaacaatttgatagccataggaaggccagctgttagaaaatgggggaattttgaaactcctggttctatagagatcttcacggagcaagagtaggaaaaacttttccttgaagctatagtagagatgaggtgttagtactaatttaagagcttttcttgtggcctggggaaaatatcaagatttcctggttcattagcagagtgtagcatatgaaaaactgtgaagcacactgggaaaagctgttcttttccactcatttgtgttcctgggagagtattcttgatcctacccatagtgctgagccagatttctcccagttcttatttttaaggaagagctagctaagggaggacatggaaataagaaaacttcctttctgtatctcaatataagaacaagaatttaccattttgtacacagaaaatcaataataaaagcccatcctaccatgacttctatggcatagtgattgccaatgggtgagaaatcctaagagttggttagttaatctgatggctaagagcaaattttcctgaagaagtaaagaaatatatgtcactcaaaagctggagggaggaaaaccaagttggatgtctaaaacatgtcttctagggaagtagaactaataaaagctcaaagaagagtactaagataaaaattgttaaaggtagtaaaaatcagcctaacaaaaaaggtatttgaatttattttgggtttggtgataagtttttggatataacacttcacatctatgaaagaaataattgataatctgtattttattaaaattaattttttttgttttgtgaaagacattgataggccacagattgggacaaagtctttgcaaaagacctatctgatacaagccaaaatatacaaaggactcttgaaccttcataataagaaaaaggaacaccttggttgaaaatgtacaaaaaatctgaatagatacttcaccaaagaagatacacagatgacaaatatatgaataggtgctccacatcctgcctcatcaggaaaatgtaaataaaaaaaaacaaaaaacgagaaaccactgcctacctgttagaatgggcaaaacctctgacatcatcaaatggtagcaaggaggtggaacaacagaaactctaattcattgttggtgggaatgtagacggtatatttcctttggtatagcttgatgatttcatggaaattttactatgtgatcaggcagtcctgtaccttggtattccccaaggagttggaaacatatccacacagaaatctgcacatgaatatgtatagcagctctatccatcattgaaaaaacttggaagcaagtaaggtatccttcagtaggtgaatgggtaaatgaactgtggtacacacatacaatggaatattattcagtgctaaaatgatgtgagctatgacctcaattcccttatgaataaaaagacaaactgagctcaaagttagcagaaggaaggaaacaataaggattaaatcagaaataaatgaaatgaagaacaggaaaacaatagaaagtattaacaaactaagagttggttctttgaaaagataaaattgacaaactttaagctaggctaacctaggaaaaaaaaaaggaggacctaaatcaagattatagggatccctgggtggcgcagcggtttggcgcctgcctttggcccagggcgcgatcctggaaacccgggatcgagtcccacatagggctcccggtgcatggagcctgcttctccctccgcctatgtctctgcctctctctctctctctctgtgtgactatcataaataaataaaaaattaaaaaaataaatcaagattataaatgaaagagaagacattatatctagtactacagaaatataaaggattatagaagctgttatgaacaactatatgccaacaaactggacagcctagaagaaatgggaaaatacttagaaacatgtaacctaccaagattaaaacaaggagaaatagaaaatctgaacagacttattactagtaaggtgattgaatcaaataaaaaaaaaatctcccaacaaagaaaatcccagaaccagatgacttcattgttgaattttaccaaaaatttaaagaaaaattaatgccaatacttctcaaactcttccaaaaataaaggaggaaggaacactatcaaaatcattttatgaggccagcgttattctgattacaaagccagaaaatgacactatgagataagaaactacaggtccatgtctctgatgaatatggatgcaaaaactgtcaataaaatactaacaaaaagaattcagcagcatattaaagcagcattcaccaggttgggtggaatttattcctgggatgcaaggatggttcaacacattcaaatcaatgaatgtgatatgtcaaattcatatctatatcgaatatagaatgaaagaaaaatctttctataggtgcagaaaaaatatttgacaaaattcaacacaattcacaataaaacctcaaaatttagcatagagggagcttaactcaatcttgttaaggccatgtatgataagcctgcagcacagctaatgttatacttaatggtgaaaggttgaaagcttttcctctaaaattaggaacaagacaaggatttccattgtcaggcaagaaaaagaaataaaaggcatcagagttggaaaggaaaaagcaaaattatattttgctggtgacatgattttatacatatataaaatcctgaagactcaaccaaaaaactgttagatctaatcaacaaatttagtaaagttgcaggatacaaaattcatctacaaaaatcagtagtgttcctttacactaataacaaattgtctgaaaaaagaaataaaggaaacaatctcacttacaatagcattaaaaacaattacttaggaataaatttaactgaggatatgaaagatgtgtacactgaaaactacaagatattagtgcaaaaaattaaataagatgcaaataaagtggaaagttatcttgtgtttagaaaatggaaaaatactattaaaatgtacattttgccaaaggccatctgtagtttcagtgcaatccctatgaagattccgatggctgtatcctttgctgtgcagaagcttcttatcttgatgaagtcccaatagttcatttttgcttttgtttcttttgacttcgtggatgaatctctcaagaagttactgtggctgagttcaaaaagggtgttgcctgtgttctcctctaggattttgatggaatcctgtcttacatttagatctttcatccattttgagtttatctttgtgtatggtgcaagagagtggtctagtttcattcttttgcatgtggatgtccaattttcccagcaccatttattgaagagactgtctttcttccaatggatagtctttcctcctttatcgaatatcagttgaccataaagttgaaggtccacttctggattctctattctgttccattgatctatgtgtctgtttttgtgccagtaccacactgtcttgatgaccacagctttgtagtacaacctgaagtctggcaatgtgatgcccccagctatggtattcttttttaaaattcccctggctattcagggtcttttctgattccacgcaaatcttaaaataatttgttctaactctctgaagaaagtccatggtattttgatagggattgcattaaacgtgtaaattgccctgggtaacattgacattttcgcaatattaattctgccaatccatgagcatggaatatttttccatctctttgtgtcttcctcaatttctttcagaagtgttctatagtttttagggtatagatcctttccctctttggttaggtttattcctaggtatcttatgcttttgggtgcaattgtaaatgggatgcagagaaaagggaaccctcttacactgttggtggggatgtgaactggtgcagccactctggaaaactgtatggaggttcctcaaagagttaaaaatagacctgccctacgacccagcaattgcactgctggggatttaccccaaagatacagatgcaatgaaacgccgggacacatgcaccccgatgtttctagcagcaatgtccacaatagccaaactgtggaaggagcttcggtgtccatcgaaagatgaatggataaagaagatgtggtctatgtatacaatggaatattactcagccattagaaatgacaaatacccaccatttgcttcaacgtggatggaactggagggaattatgctgagtgaagtaagtcaattggagaaggacaaacattatatgttctcattcatttggggaatataaataatagtgaaagggaatataagagaagggagaagaaatgtgtgggaaatatcagaaagggagacagaacataaagactcctaactctgggaaacgaactaggggtggaggaaggggaggagggtggggggtgggggtgagtgggtgatgggcactgaggggggcacttgacgggatgagcactgggtgttattctgtatgttggtaaattgaacaccaataaaaaataaatttattaaaaaaaccaaaatttgaataattctacaagatttaaagtaattgcctcttaattaaaaatctcataagaaataccccacacccagatggtgacattagtgaatctaccaaatgtttgagatcgagctcttccatgtaatagaaaaaacctaattccccctccattttatgaagccagagtatccaggataccaaaaccgaataaggacattttcaaaaggaaagatacaggtgaatatttttcatgaaaatgtaaaaatcgtaaacacattattagtaaactaaatcaaaccctccccttcacatatatgttatcatgaccaagtctggtttatttcagaaatgcaagattagtttaacactcaaaaggctcaattgctgtcagcatgataatagtggaataaagaataatcatgtgatcatcttagtagatgtagaagtatcaaatttattcataataaaaactcttagaaaataaatagaagacaagcaagactagaatacctacagtaaatataattctgactaaagtgttgacagcttttcctctgacgttagtaacaggaaaatgaagcttgccattgcaatttctattcaaaatagagttcttagccattggaagaagacaacaaaaagaaatgctaaacagtgccattccaaaagaagaaacgaaacttggtatttgcagatgaccaggttgtgaatatagaacattcataataatatagattacgtgaataatagattagataatcaaaattgctgaatgtaaagttaatataaaaattcagttgtattttatataaaaacaaaaattaaatggaattttaaaaaagttataatttacaataatgtaaaaatttattaaattttaaggtattgaaggatatgcaagacctcaacataggaaactataaaactatactcagaaaaattaaagactgatacatggaaagaaagatcttattaatgggttggaagactcataaagatgtaaattatccccaaataaactatagattcaatgcaattctaaacaaaatgcctgcaggtttttcctttccttttcttgtttggtgtgtgtgtgtatgtgtgtatgcatgtgacttaaaaatctctaaaagattctaaaaggcacaccaagaaacagattcttaactatagagaacaaactgctggttaccagagggaataggtgtggggatgggctaaataggtgatggggattaagaactgctttgtgtgagcaccaagcattgcatagaattgtttaatcactagattttacacctaaaactcatattacaatgtacataagctaactggaatttaaatgaggacttaaaaaaaaacaaagaaaattagagggagaactcaaagatatatatatgtatgtatatagtttacatggcataatgtatgtccaaaagagccaaggaaacaataagacaagaggagtagatcaggatatgcctaatagacattcagactttcctacagcttgtgtaatcaaagcagtatgacactgacatcgtttttttttttttactatgacctcataagatttcttaagatgtttttattctaatcatctcctttgtaagatttccatattacaaatatactatgaatttgcttatacatttcatgaatatattatacatctgcctatgtattttatgaatatctgtaatttatacattaatagaatacaattttttgaccctcaagaacctatttttgcttcctggagggcatcattactgccattgaaagagtatgattaagtgggaaaaggtttattttacaaatactgctgacaaatttgatctccatctggaagagaataagactagacatcaatttcacaccataaacaaataggtttaataaatatgaaagagaaaatttttaggaaaaaaatgaatatgtgtaccacagtagtagaggaaacccatttgaaagcctagaagctttcaggcttaaggcttacatttgaccaaatgtaataaatttttgtatagtaaaatatgcctttattttatttcatttcagttaacaattttttttgcatctactatgtgggagatacttttttaagcactagctattcagcagtgaacaaaatatagtgcttgtcttcagagtttatgttctatgggagcagaaagtcaaaaaaatacatgtgaagtgaaagtgaaaaataatgtgaagtagtaataaatgctatgaagaaaaagaaatcaggacaaagggatagagagggtagaaatactgttttagttagggtagtcatattttcgctgacatcttaaagaagtgaggaagtgagttgtgcaaatgttccaggaagacctgcagtgggaacatgcttggcaggtatggagaacaatgaagccacagtgtggctgcagcaatgagggagacactgggaaatgaggctggagaagccagaaactgtgtactatgaggccttgaagtcttgagagctttgtacttttacactaaagtgattggaagacctttggaaagccttgagcagagaagtaatatgatctaatttacattttaaaagtaggattctgggttgcctgggtggttcatttggttaagcatctgactcttcttggtttcagcttaaatcatgatggtgagaatcaggatggtgagaatcaggatggtgagatggagcccatattgggctccacattgggcatgggacctgttcgagattctctctctccctctctgccctgtcatgtttgtgtgctctctatctcaaaataaaattagaaaataattagaacatgggacgtctgggtggctcagtggttaagcgtctgccttcagctcagggtgtgatcctatagtcctgggattgagtcccacattgggctccctgcatggagcctgcttcttcctctgcctgtgtctctgcctctctatctctctgtgtctctcatgaataaataaataaaatcagaaaaaaataattagaacaaaagtatgattctgacttagtgagggacagtaggctgagagtggggaatgagatcaagagctctcttcagaggctatcacagcagtacaggtgacctgtggtgaaggcttggattacctgataaggaggtgagaagtgtcagcttcaggatataattttaggggacaggatgaatgattggatatagagcaacaacaagcaaattgagaaaaaaaatttgaacacatatgataggtgaaaaacattaatagacaaaaagcttctacttgaattgaaattgaataagaaaaggacaaaccaccagtatagtaaatgaataattcacagaagagcaagtcaaaaagactaagaagcctgtaagaaatgctcagtctcactaggtgttagggaaatgcaatcaaagcaagagttagacattactttccccatgacagagacaaaaaagagttagctactacacttctcattattatttttctcagtagctgctgtttgtagcaccagtgagagtgtggggaaaatagagctcagacatccttggtcagaatgtgaatggttagggattttggggaaagtgattacatattttcgttaacattaaaaatattttcattagcactaaaaatatatattttctttttctcttgactttccagtttcacttttggaaatctatcctagagaaataaaatccttaacatgtaccaagatgtttattatagcaccatttggcccatggcaaaaaagctgaaaaacaaacaaagtccattgtttttttttttttttcaaagtccattgttaaagaattggttgaatatacagtaattcatccactctactgtaataataatgctttagagtgatgtcctttgacttggagtgatgcatgtgacataatgttaggtgaaaaaatcaagttgcagaatgatgtgtgtaggttgactccatttgcatatatgtttatatgagcatggattaagatagagattcataggaagttaacactgataacatcacaagtttttaatttttgcagagaaatttaataaagatttaaataaaatatttttgagaactgggttacaatgtatataatctgtagtgtggtatctcttagattttacttcctagccttgtcagatggttaagattttggatgatgatggataagttctcaaacactagaaaaacaggcttctatttcttcaaaacctaattgggacccatcaggtacagagtagcgacattggctgattctcctattcttaattgttttattttatttttttttaaatttttatttacttatgatagtcacagagagagagagagaggcagagacataggcagagggagaagcaggcaccatgcaccgggagcccaacgtgggattcgatcctgggtctccaggatcgcgccctgggccaaaggcaggcgctaaaccgctgcgccacccagggatcccccttaattgttttaaaacgagggtaatgaaatttcatccaatgtaaaactgaatattctgatcaatttttcagtttaaccttttatccctttgaatcctgttttaaattctatgcttttccttttttttttttaaagattttatttattcatcacacacacatacacacacacagacacaggcagaaggaggctgcatgcagggagcccaatgtgggacttgatcccaggactctgggatcatgccctgagccaaaggcagatgctcaacccctaatccatccaggaatcctgcttttcctttttcaccagttccctgtattcatttcttagatatgctagttataacctggggcaggagatatttgtgagcaaaggtaaattgcacttttaatgcagttctaacctaggaaatctttaattggggtaagagccgcattatctgattttacataaattgtttacttcccaatatcttggcatttcctatttagctttgttatcttaaaactcaatttcctgcttttccttacatatgttatgctcttttcctacacataaaatgactaaaggtaagacgtctactcattcttttttctgtttattgagataaaactgacaaaaattgtacatatttaaggtagaagacttgatcccccccaccgagttttgttgagctgtaattgacatacaacatagtttaagtttaaagtgtttgacctaatgatatatgtatatattatgaaatgattaccataataagtttagttaacatgggtcacctcacatggttacaaattttcttttttcctcgtgataagaacttttaagatctaagcagggcatttgtgaacagggatttgacatgtatattagcgtatttgtgaaacaaaatttaccacttaattttttaagtcctactttactatctttatatctaaattatcttggaattgcatgtacttattcattttcctagtatttgcatcattttgctaagcatggtgttattttgatagcttactcctttctccttccttcttctagggtcctttaaaacttccatacctgtatctgtaagggaagattagcaattgtttttaactggcctgccttttggtggcctttagagaatggcaaacaattttcatagttgtagtttcctactatataacttatattattttttattttttttattttatttatttttatttatttatgatagtcacggagagagagagagaggcagagacacaggcagagggagaagcaggctccatgcaccgggagcccgacgtgggactcgatcccgggtctcgaggatcgcgccctgggccaaaggcaggcgccaaaccgctgcgccacccagggatccctataacttatattattatattacttatttgccttcaagatctagcggaaatgaaaatgtttgacttatttgttgacaaattctgtggaatatacttctttaaccattctttctttaaattctcatctttcgttatcagaacatttattgtacagattttccttacatcttctcataccttaatttttttctttgacctattatatctaacaggctcagttcttggacctgtgcttttgctagctctgtactttcttctttggggaactcatttattctatggcttcagttatctctaccggacggacttcagcttcctctcaaatgacaagtgttagtttgtttaactcagcaatttgttattgcctccctgtcctacaagttagctcccagtttgttatggattttctgtcacccagtttcaaaagttatgaaataatcatttttttcttttccctacttatatgtagtcatcatgaagtagtgatttcttctttgaaaaaatacctcatatctatcccttctatttagtctctttccatcacttattaccccaaacatctcttcactagatttactatctatgatgtttctcctcctcagtctattttgtacaatcacaaggttgcacactttagtaatgcaaccttattcacctaactctccttcccaaataccctagaaggcttcccagttgcctgatgaataaagtataaattcctagtttgttttcatattccttcagaatcttcttctaactctcctttacagaattgtatccagagtgcttcttctgagcctgctgtaacgataaaattgcctacttctcctagagcatggtgtggcagcattgaattcttttgcctttcttgtacttttcctacctcactcagtgtatcaacatcttatccatctttcaagacacatataccaaccaccattcccttccccacgaagctgtcccctttatcttcttgttccaagaggctgctaactcataccatccatctaaactacaatttgacagattttacttttaaaagattatcctgtgtacacatattatatcactatatgtgttaaaagctattttattgcagagtcagacatatatttctgtaaccctaattgctagaacggtgcctcatgaacattgagcttagcatgaggagcattgattggttgattggttacactgtcactgagttaatatcatcattgccaaaggaaattatacatttctttaatcagaatgttttatttcagaaagtatccagtctttcttgactaagcccataaaagtatcaacttagaaaaccaagaattaaaaggtgagatttgtggttaagaggactaaaaatggtgaaacatctatagtaggcactctatagatgtataaattaaagggattttataattatgatccatttagcaataactgggttgtgacttgtatctggaggatgggaatcagaaaaatcagttgactttatgagccttcttttattttacccttactcttttcatctttttgttgtactttcttcccttacttatctttgctccttagtgaaccttctttttttttactcttgacttctgattctttccttcttttaactttgtacttttctacatccctttttttcatagcatcattttcttctgtatctttcttcttccttgcatcttcctttcctttgtcttgctttatttgatcctcagaattctcttcctttacttgagattcctgaacttgcagtatttcagacccacttttctctacttggtactcctgctcttgtggtattccatcttcattattttctacttggtagtcctgtccttctggtattccagcttcattactctctacttgggactcttgtccttctgatattccagcttcattattctctacttgggactcctgtccttgtggtattctggactctctcctctttacttgggtttcctctccttttggtattcccatgtcactcatttttacttggtcttcctctcttagtatcctggtctcactctccttttctatgatctccattcctatccttccattctccaactcaatgccttttgttttccattttgactctgttttgtgccttgatgtcaaggattcatcagaatctatgactaaaatttccttctttagtgttttcttgttttcttcttggctgctctcagactttgtagtggctccattttttagaatctgggccttgaaatctgatttttttgcaagttctgcatccatgcaacctggaaatataactgagcacataacaaaagtgcacaattcagatatcaagtactttctctttattgctacttttccccctgatattggtttattttttttgtcttaaaactgaaaaactgaagatagcttgagatttcctgaaaatataaaatgatggaactctacacttaaattatacaagtattgataatattccagattctctttaataaattggaagattaatgaaagaagaggtaaaatgaactataaatgaactggccgcttttgttcagtatattatggctgataattaaagcttaatagctaaaggaggatgtgttctgaaaagaaatggaatttatttttagaaaaattgtggaaagaagtaataattgtttcttaaaatagaaaaaactcaaaatatgctttgagtattgaatataagaatgtcctctcaatcaaaagtaataatagtactagctggtaattattgggtacttatcatacatcaggcactccctgttctgagcattttatataaaatattaattcacttaattctcacaactaaaagggcaggtactactattattcccattttacagatgaagaaattgagtaaatgaatgtgaatatggccatggagttattcagtggtggagctgggatttgaaactggagtcagacttcagagttcagtctgttccttatgataacggcaaacttactttacaaaaatttctggtccctttttccatgtacaggtaagtcagctctactatgtctcaacttctgtgtgatctaataaactgaattttttagcttccactttattttttcttattttagtgatttggtttcctggattaagaaaaaataatttatgctaccaggaaaaattctgcgggttcttgctatggaggagtggcacaccttcctataagaaaacctatttaaatatttaatggggtagaaagaatactgaatttaaaagctgaatcagaacacctgggtatagtattcttgctagctgggtttgtttgggaaaatcagttaatccccaaagattcaccttcctttttttttttttaattttttaaattggagttcaatttgccaacatatagcataacacccagtgctcatcctggtcaagtgcccccctcagtgcctgtcacccaatcaccccaacccccccccacctcccctttcaccaccacttgttcctttccagagttaggagtctctcatgttctgtctccctctctgatatttcccactcattttctctcctttctcctttattccctttcactagttgtgtatattccccaaatgaatgagaccatataagattcatcttccttttattttgtttcctctgcctactttagagttaaggattctaaggaaatatttaagaagcatggcttttactaacagactgtttcaaatcctggcttcatacctaaccagccaggtgagtttgggcaaaccttactttcttatttgtaaaatgggtacaatagttgtaggtacttcacagaagtgttatgaggattaaataatctaagtaaagcactcagtatagtgcatggaacatagtaaaattgtccaacaaatattggctattattactaccaattagatcatacaggcaaaaactctctctgatctattaagacaaggcattcttagttccaaccaaatactttagagaaatggttaattgctttacaggaggatttcttgcttaagatttgacctttttcttttcatagaaaaccttttaatatgtttagggtttgatgtctgaaatattgacatacacataaccaaaaaacaaatagtaaaacgtgacacacctgcattagataagaaggtaagtataaatcaaaagagatgttgtagtgtttcctttttgatattttaggttctgacacaaaatgaaaataacactaagaatgttgcaataatgctttactgtgttttttcctccctaatgtactgacattttattctagacaaagccatttccaatttactaataaatatcaatagtaaaatatcctaagcattttagtacttagagagttcagaatattttgatatctaacagtactaccagtagacacttgttttttgggaggatgtggtgtggtgtggaaaagagcatgtttttccactgaagcttccaaccttacaaattctgtggaatgtactccttaacaagctaatttttcttaatatttcttaatatgcatatctaccatctcttgggagtttcatatttactactgtgtactgcagacccatttttaagctaacttcacatcctaaattatatagatttttgttaataaaaatattctaggatttaatgaaacaatgtttattctagctacaattttcctaattttatagtattttaaagaattttattttttcccactaaactaaaaaatacttatagtcacttctaatagtatcttcatatctttgttttaattctttgctgtatattttctattttgaacctaatagcataggagaagtaagctgcaaatcattattccatcaaattctaagctcttccctctcccttctttcaaatttctagttagtgcatacatctttttttccccttagatctcataatctacatgatataaagatttgtaagccctagctgaaagtccatttactgcaggtggtaggctatatggcaaaattctaattataagggaatatttcccccaagatcttggcaattgttataatgtattcagtgtacctaaagattttaagctggattaatttttgttaaagctaaaagatatcatgaattagctatcatagtaataattctaattatataataactttaaataatgtagcaactaaaccatggctttattaggaaattattcctattaggttattaatccagtggctgccagagagagtacactcagatctagagcataaagatctgttaagcattaggaggatgactcattgtagatctcagtccatgaattaacatttagaaaaaaaaatcatatacttagttagctgaatgtggagatgagaagttaagagaatcaacttgagagggtgatgaagtttaatgagctgatctgtcttcaatctttctttgaaccacaaattaaactttaatctcttttcgctaaaaatatcaactgggaagaatatgtttgaaatattcttgtcaacaaaaatatatcttttacaagaaaaaaattttaaagattgaactgatttttttctggcaatttaaaaaaattcattaaaaacgaattcacctccagggagggccttggcctatggtcccttctcaaagccttttttctctttgtaaagaaaacatacactcttatcaccttccccatgtcatttgtgagctgcagatacatcatgactgctctgaatgcttattcttcagagcagtcatgctgtgttgtgaatgtgaatgcaaagaaaacaattatacctttcaacttttcctcctcccactcacaaacccactctactagtgtgaactgataaagaagaatgattaaatataaagacatattttgtgttagtgtttggaaagtttgagatgctaaatttaagttttgcttgcttcctatggttgtacctttacagagttttaagaattattattgtgtttcataggattttcttgaagagctgaggcattaaataatcctgatgggaaatctgaatttagaaaacagttaaaagccaaacattgatctaaatgggatatcttttatttttattttatttttttgatatcttgattcttttgtgtacatttaattatatatcttccctagtgcatgtctatttgtatttagaaacattttatttatagatatggtttcaggactaatcccaaaaaaggcatttgtggttcagtatagaaggcaatgtgttggcatggaaagagtatgtaattcagagacaggaagtcttggcagtgctgtttaccaattctttaaccttgggcaagtgtctgagcaattttactgatctgtgaagtgtagaataacaatagctagcaggcaggctatgataagaataagagataatatttttgaaaatgcctagcatggtgcatagtatatggaggggctcagtacctactattcctcaaaagtagaattacttagaaggcaagataacgtttttttttaactagttattttttctgttaatcggattcactgggccttcacttataacgaaaaaagagttctaagttactagcaaagaactcacacaatttagaaaccaatctttctttcattatattttgctgggagttagaaaggagatttttttttcagagcctagaagatggccagagattacagcatccttttgtatgaacttcatcaaatcctctacagctgtctctccaaaaatagttatttaaaatattagaaaattctggagaataggaacatttaaaatgatcttagaaacacaaatctctaatttgggagtagaaacagcaaatccagaaaatataaacaatgtaaaatatcatggttgagaatagataaagaacttacccataggagatattgctaaaaataaaacacaaaaggttaatcagagggaattttttaactcaagtaaagtctcactcccttttagaggaatgcagaagcagcaccttcaggtcctataaaaccctctgtttcatcctcaggagtgctgctgaccaaagctccacatcctacttcacagagctggttttctttaggatgccatttgccaatccatatgccatttgccatatgggattgaatcctaggtaatatctattctaccaaatttcaaactattgcattttctactgtaatttttctctcacaagtcagtttttttgcccactgtcctttagatccgttgaaaaaatgtgtattgttgaccaattttcaaaatcatcacttagtgtcatcctgacacttattttttctgtcaattttaggtgattttctttttttagtgaaaattcaccattgccagatgatagcacaaggaaaatagcctcccttgtggtaaactagctgggtatacatactaccaataatctttggcagtcgataaccagagtaatgagacaagatcattatcttttgttccaaaagagaaatagagaagaaattgaagtataataacatcatttctttaagaaatattgactactctaaagtagaagaatgtgaaataaaaaaaaattgggtaacaaaaactcaaaggtcctagacacagaaataggtaaggccaagaaatgatccaaacttacttatttttccagaactgtccactgaaaaagacaaaaaaatatcagtaggtattgggttttcccttcttctccaacctgcactcctctgcactggatggatatctatgtcatgaataagttccttttatttaaatgtagggaacctccattttctttccctgtcctcttggcctgttgtagtttagaaagatcttgtgattagctattttatgaaaagagttttattaagatatatatttggcatatagcattgtataaatttaaggtatatgcaatatgtcaatttgatacattagtatattataatgattgccattgtagaaataattagaacctctgtcacattacataataatactttcttgtgattggaatcatgaagttctagtgtctaagcaagtttgatgattgtcctacaatattgtctatattcattatattatgcattagatctctaggacttatttactacttgtaagtttgtacctttgaatagtgtctcctattcccccacccacaatcccctagtaaccccattttactgtcattttttagaaataaatttagctcttctagattccacatataaatattatacagtacttgtcttcctctgtcagactttttcattcagccttatatgttcaaggtccatctatgttgttgcaaatggcaggatgttctcctttctctttgtgaaataatatatcctatgtgtgtgtgtgtgtatgcctgtgtgtgtatctcgtatcctttttatccattcatccattggtataggcagttattttgtttctgttccttgcaactgtgaataatgctgcaatgaacgtgagagtatatatatatataaatgtgtgtatatacacacacacatatgcaggactcgatctcaggaccccaggatcactacctgagccaaaggcagatgctccaccactgagccaccgagacatccttatttttaatttttttttgataggcctccatgttgttttccatagcagttgagccactttactttcccattaacagcatacagtggtttgctttctccatattcttgccaacacctcttgtgttcttgatcatagccattttagcaggtgtgaggtgatatctcattgtagttttgattgcatttctcttgataattagtgatgctgaccatttttttcatctgcctgttgagcacttggatatcttctttggaaaaatatctgtttagtttctcagattcttttttgttatggaattgtatgagttctttatatattttggatattaactcattatctaattaatagtttgcaaaaagtttttcccattccatgggttttcttttccctttgttgattgtttttttcatgtgcagaagcctttaaatttgatgtagtctaacttgttgatatttgtttttgttgtttgtgcttttggtgtcctgctcagaaaatcaatgccaagacctacattgaggagcttcttctctatgtttttttcctaaggcttttatggtatcaggttttaagtttaagtctgtgaaccatttcaagttaatttttgtgagtggtgtaagataaggatataattttattgtttttcagggtttttaaagttttcattttaattccagttagttgacatacagtgttatattagttccacgtatacaatataccgattttttaaaaaagatttattcatgagagacacatacagagagggagagagaggcagagggcaaagcaagctctatgcagggagcctgaggtgggactcgatcccaggtctccaggatcatgccctgggccgaaagcagcactaaaccgctgagccacccggggtgccccaatatactgattttaatacttccatacaacacccagtgctcatgacggcaggggcactccttaatccccatcatctatttcacctgccctcccacccaccaccatcagtttgttctctataattaagtctgtttcttggttggtctctcttcccctccccccttattctttttggtttttgaattccacatatgagtgaaatcatatggcatttatttgtttttctctgactgacttatttcacttagccttatataacctagctccagtcatgtctttgcaaatggcaacatctcattcttttttatgactgaataacattccattgtgtatgtttataccactttctttatccattcatcagttgatggacatgtgggctgcttccataatttggctattgtaaataatgctgctataaacacagagatgcacatatctatttgaattagtatttttgtatcttttgggtaaatacccagtaatgcaattgctggatcatagcatagtttctttttttccctttttgagaagcctccgtactgttttccaaagtgatcacacgagtttgcattcccaccaacagtgcacaagtgttccttttttcccacatcttcaccattacctgttatttcttgtgttgttgatcttagccaatttgacaggtgtgaggtagtttcgatttgcatttttctaacgatgagtgatgataagtatcttttaatgtatctgttggccatctgtaggtcttcttggggaaaatatcttttcatatcttctgtccattttttatttggattatttgttttttggttgttaagttttataaattctttatatatttttgatactaatcctttatcaggtatatcacttgcaaatcttttctgccattctgcaggttgcttaggtttattgattgtttccttttctgtgcagaagatttttattttgatgtagtcccaatagtttatgtttgcttttatttcccttgcctcaggagacatagttaaaaaaatgttgctgcatttgatgtcaaagcgctaaaccactttgcggtttaaactgcctgtgtttgctcctatgatttttatggcttaagtttcacatttaggacttcaatctattttgaatttatttttatgtgtggttgtaagaaagtgatccagttgcattcttttgcatataactgtccagttttcccaacaccatttatgggaagtattgtctttactgtattggatgatattctttcctgctttgtccaagttgatttaacaatattattatattattacttctggattttctattctgttctatcgatctgtgagtctatttttgtgcctgtaccatactatcttgattcttgcatctttgtaatataacttgaaatcgagaattgtggtacctccagctttgcttttcttcttcaagattgctttggctattcagggtcttttgtggttccatacaaatgttgattgtttattctagttctgtgaaaaacacttgttattttaataggaattgcattaaatgtgcagattgctttgggtagtatagacattttaacaaagtttttcttccaatccatgagcgtggaatgtctttccatttctttgtgtcttctcaatttctttcattggtgttttatagttttcagagtacaggtcttttatctttctggttaggtttattcctatgtatcttattattttgcatacagttgtaaatgggattactttcttaatttctctttctactgcttcgttattggtctatagagatacaatagatttctgtacattaattttgtatcctatgaccttactgaattcattgatcagttcctgtttgtgtgtgtgtgtgtgtgtgtgtgtgtgtgtgtgtgtgtggagtattttgggttttccatacatactatcatgtcatctgcaaatactgaaagtgttatttcttccttaccaatttggatgtcttttatttctttttgttttcttatttctgtggctaggagttccagtaccaagttgaataatagtgatgagagtggacatccttgccttgttcctgatggtaagggaaaagctcacaggttttcctcattaagaatgatgttagctgtgactttttcacatatggactttattatgttgaggtatattccatctaaacctactttgttgagggttttaatcatgaatggagttgtactttgtcagatgttttttatccatctattgaaatgttcatatggctcttatgctttctcttactgatgtgatgcatcatgtgatttatttgtgaatattgaaccatccttgcaacccagtaataaatcccacttgatcacggtgaatgattttttatagtgtattgttcaatttggcttactagtattttattgaggacttctgtgtctatgttcatcagagatattggccagcagttctctttttttttcatggtgtctttttttttttaactttatttgaaacacagtgagaaagtaagagagatcacagagggagagggaaaggagactctgctgagcagagagcctgacgagggacttgatcacaggaccctaagatcatgaattgaactgaaggcagataaacttaactgactgagccactcaggtgccccttacctggtgtctttggttttgttttcagggtaatgctggccccatggaatgaatgtggaagtttttcttccttttctgtttttttggaatagcttgagaaataaaggtattaactcttctttaaatgtttgataattttcctgcaaaaccatctggcctttcatttgttgctaggttttcttttcttttcttttttttaaaattcattttctttgctggttatcagtctgttcaagtattctatttcttcctgttttggttttggtaggttatttgtttgtaggaatttatttatttcttctaagttgtccaatttgttggcatatggtttttcatgatattctcttataattgtatttctgtggtattggttgttatttcttctctcttatttgtgattttatttatttgagttctttttctttttttaaagttgataagtctggctaaaagtttatccatttttattaattttttcaaagaaccagctcctggttccatttttttttttagtttttatattatttatttatgctctaatctttattatttccttccttctgctgttttgtttttctttttctagctctgctagttgtaagattagatttagtttttttctcttgcttcttgaggtaggctggtattgctataaacttccctcttagaaccacttttgctgcatctcaaaggttttgaaccattgtgttttcgctttcatttgtttccatgtactttaaaatttttttcttttaatttctggctgacccgtttcttctttagtgtcatatttaacctctatgtatttgtggtctttccatatatatatatatttttgtggttgacctttagtttcaaagcattgtgatcagaaaagatgcatggtatgactttgatcttcttgaatttgttgaggcttgttttatgggttaataaagtgatctattctggagaatgttccatgtgcacttgaaaagaatgtgtattcctctgttttagaatggagtgttctaagtgtacttgttaaatgtattagttccagtgtgtcattcaaagccattttttccttgtggattttctctgcagatcatctgtccattgctataagtggggtgttaaaattccctagtattattgttgctctgcatgtttgtattttgttttcctagcaccatttattaaaaagattatcctttctccattgagtgtttttggctctccttgaatattagttgactgcatatggggggtttagttttggcctattctgtctattggttcatatgtctattttcatatcagtactgtattgtttttattattatagatttatagtacagtttaaaatcaggaattgtgatgcctctagcttttctctccacccttttagattgctttggctattcggggttttttggtgttaccatccaaattttagaactagaatagaattttagaatagacaaaacgtctatttatgtgaaaagttattggtattttagttggcctttcactgaatctatatacagctttgggtagtatgggccagcccatgaacacaggatgttttttcatttgtttttacctttttaaatttctttcatcaaagtcttgtagttttgttgtacagatctttcatttccttggttaaattaattcctaggtattttattgtttctgatgtgttatgaatgggatggttttctttatttgtctttcagatatttcattagtagtgtgcagaaatgcatgctgattttacatcctgctgctttattgaagtggttgattagttccaacagtttttagcttcagtctttgggattttctctatacaagatcagatcatctgcaaatagtgacaattttacttgttcttttgcaatttggataccttttatttcttttactcattaaattgatgtggccaggacttttagtactattattaaataagaatagtgaaggtgggcatctttgtcttatttctgatcttaagaggaaaagcacccagtttttcacttttgagtgtaatcttagctgtaggtttgtcatatgtagcctcaattatgttaaggtatattctttgtatacccaattcatgcaaagttttgatcatgaaaggatgttatgttttgtcaagtgtttttcccacacctattgagatcatattcttttatctctcattctatgaaaatgatgtattaaatttgttgatttgtgtatgttgaaccagacacacattccaggtaaaatctcacttggttgtggtatataatcattttaggggggtcttaaattcagtttgaattcagtttagaatttttgcatgtatatcaatcagggatattggtctgagttttattttcttgtagtgttcttatttggctttgttatgaggcctacaatgagtccaaaatgttccctcctcttcaagttttgggaagaatttgtgaggaattggtgttaattctttaaatatttggtgtctacatttaaagtgaaaccatctggtcctggagttttctgtgttggtaggtttttgattattaattcagtctctaaacttgtcattagtctatgcagattttctttttctttctttcattttctttttttgcctgattcagtctttgtaggttgtatgattctagagattttttccatttcttttacataatttgttagcaaataattgtttatagtagtctcttatgatcctatgtatttctgtagtgttcattttaatgtctcttctttcatttttagttttacttatttgaattttcttttttgcttagttattccagctaaagatttgtcagttttttaatcatttcaaaaaccatttcttagttttgttgattctgtgtattgtttttctggtctctatttcatgtatttccactttgatctttattatttcctttcttctgctgactttggacttaatttgttcttttcctaatttctttgttttaataaattttttttttgcttggttatgggttttatttatttatttttttaatttattttttattggtgttcaatttactaacatacagaataacccccagtgcccgtcacccattcactcccaccccccgccctcctccccttctaccacccctagttcgtttcccagagttagcagtctttacgttctgtctccctttctgatatttcccacacatttcttctcccttcccttatattccctttcactattatttatattccccaaatgaatgagaacatataatgtttgtccttctccgactgacttacttcactcagcataataccctccagttccattcatctttgtaggacaccgaggctcctcccacagtttggctatcgactccgtccacagtttggctatcgcataaaccacatcatctttatccattcatttttcgatggacaccgaggctctttacacagtttggctattgtggacattgctgctagaaacatcggggtgcaggtgtcccggcatttcattgcatctgaatctttagggtaaatccccaacagtgcaattgctggatcgtagggcaggtctatttttaactctgaggaacctccacacagttttccagagtggctgcaccagttcacattcccaccaacagtgtaagagggttcccttttctccgcatcctctccaacatttgtggtttcctgccttgttaattttccacattctcactggtgtgaggtggtatctcattgtggttttgatttgtatttccctgatggcaggtgatgcagagcattttctcatgtgcatgttggccatgtctatgtcttcctctgtgagatttctgttcatgtcttttgcccatttcatgattggattctttgtttctttggtgttgagtttaagaagttctttatagatcttggaaactagccctttatctgatatgtcatttgcaaatatcttctcccattctgtaggttgtcttttagttttgttgactgtatcctttgctgtgcaaaagcttcctatcttgatgaagtcccaatagttcatttttgcttttgtttcttttgccttcatggatgtatcttgcaagaagttactgtggtcaagttcaaaaagggtgttgcctgtgttctcctctaggattttgacggaatcttgtctcacatttagatctttcatccattttgagtttatctttgtgtatggtgaaagagagtggtctagtttcattcttctgcatgtggatgtccaattttcccagcaccatttattgaagagactgtctttcttccaatagatagtctttcctcctttatcgaatattacttgaacataaagttcagagtccacttctgggttctctattttgttccattgatctatgtgtctgtttttgtgccagtaccacactgtcttgatgaccacagctttgtagtacaacctgaaatctggcattctgatgcccccacatatggttttcttttttaaaattcccctggctattcggggtcttttctgattccacacaaatcttaaaataatttgttctaactctctgaagaaagtccatggtattttgatagggattgcattaaacgtgtaaattgccctgggtaaccttgacattttcacaatattaattctgccaatccatgagcatggaatatttttccatctctttgtgtcttcctcaatttctttcagaagtgttctatagttttgagggtatagatcctttacctctttggttaggtttattcctaggtatcttatgcttttgggtgcaattgtaaatgggattgactccttaatttctctttcttcagtctcattgttactgtatagaaatgccattgatttctgggcattgattttgtatcctgccacgctaccgaattgctgtatgagttctagcaatcttggggtggaggcttttgggttttctatgtagagtaccatgtcatcagcaaagagggagagcttgacttcttctttaccaatttgaatgcctttaatgtctttttgttgtctgattgctgagtataggacttcgagtaccatgttgaatagcagtggtgagagtggacatccctgtcttgttcctgatcttaggggaaaggcttccagtgcttccccattgagaatgatatttgctgtgggcttttcatagatggcttttaagatgtcgaagaatgttccctctatccctacactctgaagagttttgatcagaaatggatgctgtattttgtcaaatgctttctctgcatctaatgagaggatcatatggttcttggtttttctcttgctgatatgatgaatcacattgattgttttaggagtgttgaaccagccttgtgtcccggggataaatcctacttggtcatgttgaataattttcttaatgtgttgttggatcctattggctagtatcttgttgagaatttttgcatccatgttcttcagtgatattggtctgtaattctcctttttggtggggtctttggttttggaattaaggtggtgctggcttcatagaacgaatttgaaagtaccccatctctttctatatttccaaacagctttagtagaataggtatggtttcttctttaaacgtttgatagaattcccctgggaagccatctggccctggactcttgtgtcttgggaggttttgatgactgcttcaatttcctccctggttattggcctgttcaggttttctatttcttcctgttccagttttggtagtttgtgactttccagaaatgcgtccatttcttctagattgcctaatttattggcatatagctgctcataatatgtttttaaaatcgtttgtatttccttggtgttggtagtgatctttctcattcatgattttattaatttgagtcttctccctcttctttttaataaggttcactaatggtttatctatcttattaattctttcaaagaaccaactcctggttctgttgatctgttccacagttcttctggtctcaattttgttgagttctgctcaacttttaattaactgtcttctgctgggcgtagggtccatctgctgttttttctctagctcctttatgtgtaaggttagcttttgtatttgagttctttccagtttttgaatggatgcttgtattgcgatgtatttccccttaggactgcttttgctgcatcccaaagattttgaatggttgtatcttcattctcattagtttccatgaatctttttaattcttccttaatgtcctggttgaccatttcatattttagcaggatgggtaacctccacgtgtttgaggtccttccaaacttcttgttgggatttagttttaatttcaaggcattatggtctgagaatatgcaggggatgatcccaatcttttggtatcggttaagacccgatttgtgatccagtatgtggtctattctggagaaagttccatgtgcacttgagaagaatgtgtattcagttgagtttggatgtaaagttctgtagatatctgtgaaatccatctggtccagtgtatcatttaaagctctcatttctttggagatgttgtgcttagaagacctatcgagggtagaaagagctagattgaagtcaccaagtataagtgtattattatctaagtatttcttcactttggttattaattggtttaaatatttggcagctcccacatttggggcataattattgaggattgttaagtcctcttgttggatagatcctttaagtatgagatagtgtccctcttcatctctcactacagtctttggggtaaattttagtttatctgatataaggatggctacccctgctttcttttgaggaccattagtatggtaaatggttctccaaccttttattttcaggctgtaggtgtccttctgtctaaaatgagtctcttgtagacagcaaatagatgggtcctgcttttttatccagtctgaaaccctgcgccttttgatggggtcattaagcccgttcacattcagaggtactattgagagatatgagtttagtgtcaccatgatacctattcagttcttgtttttgtggattgtttcattgaacttattcttaaaggggaattttaagagtcccccttaaaatttcttgcagagctggtttggaggtcacatattctttcagttccttcctgtcttggaagttgtttatctctccttccattttgaatgagagccttgctggataaagtattcttggttgcatgttcttctcatttaggaccctgaatatatcctgccagccctttctggcctgccaggtttctgtggagaggtctgctgttaccctgatattcctccccataaaagtcaggatttcttgtctcttgctgctttaaggatcttctctttatctttggaatttgcaagcttcactattaaatgtcgaggtgttgaacggtttttattgattttagggggggatctctctatttcctggatctgaatgcctgtttcccttcccagattaggaaagttttcagctaggatttgtttaaatacatattctggccctctgcccctttcagcgcccttgggaaccccaattaaacataggtttttcttcctcaggctgtcgtttatttcccttaatctgtcttcatcgtcttttaattgtctgcctcttttttcctcagtttccctctttgccatcaacttgtcttctatgtcactcacccattcttccacctcgttaaccctcgtccttaggacttctagtttggattgcatctcattcaattgatttttaatttctgcctgattagctctaaattctgcagtcatgaagtctcttgagtcctttatgcttttttctagagccaccagtagctgtataatagtgcttctgaattggctttctgacattgaattgtaatccagattttgtaactgtgggagagaggactgtttctgattctttcttttgaggtgaggttttccttctagtcattttgctcagtgcagagtgaccaaaaacaagttgtattgggaaaaggagaaaaagagagagagagaaagaaagaaaagagaaaaagaaaaaaggaagaaaaaaggaaaaaagaagaaaaagaaagaaaaagaaagaaaggtgaaaaaaaaaggggggtgggggaagcaatcagaaatcaaaaagaaaacaaaaacaaaaactaaaacaaaaaccacgggggagtatcttctgattctgtacactttaagtcccttgacttcccctggaacttgtccgtctagctggtcttctgggggaggggcctgttgtgctgattttcaggtgttagcacttgggggagctgctctgcccctgcctggtgcagggctcagtgggggttgtttaccccgtgaggccccaggaggaacaaccgcagtggcggggccagctctggagccctagagtcagctcccgtagtaaccacagagctccctgtctgcagggcctggaggctcccggtcagggccgctgatctgctcagctcggggcaggagcgtcctcgctgtcttgggccctcccggcctctgcctgtcctgggggaggccggatcctgggctgtgtcctggcgccctgggctcggggcctgcactggtggattcgggctcccgccccgcagccccctccgcggagccaccgcccgagcccccccgagctgctcccgccccgcagccccctctgtggagccgccccggagccccccgagctgctcccgccccgcagccccttccgcggagccgcccctgagcccctccgagctgctcccgccccgcagccccctccgcggagctgcccccgagccccccgagctgctcccgccccgcagccccctccacggagccgcccccgagccccccgagctgctcccaccccgcagccccctccgcggagccgcggcccgagccccctgaggtgctccgggtccccccgtgcgcgctgccgcccaaagggagctcggcgcactctccttgggggcgcggttgctctgttactgtcccgggaaacccgagggcatccccgacctcctgggtcctgctccacctgcctggagccctttcccccgggaaggttggtgcagctcctccttctcagggacggggctctcctgtcctggggacactcgccccggcctcagcccggctcctcgcggggcccctcccccttggaggccttttgtttctttctttttccccgtcttcctaccttgatacaagcgcgaactcttctcactgtagcattccagctggtcgctctttaaatctcaggctgaattcgtagattttcaggatgatttgaaggttttctaggttatttggtggggacgggtgacttggggaccctactcttctgccatcgtgcccctcctcctcttttcctaatttcttgtggtataaagttaggtcgtttatttgaggtctttctaatttgttaaaatctgcatttattgctacagatttttctctcatcattgctttttccacataccataaattctggtatattgcattttcacttcaatttgtttcctaataattttttatttccccttgatttcttctctgacctgttggttgttcagaagtgagtttaattaccacatagttgtagattttccagatttccttttattttttatttctagttttataccatttacgttagaagacattattgatgtgattttagtcttctgaaacttgccaagatttattttgtgtcctatcatatgatctatcttgagaatgttccatgagcacttgcaaagattgtattctgctgctgttgatgaaatgttctgtgctttctatgtccatttagcgtaaagtatggttcaaatcctatgtttccttgttgatctctatctcaataatctatccattgctgatggtattgaactaccctacttttattgtattcctatttctcccttcagctctgttagtatttgcttaatatatttaggcattctagtgttggaagtgtatacatttatgactgttatattttcttgatgtattgaccattttatcatatttgtataatgactttcgtctttgtgactgcctttgacttaaagtctgttttgtctgatctaagcatagctatctccactttcttttggtttccatttgcctggaatatctttttccatctcttcgcattgagcctatgtgtgtctttagagctgaaataagtctccttgtggacagcatatggttgggtttagtttttgtatacattcagctactctctgctttttttgctgaatttaatccatttacatttatatgtaagacttactactgccgtcttattggaagctgcctccttcttctttcttcatttttcttttctctttgcttctgcttctgcttctgcttcaccttcttcttctttgccttcttttggtatctccaatctttccccatatgtttctgtccaactttgtaaattggtggcttaccatgatgatatgctcagtctctccatttttattttttgcaaatctactctagatttttgctttgttgttactataaggcttacatgaaacatctcattaatacaacaatccattttatgctaatgacaacttattttcatttgccttgaaagactctactcttatttatttgagggatagcaagaaaacaagtgtggctggaacataataaaaaaatataagatgaaggaaagctattagagaattatggggcatagatctttcaggaccttcttttgagaggttctgtaatgactttgaatcaagaaagatggagacttattagtagatcataggtagaaagatgacctgaatcttaaaatgatccctgtggctgctgtattgggattgactggaaggctagggtgaaatcagaggaattagagatatgaaagtaacttggataacagtgagaatcctaaaggtagtgagaagtaccagattattatttaatactgagggatctgctgtcctactataacactgtatcttgctaggagtcttgaatggtaccttagaagaattacggaaaaaaaaaaaaaaaaaaagaagaattacggaaataaggatacagaagaactgtgtttctgatcccaaaacactaccactaatatactttcttatttcaattttcataatacctcaagtagctactagtaagtttccaatctatttcttgtgctttagtttcttttagggcaaaagcaggccaattttgctatagagcactggataataaatattttaagctttataagccataagatcactgtcataactactcaactttgctgttgtggcacaaaagtattcatagacaatatgcaaaagaaaacaaaaaaggatgtgtcccaataaaacattacttgtagacaatgaaacttagattgcatatcattttcacatgtcataaaataccattcttatttcttgtgttgtgggttgttgatttgaggtattcttggtatattccttttatcattatgtaatgtcccttcttgcttctggcaaatttttgctctaagatctactttatatgatgttaatatagctacttttttttttaaaataatgctttatagtatatattttctataattttctttttattgctgaatttgaagtaagttccttaatgatagtgtatagttgggtcattgttaaattttgtattgatttttttaagttttatttaaaatccagatagttaatgtacagtataatattggtttcaggtgtacaaatttagagatcctacatttccacacatcacccagtactcttcacaacaaatgcactccttaatccctctcatcactgatttaactcattctcccacccacttcccttctggtaatcatcagttcgttctctatatttaagaatctgtttcttggtttgtgtctttcttttttcccctttactcatttgttttgtttcttaaagtccacatataagtgaaatcatatggtatttgtgtttgtctgactgacttattttgcttagcataacactctctagctccatctacatccttgcaaatagcaagatttcattcatttttatgacagtaatattccattgtgtgtgtgtatgtactccatgtattgtgtgtgtgtatgtactccatgtattctaggctcattcatggtgttgcaaatagtatgatcacatcttttttgtggatgtataagattacatatttattatatatgtatgtcatatatgtaaatatggtgagtgggatatgtatatataatttttcttttctttttttttaaatttttttgtttttatttatttatgatagtcagagagagagagagagagagagagagagagaggcagagacataggcagagggagaagcaggctccatgcaccgggagcccgacgtgggattcgatcccgggtctccaggatcacgccctgggccaaaggcaggcgctaaaccgctgcgccacccagggatccctataatttttcttcttcatttgtttatcgatggatacttaagttgcttctatatcttggctgttgtaaataatgcttcaataaacataatgcatatatcttttcaaattaatgtttttgttttctttgggtaaattattgtttcatatggtatttcttttctttttattttttgaagaacctctattctgttttctgctggaaaacaatttacattctcaccaacagtgcaccagagtttctttttttccacatcctcaacatttattttttcttgtgtttttgattttagccattctgaaaagtatgaggtgatatctcattgtggttttgatttgtttccttgataattagtagcattgagcatcttttcatgtatctgttggtcatgtatatgtcttctttgggaaaatatctagtcaaatcttctgcccattttaaaatcagattatttgtttgcaggagttcttaattttaatgaagtccaatttatcaattatttctttcatgaatcatgctcttagtgttatctctaaaaagtacttgcttttgtagcacatatactaaaacatcattaccatactgaaagtcatttagcttttctctgatgctatcttctagtagagttatagttttgagttttatatttaggtctacgatccattttgagttaatttttgtgaagcatgtaagatacgggagaagattttttgtttttaatggatgtccaattgttctaacattatttgttgaaaataatatctttgctccattgtattacctttcctcctttgtcagagattagttgactatatttatgtggactgagcggtctgttctgttctactgatttgtctctttgcctaccaatactacactatctggattactgaaactttataggcaagtcttgagggtgagtagtgtcagtcctccaacttttttctccttcaatattgtattggctattctgggtctttggcttcttcatataaattttagaactaatttgtcaatatccacaaaatatcttactgggattttgatggcattgcatttaatctagagataaatttgggaagaattgacattttgataatattgagtattcctattcatgaacatggaatatctttatatttatttggttcctgtttggttttatttattagagttttgttagtctttgtttttaaattggtgcatttagaacaacagttttttgttgtttgtttttatggaaatgcaaattttcatagttcacttgaatggtatgaaaggcatctcaattgagtctttctaggagaagtcagaaaaggctttcaaagtactgttcctcctaaccctttttctctgaacagcagtggtggttcaggtttagatgtgataaattttatgaaggagaggacaaagatcagcctttcttttttgtattcaactctattttagttagtgttttctttgtttgcatgtgcagaatctgtccttgtaatactctcactaatattcatatcttttcattattcatatctttccaccttttatcttttggaattttgttttgtgactgtagagcttcagactgaaatataaatttcatagtgtgttatttccaaggtttcctgtaatctgatcctatgatattttatcaacattgttttcctttgtttctcttctgtaacttaatactgtaaccaaatgaacaattttttttcctttgcccttactcttctatgggcctctgatatacaatctccttgccccaaaactatttgtaaatgaaagaagtactagaaaaatgtggaggagaagagatggaaaataatctctcagtgttcagagtggccagataattgaaagtatcagtgcaaataaagaaccctggttgttacagaggaaactgagaaacacaagtggaacttaccagctgctactggaccaattactaaaaaagaaaatagaatatattattatttttaaaaattttgtactcagttcctattgaaaatctacttggaacactggaaaagggacttttgggaaacaaatcttatatgaatatgctataccttattaattgaatattaactacactttaataacctaaatatccaggcgattttggaaagcctgttggatgggttataggagtaaagcttacttttcctaatgaaataattattttaacattcttaaccataccaagggtcacaatcttgcaggaaactggttaccagttaaaggttactaacttaagttccttcttcattttcttttctgtctttcagcattctatctccctttcaaacctctatcaccatgtcagttatcatcatatttctttttgcagtacagaaagtttatttgtaactatcaatttaagaactgttgtcatgataattttttctgtgtttctttttgataatctctgagatttaatcaggatgctaaatctagcctaagaagtagcataagtaagacatgtaacccatgtaagatgatagttctttcatgtctttcaaggatggggaatagggtagagtgaggattagtaataatagcaaatgagaaattccaaaagcttcaatctcctggtcctctttaataatcctttggtagttatctttatttagagtaagcaaagtggaattgaggttagcccctcttccttttcttatcaatttttatgagaacttaaaactcttcaggagctagcaatgattattcagatttcactcattttacttttcttcccacttcaatctcttatctcattatgtctttgttctattattcactttccaggttttttttgttttttaatatctgagctaagttcattactttgagaaatttgttctattttttcatgaaaagtccatattatgcctgtcctctttatcctttgcatcaatatatttttcatttaaaatcagtaattttaggaaatgcagaaaaatctgagagtgaagagatgggaaaatatgccacttaagttgcatttacagaagtgattacagcccatgagatttcatgcccatgaaagcatgaaacctgaaccctatgggagtccacaggatactagaattgccaagaaacagtattgataagtttagggggaaaaacaaaacaaaacaaaactttaataacctaacacaaaatttaagcttgtaaaaattcagttactaatcatattctttatagcagaaatgggaaagaattcctgaaactatattactttctaagaaggaagctgcaaagaaatatgataaatcaactcctccattattttgttcagtaaccttgggcaaagggcaaggctggaggcattaatatacccccaactttatataaactgcaggcaacagagtggtaggggatggtgtgcaataagaattattgttgttattaggagttattaatgtctagatattagtttccagttagtatatcaaatattatttcacacaattattattgataagtattatttatgaattttgagctaatagtgacttatgactgttattacagggatttattctttgctcatcagttatttagaaaagagttgaaatacagttactaggagaaaatggctgccctttgtatatgaggcacagggaatatggaaagctgctgaaaggcagctgctgagtttatatagaaaatctcatccaagtcaaagtcatacttccaatggggtcttgaacagaatttgtcttaattctagtgctcttaattattgtaagaatgaacaaatgttatataatctggtaaaaaatacccatctctctcacaacacctaaagtgaatgcactagcttatgtcaacttcaaagttctgactgccaaagaaaggattgaactactagaggtacttcagaatcatgtatcaaaaacataaaaatagacagcatagggaatatagccaatggtattgtctggtgacagatggtagctacacttgtggtgagcatagcataatgtacagagctgtcccatccactttgttatatacctgaaatatctgtacacaccattgtgtgtcaactgtactttaattaaaaaaaaaaagaaacaaaacagacaagtagatcttctctggaaagattactttaaatgagtaactactatggtctttctgagtaattgagttggtgaagtcataatcctttcatatcctaggatatgaaaaattaattctgttttatgtggtattgatcaggatggggaaatatacacagttcttaggaaattgggaaaaattccatattcatagataatttttgaaaaagtatttctcttggaaatcatccacttgaaaagtatgcaaaagtagaccctttgaagcctagtaggaggaaggaatcagatgttgcctgaattgaacttagctctcccaattttcatgccctttctcttttggctgagttttgatttctctgctctttctcactcttcatttttagatttctctggtggcttgatttgttgataaaatatttaaactgtcaccagtgtttgttttcctttattttcatttttttttaacagtagaggtttaggctttccactgatttatacataaataaatcaattgttccagtaatatggaataaggacaataaaaacatcacatttagagaagatagtagagataacacaaattcaagttttagagaaattactttacccaaagccatgtttggttaagtgttctggctgggatctgaactgagatccatctgattcctttattatccactgcaatatattaccttaacattttttacaaattaatacatgcaattggttttattatttagagttattccttaaggcatatgtcttgaaatggaattatgagttaagatactgtatttcattgtatcttgcaacatatttcaagtgtgctttccaaaaggaaatttccaaatttacataaatttaaatgggatcaatgatgtataaatgtataatttttaccaaagcattgccgacattacttatcatatttaaatttttctttttattaggtgaaaaatactacttcagggtcttaattttctatcatttatttatctatttacctaggccttgggcatattatagtttctaaattcatctgtcatttaaagaggtattagataatggggaggtaaagggggttgaaaatatcaacgtggaatcctttatttcagggaaatttttctaaagaacactggaattaagaaatagatgaataataacttaccaataggtactggagtaactggcagaacaacatgaaataaaaatatattaacagagtttttggataaaaaatagtttccttcttactttttccaatgtattagtaaagagatctttggaagaccccaaacctccccaaataaaaacatccatgatgaaataagagggattagcatttcttttgtggtacaaaagtagtttcagtctgatgtaactgggttccttatatttcaatttagtacaaaggcagagtaggctagaacttaagtgcttatgccaattgtttttctttctcatctagtatggaggatttaaatcctgcagagaacttttaaacaatagcaaatttaaatgctgattgcagttattttctttcctgtccttacacctaagatatcttcctgatttatcctcttttattggtacctccacatttgtgatatcccaccctatatatcttttcctgttagctgtatggcaaattttatttatcattaaaagctatttgaagttgtttttagaaaacaaaatgcttcttttatatttattctcttagtgaaatgtttattctttgttgagtaattaacaacccagcaagttgccaagagggagaggaaatatttataaatacaagcatggaatggaattggtcagttaggaaaattatctccttactttgggatcccaatttgtaccagatttatgaaaagaaaagaaacttactgataggtactgctacatgggctaaaatccaaacacaaattgttagtataggttgacactgataacaaaattgacattgacaatagtcttactgctactgtttgcagataggaatttctagaatgaaaagggaaagcaagctctggacctttgacatgagttactttgtctctcttttccaatagtaacacagtcattttgaaaaagtggcaaagaagtttcattttccttttatcatgcagtttctttcagaaattgaaataccacagagctggaaaagcctcatttcctacaaattttgcttccattttcattctactcccttctcttattgcttatgtgttttcccatttttctctgtcatttctactttatatttagttgaaaatgttttttgttgatatcagtagagccaatccaagtagattgaatgttaaggtctttcatattcagaaaaggatttgactagtggagccaaccccagaattgatgaataagatatagaacttacctggctcttcttgttttactgcaaaaaagaaatcaaataagtgagtgaaagatttctggatgaacagcagagttatttctcaaactttatgctagaagttttagaaataggacttcgagggaccaccaaattctgtatttagaatcagttcaatatgatgtgagaatatcttcagattgttctgctaatgtcctcttttttttttaatttattttttattggtgttcaatttactaacatacagaataacacccagtgcccgtcacccattcactcccaccccccgccctcctccccttctaccacccctagttcgtttcccagagttagcagtctttacgttctgtctccctttctgatatttcccacacatttcttctcccttcccttatattccctttcactattatttatattccccaaatgaatgagaacatataatgtttgtccttctccgactgacttacttcactcagcataataccctccagttccatccacgttgaagcaaatggtgggtatttgtcatttctaatagctgagtatgcaatgaaacgccgggacacctgcaccccgatgtttatagcagcaatggccacgatagccaaactgtggaaggagcctcggtgtccaacgaaagatgagtggataaagaagatgtggtttatgctaatgccctcttaatttgagtgccttttttggaaagaaaggttaagagtggaatcattgggagatgctatttcttccttctagtttctctgctaattcaaactgttcattgactggtaagatttttaagtcacttatattttgttttcttattgttattcctctcttcccatgacttctttgaaatgatggcattggtttatcatgaccattcatatgactcttgctttgctaattaccattcattatgtcaatttgggaaagttttcttttttccctataaacatacttgtcttagggctggatgaccatatgtctcaccatttgactgggatggaggcactgctggacctttagagtctggatttgaattccagcctctgttgctcataattgtgggatcataggcaatttacctagtctcactatgtcattctctttgtaatagcaataacaatacttatctgatataatgtatatgcgtatataaagccctgagtacagtgcctggcacattgtaattaccaaataaattttatttggtaccatattaagtaccaattagtttcaattatagccttcaaatgaacattgatagttgaaaatggaacaaactaccggaaataggaatagagaaacaaaaaattagaagatgaggaatgcttacaatattgatgaagcacaaagtcagaaatataactcttaaatcttgatacattcacattaaaacagagcacaaaagggcctctagataccataaaaaaacatttataacaatataattgagagaaacatggaacttactcttagatttctctggtcttgctttaataaaaaagacaaataaattagtgtggttgtctgataaaacagaaacacattttcactgatgtcattctaggatgaacatcacacactgaacaatagtgaaaaggattattaagcagggaccactttgccttgggaatgttctagaaggaaggatcctgagctagtgatggagctcacttttcctttttccctctagatccctgattgtgtgaagtcaggaaatgtgtcatatcccactctattttagttgagctactttcttggtcctcctttgtcattttacttttctagtcttcacccacaatctctgtctctgcagtcctcaccatggttccttacttgaattgcccactctgtcactttggtgagagtaggttttatttcctcttcattgaactccacacttagcatggtctctgcaacagcaggtacttaacaaatgtttactgaatcatgaaagagattctccctactgtagccagcatcagagtgctcctcctttccctctgttctcttcaagcaaccacgaggaagattttgtgccttataagtgaaacagggatggggcatatgaaggcatgcagtgatctctgctacaagattcatgagggtgagcaaaagagattgctgggagaggggtgactgtatgacattctgcgcctaaactctagaaaatttttagttgtaagattttgaaaatttgatcaggctaggaaaaataatttcaatggttttatttgttttttgtttttatttcataggggtgaaataataaatttttggggcagcttgttcttttgttctagagaatcactagaaagggctaggtgtgaaaaagcaaagcagggataatatgacaaagtaagatttgaaaaggagttatctgatacactattaccccaagcaatcaaaatacatgtaaaaatgaaaataccacacagaagaaaattgttttctaagtatgaatttgggttgcaataatggtgaaaactattccttcagtgggtaaaaatgtgtgtatgtgtattcttgttcacaattgactaagcagcaatttcactgaagtagtgttgtgaggctgctattttggggctcaggttataagtatcagtatgaaaattcaatttttcattgaacacagcaccccaagacactttgagatgagtgtttttttcagaaggcagcgccttgataaagaacggcatcactcatggaagtaagtggggctccttcaaatagcctcatggacagtgaataaaataagaggaaccagaagtttgttctggtagactaatgtgtaagattgtgtcatgactctctgagagattctcagagcttggaggaccaagatacattgcaagagaggctggatcttttacaggtggacatattggtgatccatagctaatgttgccatgatcacctaggtccttaggactttacagtattattgtctcatttgctttctttttattttgagatattgtaaaaaataataatacctcagaaatcaataatcatacgatctataatgtaacatttgtcatttttgttcacaatttttcttctaagaaagaaaataatatagggatgctgaaaaccctttgacttgaaatgaaccaccccgggttcattttcttccctcaattatgcattcagtgtgtatccaataatttttgaaggtactttcatatatatgtcgatccttcagcaatatgatgcattgtttccataatttcatttgtctgttttatagttcatggaatttctttaagggggttattgtgaatatcttgtccaatagtccatagattgtcatttctttagggtcagtcattggattttttattagtttcctttgatggagtcatatttccttgatcatttatgatttttgtggccttgtggtggcatctgcatttgagggagtaagcaccacttctagtctttacagactgaagttgacaggaaaaactctctggcattcaggccataagagattctgggtctgccctcttgggccatgtataagcttgctattagagtttttgggaaagtaggtctggttcctggattagcaggtaggtaggcctatttttgggtacatggaaaccagccttgtacctgggtctgctgggtcaagcctggggcctgtgttcactatggtgggcctggtccttgagtctgtgatgaagggattgtgacctggctcagctcagacagacctagatcctgtgtctacagctgccaaccaggcattggtaaccattgggctgttcccagcatctgagtctgtggagtttggtctcatacaaggatgggctggagcctgtcttcatgggagtgggtgtggcagctggggctgagggggaaatggcctggtgataaggttatcctggagccttggggataagtggggaatctgattcatgtgagttcatcaggagcctgatgccataggattcaaccagtacatgccagagtgagctgaggactctcctcccataattgtatctctctgtgctggaccatttgtgcatggaagaggggtgatatgagtaatatgaatctatccctcctaccttcctcagtgggtcttttcttatttctgcgctttacccaggttctatagcctctcatctggaatccttggctcttgtgaagatattattgcacatggatagttattcaaattgatgttcctgggtcagacaagtgctagaaattttgttgctgcaattttactaatgccactcctcattaaccccactgattagtgtacttccactgattagtttattcctgtgctaagaccacatgtgttcaatcagtattctttttaaaacgacttgataatcaaatgaaataactagggtgagccttccctcttgagaacactatgtttgtaaatatgttatttcttcttagattcttttttttctttttctttttttatataaaattttaaatggattattttatataattatatgaatttctttttatatgaattatatgaatattttcttttcttttttatatgaatcttttttatttgaaaacaatccttttggggatttttatttgaattttattgaattgtaaattggttgagaggagaattaacatgcatattgttattgaattttcctatctttgaaaatggtttatctatttattcaggtcttatgtttttaaaaggtattgtcaagaactggaggcatagtaaatactgagaaacattttctctttctctctttaagttgtcatgctttcagggagacatgattcagaactggctcacagaataaaagacatagtaatgtctattgcaatctacaaagttatagtcagtttgctcattattatcattagtgaataaatgaattctgcatgataattatatattgacaacagtcattatatatctgtctatatcagcattgtaaaagtcgacacttaaattatttctattagggagctggcaatatagagcaaatgggctttgggttttattttaggacccagtatattgatcaatgtaagagtagacaagaccatttagatggttggcctgtctttcctccctccttccttcccaccctttcttccttcctccttacttcttctcctttcctttcccctacctgcctcatttccccatattctctttcagtttatttcaggatacgagattttttccatctccggtaatatcaagactcaggcaaaattgctgaactggctaggttaaaaacaaggtgttccatttgacttctcagttaaattgtcttccctagaagaaaatacattttttagaggtttattcttatgtttattcttgtaagttttgtttctttcgtgaatagtataattttgttttcacattacattttcaaaattgttgttgctggcataaaaaatgttttcagtgttgtttttgcatttagcaactttgctgactttatattaagtattagtagttcatttttttgtagttttttaatgcaaataatcaatagtctgagaataataacgaacatctcccttctctttgtgtctttataactcttatttttgttttgctgcacaggctggtataaattggtagcagtaatctttttttctttttttaaagattttatttatttaatcatgagagacagggaagcagagacagagacagagggagaagtacactccctgtggggagtctgatgcagggctcgatcccaggaccctgggatcgtgacctgagacaaaggcggacactcagccaggtgccccgggagtagtaatctagttcttgattttgatttgaatggcaacgcttctacaattttgttttttagaatgataaaggaataaatctcctttattagattaaggatttttttttaaaagattttattcatgacacatacagagagagagagagaggcagagggagaagcaggcagggagcccaacgcgggactccatccggggtctccaggatcaggccctgggctgaaggcggcactaaactgctgagccacccggagtgcccaagtatgttcttatctattcccttttaaggaactttttatttcttgctaataagagttttgattaggattctgtgttgaatcttgtaaaatattttttctttataaatgatcatacttttttcttcttttatctatgaatttagcaaatttattgatagattttctataatttatatcctggttatgaggcattaaaattcaatatcactgtgtttatgatgagtgtatcattgtaccttttgtttaggattttgtatctgtatttctaggtaaaagatgtctatgcattttttaaaaaaagattttatttacttatttattgagagagagagtgagagagagcacgagcagagggaggggcagagggagaagcagactacacgttgagcagggagcccaatatgcggctcaatcttgggactctgggaatatgacctgagtccaagggagacgcttaagtgactcagtcacccaggcaccccttagcatttttttcttatacaattgttgccttgccttgaaatcaaggaatcataacatcataaaataagctgaagtagatttcatttctttcctattctttggaacaggaattgctttaaagttatatacttctagtcctcagtggatgcttttgatttgaggatttaaatctcttttctactggaatgttgttaattactatttcttaaaaatattacttggtattaattctctgaattctctgaattcctattacacacgaccttctcattacacccaagcattgttcttttctttaatatttttaatctcttcatctttgtgtactcttttgagagatttcctcagttctatcttccagtttactctttttagatgtgattagtataatacttaactattactgaaacaactatatatttacataccataaatattaaaatatcatttaattatctattgcttcaatttcagtaacagtttttcatttctaagatttaagctttgttgtttttatctaccttttctttttccgaaataccttaaaaaatatattttctttatcttttttatggatagtctttcctttatttccctttagagaagccaagacttatcaaaactctagcctttagttcctctttgatgctatactagctccactatatgctatatgctgtattatctgccttatctttcaagaaaatgaaaattttctttgagaataaaaattttctccttaacttctccagttaggcttttgttcccatctaccttatcaggattactgatgacttctgtcttataaaatccaatgatcaattcccagtccaaaactttatttctcagcagttcttaatgtaattattcattcattcatcctttctatcttaaaatactctgaattctatgacactctcaccttgttttttttctttctgcttactttatatgccagatatttttatgccaatattttggcatatactttatcagatatttctcttctttccaacctcaaaattgatgttcttgagctcaattcttagccatctatctttaattggtgatctaatttagtctagtggttttaaatgctaactattttgctgatcactgtcaaatttatactttacctgacttctcccagtagcttcagactcaaatatttaattgctttttgatacacagtatatgcttggatggggaacaagatgttgaggggggccctttcctattatccccaaattgacaattagtatcaaaaatttgagaaaaagagtttataacctcccatctccttcttgacccagctgaagtgagacaatccctcatgaagagactggcatagctgtgaagtctgtgttcccagacacaatggggagggattcctagaattgtgcaaatgcatatctggttctctcaggtcttaacaaatggtgtctaaattagttctctggtaccaaatgtgtctttcctttcaatctaaataagaaaacaactctaaggggaaggagacttaaggcaatcttcagagttgtgagtagttgactaaggaaaagcgttgtgggggaggaaggcatactgatatcctttctgaaagcaaatgagaaggacttcaagagatttgcttgcaaagattgggatgtttgtgggacaggatgtatagcaacttatcacttgggtaaatgtcttcaaagtagatttgctgatttgtttatgactatttgagcattaggaaaagaaaattggagagaaggaacagtgcacaatgatgaggatgcagtagagcaacaggtcttcttttcttttttcttgtagcaaggaggcttgagcttcagaaggattgaatgggcattgaagccatacttatataagacaaactagattttaaaccaaagactaataagagattaagaagggcactgtagctttttatttttttattttttattttttttgcactgtagctttttaaaaaaggagtctatccagcaagaagatctaacaattttaaatatttatgcccctaacttgggagcagccaaatatataaatcaataacaaacttaaagaaactaattgatagtaacacaacaatagtaggggactttaccaccccactcacagcaatggacatatcatctaagcaggagagcaacaaggaaataagggctttgaatgacacagttgaccagactgccttaaaagatatattcagagcattttatcctaaagcagcagaatacacactcttttcaagtgcacatagaacattctctagaatagattatatacggggtcacaaatcaggcctcgacaaatacaaaaatactgaaatcataccactcatattttcagaccacaatgctatgaaacttgaagtcaaccacaagaaaaaaaattggaaaaaccacaaatatatgaaggttaaagaacatcctaataaagaatgcattagttaaccaggaaattaaagaagaatttaaggaatacttggaagcaaatgaaaatgaaaacacagcagtccaaaacgtttgggatgtagcaaaggcagtcctaaaaggaagcatataacaatacatgcctttcgcaagaagcaggaaagctctcaaatgcataacctaacattacacctgaaggagctggaaaaagagcaggaaataaaacctaaatctagcagaagggaaataataaaggttagagcagaaataaatgatacaaaaatttttttaaaagatggaacagatcaatgaaactaggagttggttctttgaaagaactgacaaaattgataaccccttagccagacttatgaataagaaaagaaaagggacccaaacaataaagtcataaaggaagaggagaaatcacatccaacactacagaaatacaattatgagcgaatattatgagtaattatatgccaacagattaggcaatatggaagaaatggttacgttcttaaaaacatataaatgaccaagactgtatcaggaagatatagaaagtctgaacaaattcataaccagcaaagaaattgaaacagtaatcaaaaatttcccaaaataagagtccaaggctggatggcttctcagcagacttctaccaaacattaaagaagagttaatacctattcttctgagactattccaaaaaatagaaatgaaaggaaaatttcctaactcattctatgaggccagcattaccttgattctaaaaccagacaaagactccactaaaaaggagaatatagaccaatatccctgatgaacctggatgcaaaagttctcaacaagatactagcaaattaaatccaactgtatattagaaggatcatccaccacaaacatgtgggatttattcctgggttgcaagggtggtttcaccttgcaaattgatcaacatgataacaccacattgataaaagaaaggacaagcaccatatcatcctctcaatagatgtagaaaaagcatttgacaaagtaaagtctcccttcttgataaaaactctcaagaaaatagggataaaaagaacatacctcaacatcataaaggccacatgtgaaagacccacagctaatatcatcctcaatggggaaaaacagaactttttcctgaagatcaggaacacaacagggatgtccactctcaccactgttgttcaacatagtactgaaagtcctagcctcagcaactggacaacaataagatatagaaggcatccaaactggcaaagaaggagtcaaactatttgtagacaacatgaccctctaaatagaaaacctgaaagactccaccaaagaatttctaaaaattatacataaattaagcaaagttacagagtataaaattaatgtgcagaaatctgttgcatttctatacaccaaacaaagcagcgggaaatcaaggaatcgatcctatttgcaattgcaccaaaacaataacttatctagtaataaatctaactaaagaagtaaaaaatctatactctgagaactatagaacatctatgaaagaggacacaaagaaatgaaaaaacattccatgctcatggattggacgaacaaacattgttaaactgtctatattacccaagcaatctatacatttagtgcaacttctatcaaaataccaccagcaatttttacagagttagaacaagcaatccttaaatttgtatgggactacagaagacctcaagtagccaaaaacaattctgaaaaagaaaaaaaaaaaaacaaaactggaagcatcacaattccagacttcaaactatattacaaagctgtagtcatcaagacaatatggtactggcacaacagcagacacataggtcaatggaaccaaatagagaacccagtaatggacctcaactatatggtcactaatctttgatgaagccataaagaatatccaatggagaaaaagacagtctcttccacaaatggtattgagaaagctggacagctacctgcagaagaatgaaactgggccactttctgacactacacactaagataagttcaaaatggatgaaggagggcacctgggtggctaagtagttgagtgtctgccttcaactcagatcttgatcccagggtcctgggatcaagtcccatatcaggctaccctcagagagcctgcttctgcttcctatgtctctgcctctctctctgtctctcatgaataagtaaataaaatctttttaaaaatgggtgaaagacctaaatttgagacaagaaaccatcaaaatcatagagaagaacagagggagaaacctctttgaccttagccatagcaacttcttaccagacacatcaccacaggcaggggaaacaaaaaaatgaactattggaattcatcaggataaaaaaacttctgcacaacaagggatacaatcaacaaaattaaaagacagcctacagaatgggagaagatatttgcaaatatctgatatttgcaatatatctgataaagggttagtatccaaaatctacaaagaactttaaaaactcacaatccagttaataaatgagcagaagacatgaatagacacttttcgaaagaagacatccatatggctacagacacatgaaaagttgctcagcatcactatcattagggaaatacaaatcaaaattacaatgaggtaccatctcacacctgtcaggatggctataattaacaacacacaaaaacaacagttgttggtgaagatggagagaaaggggaagcctcttgcactgttggtgggaatgcaaactggtgcagccaatctggacaacagtatggaggttcctcaaaatgttaaaaagagaactacactgtgacctagcaattacactatctaggtatttagtcaaaaggtagaaatatacagatttgaagggatatatgcaccctgtataccatgctgtttatagcagcattatcaacaatagccaaactatggagagagctcaaatgttttttgactgatggatggataaaaagtatatggtatatatacacaatggaatattactcagccagcaaaaagaatgaattcttgccatttgcaacaacatatattgagctagaatgtattatgctaagtgcaataaggcagtcagagaaagacaaataccatatgatctcactaatatgtggaatttaagaaagaaaatagatgaacatatggaaagggggtaaagaaaaaaaagagagagggaaacaaggcataagagattcttaatgatagagaacaaactgagggttgatggagggaggtggatgggggattggctagatgggtaatgggtagtaaggagggcatttgttatgataagcactgggcattgtaagggatgaatcactgaattttactccagaaatcaatattgcactgtatgttaattacttaaattcaaattttaaaaggtgacatatattatgatacgaaaaaaaactgaggttgctggataaggtaaatgggtggtggacattaaggagggcacttgtaatgagcattgggtggtgttatatgcaagggatgaatcactaaattctgcccttgaaactaatactacactatgtgttaactaatatgaatttaaataaaatcttgaaacaaaataaagcaaaacagacataaaaaaaaaaagaggacatccaaccttgaacttttgagttggtatcttactcaacttcatgctactaccgtcaccaaataggtgacggtagtaacagactatgaggtatatatactgtgaggagtgaactgaggggctccagaataggctatactagagttagtactctcacatcagggactgtgcagtagagtcctcagaactgggcaagttcttgcagattccatcaaagaactcaacataaattctacaagacatttgattgcctactctaaataacattgaaaggcaaccagtctcatgtcctcagaaaaaaggactgcaactaacagagaaggtaatttgcatgcttaatgaagtgaaattcatctttctagcctcagctcagtgggaactgtaatcaaggaaggcggacagaaaggagaaggagactacacttcttccctattctgagtcagcgggcttaagactgactgctaaaatggagtatttcaagaggagtggttggaggatttttaattatttattatttattttttttaaaagattttatttatttattcatgagagagagagagaagcagagacacaggcagagtgagaagcagggtccacgtagggagccggttgcgaggctttatcccagatcccgggatcatgcctcaagccaaaggcagacagacgctcaaccgctgagccacccaggcgtcccagatttttaattatttacaatgactagagaattatgggttctaccccaaatgtatatacagggaagagactgcctgtaacctactgagtgcaaactttttaataaactagtcataaatgtccaagtgttttgcacaagtgcaaaactgaggtcaagattgcctctaaatctgtcctttttcccatctatctagattggtagatagccccatttttcttgttgctttggccccaaacctgaaaataacccttagttcatttccatttaaactcacagacttaacagcagaatctgttggttctaccttaataatacatggaatgtgaagacttctccccacctccactctgatcacttcttctcttgagctcctgcccatgtcttcccagttaatcctccacatagtagcctttgttatgaaattatgaagcagacataactccctgtttaaacccattagtggaccttcattataggtagagtaaaatctaccattttaaccaagggctacaagcctcaaatgtgtggcccctgtttctctgacctcatctcctatcatccctcttctttctttttatctctctaggctagagtatgcatccttacagcagaccctacatccttgttcttttgcctggaacactctttttcctctctatatgccatctttctctagtctcttctcttactatgcttatattttttatggcatttatctgaaagatatatattgatttgttatttgattgtttttatttcaaaatataaacttcttgaatgcagtggctttccccccccactattatattctcagtgtaatacctggcctagaataggcacccaatatatttttgttaaatgcattagtgtctttaaagatttaaaattttgaatgcctgggtggctcagttgccttcagctcagggcgtgatcctggggtccaggatcgagttctgcatcgggttccctatgaggagcctgcttcccgctctgcctatgtctctgcctctctgtctctcatgaataaataaatcttctaaaaaatatttaaaatttattattttagtcctcttcagattgctgcagctatatttctatgagttgaaattctccaatttgttgtggcttatgtcattcatgtggtgctgagtttcctcatacatttcataattttttttcgtagtctcttattctttgagaattatctttgtggatgttttatcctgtgaatattctgtgctggttcccttcttgtggggagttttgtggttgctgttgccttagctatcagggtacagcatcaccaaaccaaatttcagctgttttggcttgggattcctgcagtacatggatggcacacttccagcagggctttgagccctgagcagatgtaggtctggtgtcctacatgcagatgcatgatggagtctgcatgtgactccgttttcatggttatgacaggtaggcgaagatattttggttcttttccttggacaaacaggaaagttttgcttctagctttgctcagggagtctcaattccagttctcaccatgctaggttctgaaatcattctaccctcctgcctctctttatttatgcttaagtttagctgtgtagttttaatagtaataataaaaaaaatatagcagccaaaaccaagccagcccgaaagaagttagtgtattcttatttcctttagatacctgtttatctcctcctaatctcttgagtcttggattttaaaatctctttcatcccaccctttctggtgtccccactgaaaagaacactaaattcttcacttttagttctggattatagtttccatctgcaaaaccgatagtgccttctgctgaactcaggtgttcccaattacagggcttgttcccaaacatggacatctgatgtatccagcatcatccttgggtctacaccattggccctgttgactcagtattttcatctggcagtgagactagttagtcagcctccttgttcaggattcagaaagaacatgtagaatgtctatgttaacagtttcaattctccctcctcagataccaatctttgtgtcctaacattattgcagttattcagaagtattataaaaatataatcagaatgtgtttagttggaaatagaggggtgtgtaagcagtctgttagggtgatccagttgtatatcatattttaaaaattgggaaattttatctaacatctggattaagtcagatgctttggcaagtctagatctgcattcttgcatggagaaattggctagaactgagcagcagctaccctttttagactgtacatgatctttccactgttcctaggtgatgtgccttacctactcaattagtagtcttgacaagaactttgggctttaatagtaatgtaatttactttcaatctgaggaacctcaagggatattgatattacataaaaatcatttgtaacacaagtatgaggaccagatttaaattatggaaaattaggacatagtgtgaaaggtggtatcatgaattctatgttaaagatcattattgtcagtacttgatctggcttaaatactgagttactgttggtctgtttcctaggaaattgagttaataagtaatgggaactcctacagttatgaattaaaaagattatctggcagttctaatctggatgactttgggtaatgtgaaaacaaaaaaatatgagaaacatgaatctcaatcttttgtgccctttagaaatagaatatctgtgcttgggaaaagtctcacatttgacagattgataagtaaagaacttacttgaggttctctgtgaaatcactaaaaaataagcaaagagaaatccatgtaatttttcttaaatagaaaaaatatagtattatctaatattttccactggtgtctctgagggaaggacttgagtagacataagaagaaagcatgctttgaggaaaggtctatctccatttaaacatcattttggaattcctgtctgtctctcaaaaattttgcctacctctgttatttatattttcagggtttgttgttcatgttgctactcaactccttttcttttaatcagtattttcttaaattatctataatgtaggggaagctgtatagtaaggaagcaagagagcaatgagaaactcaaatcactttaacagaatgaagtcacttagactttcaagaccagaaaaccatagtggagaaacagatataatacttacttatgggaggcaggggcacaccttaaaaaaacaaattaggtatcagtgagtaattgtttgaaaggaacaagtatccttctagggaagcatatttgtgtgggggaagaggcttggtagtaacacagctcttggttcaaattatggttcagtgaactgtgttcttggacaagtatgtgcccctggtttcttagcacttgcaaagaagtacaaggtccaagaggtcttggatttactccaagaatcaaatgggaaatgatgtagttaaatcacctatatagttcttatcactgaggagatgcaaagtaaacaaatgtttgaaattaaataaatatgtttacttcacaggataagcagaaggcaaaggaaggtgacagctatgaatcttaggctactacacaggagttagaaatgagtagggcaggaacaggtccataggccttatagaaaacattaacaacaaaaaagaatttaaaaaacaaacaaactgaacttacctctgggcattgaaagtggtgggccagctgaaagagaagtatttttgcaagccttttctctcccactctttttttcctcttagtttggagagttcttttttatcaagtcattataacaatagggaaaatgttccctttggtctttatttagttttaatataaattgaaggattttaacttttcaaaaagcattagtaaccatgaaatttggccatgggaaggcaggtggttaaggaaatacatacccatgcccagaaaccccaggacagctggggaaagaagttataggaccccacagtggaggaaacatggaaggacttactgagggcaggtggaactgatccggctgaaaaacagaacagagaaaattatctccttttcctttcttctccattcattttgtttttcaatttgtgaaatatcttgtaacatgtcatttttaactgctgggaaaccctcccttctgatctttatttttttatgcaaatcgtggaatttgaattttttccataattgttaaaaagctaagagaattattggtggtgtgaatacgagatgtctaagaaacaggaacttcaagcctctaaaatcccaaatggctagggaaattttcctcagatatcttggaattcaaatgtagaaaaacagactgagtaggaagtccaagtgaaaaactgttttagaaacttctgatccccctctttctcttccattgttttccccttttctgtagacagcctcttgttggtggtctttgaaactaagcaaaatttttttctcccttgtttatataaatcagtagtgttagaactttcaaaaaaaaaaaaaaaagaactttctagtacattattaataacccagagggactttgataatgaaatagcaagtggccaagaggtacctcaaactctttggatgccaacatggccaaatagatactcttggaccacactaaaaaccaatcagtccccatgacagagaatgaaatgaacatacagacttactgtttgtctgaggtgttgatcctactgaaaaataagcagaaagacttcttattgccccctgcttatttactcccttattcattttttttctatcggtaacttttctagtcacataactgcttgaaaagtttttctgatcaggagtatttgaactttccagaaaacttacaatcatctggtgtgttcaggttgatggagaagcaaaagttaagaaaataggaattgcaagttgttgtactggaagtcaaattccaatagacattgctggacattgttaaatgcacagcagagacaaataaacaacctactaattgctcatgtagataacccacctggaaaacagatatattatctgtatctttgtttttcctgttcattttttctacttctatatggaaagtccctgacaatctttaaaccatggagaaatttttttctctgctctttaatttttaggtgactcagtaaacactttaaaacttattaataagctagtggaattctaagtaatggaaaaataagggtcagggaaataggagctttaagctattgctatcccaatatggatggataaatttttgtttaagtggatccattggacactgctggagataattgagttccatcatgaagggagatagtcaaacttacaagaggatcttgtagctgaaaaacaaagaaaaaaatcagcatggaaaggctggtgaaagaggaattcgttttcttggtagggaatatcaaaaatgttcatggagggtggatcaaacccttatagatattgttgtgcactgtgctggagaacagttgccatcatgccttaggggattctgtctcctgcttcctctgagagccttcaggaaagagagatgatttatctcttccctttttgcagtgagtggtaactgcttaaagtcctataggagattgctaatttaaactgtgctgcttttacttttctactccctattctattctgtgcaaacttcattcattcatacaaatgttctccccccacccttgttgacaagtcacaataagcatcagatagtttcctctggtattttcatgtaatattaagtattaatattaatacttaatattaaatagggttatcaagtagggtttgtattccacttcattcattcattcattgggatggatgcagtcaggtaatggaataagcaagagactgagaaacatgaacatctatacccacaggatagaagcaaaggattccagacctggaggaagccaaaggcaactactgtttaagaacaagtatggaacttactagtcatttctgaagtttcagctggtggaaaaatggtaaagaaagaaaagggagaaatcagggtgtgtagaatgaagagaactcaattctcccatgatggtttgagaagagtaactacagagaagatgcagggaactcttgtttccctagctcattgcacatagctcagtgcaatgtcttgatttaggtcccatctttgtgtttcacattctcagaccggcttctacttgtctggggcaggagagtagctgtccttcctttccagtccttccaggggaataaatgcttgaaatttctagaggttcataatatcttaagcttgtacttctatgtacttctatgtacttttgtcattctcattttcatttatttcttttccctatctaaccttttagctaatttgaaagttttcttcccacctttaaaaaaattttttttagtagtcctatttggagcacccatttttgttaattaaaaagaaataactagggcagccccggtggcacagcggtttagcgccgcctgcagcccggggtgtgatcctggagacccgggatcgagtcccacatcaggcttgttgcgtggagcctgcttctccttctgcctgtgtctctgcccctctctctctctatgaataagtaaataagaaaaaaaaaaaaaaagaaataactagtatattttgcattttcttcaaatcatctgtaatttaggggaaagctaggaaggaatacatgtactacaattttcagttatacattactgtatgttttaagtgtttacacatagggagagggaattaagcaggggagaaaagggaaatggaatccatgtacccatatggattctcaagcacatggtagctaattggggactttaagccagatgagacccttccgttaggcccagtgagatcctctgagatgagcagacttatgatttctcccttataagaattataagaacttccaaggctgtacgtcttggtgataattaagagtacctaaaaaggaggctccaatttaggtggataggggataaatgatggatcatgtttattcacaaaggaaggtatttagaaccagcatttagggcaggcaccatccagttttaatgatcatagtatgattgtgtgggagactgcctgccctttccaggttttgagttcctttccccaagatattgtagaactgtaaactccatggcaccagagattaaccaaatctatctcttttcttcatgactttatccccaagcctcagttcagttcctgatacaggagctcagctagttgaaggaatgtttgagtacatctgatttgctttctgatagtatcctcttgtttggcttaaactttggaatgctgtcacttaatttgcactctcagaatttccaatggcctgaggtttgtttgatattctggaatttgacactggttttgccctagctaatcacaatatgagcttacccttcactctttcacttatagtttgtagttgcctgatgcacctgccagttcctgtaattgcagcccacctaccatcatatcctgttccctgaagctctgtgtgtctgggtgtgtgtgagtgtgttgggtgtttggggtaagtgggcaggataagacatgaggaaagagaagactttgggagagaaaattggggaactcagtgtgactagatccttagtagtattccctgatatactttacccaggaaactgggaagaaaactgataagacctcagtctatttaaatttgatttttttccttcttttacatttatctttaaaatttgctttcctttttttcattttctttacactcattatctctgttgtctttgagtaggctctttatgaactacaaagtacctcagaagcgaaagctaccctttctttctttctctgttacttcagaaaattctacattattacagaaggcattatgaccattactggggacattttcttacttttttcctaaaaaaacaaaacacaatcctggagaactcccagcaaataggaactgaggtgcatgaaaacatgtataaaactgttgtctttatagtaatacatacatttgggacaggggacaggccctctatacactgtagaagatcaaagaacaccagaggaaaaagatagataagggacttaccactggtcccagtatattgcactaaaaatagaaacaaacataaattactctggttgttgaacatgataaacacacaaaccactgaggttttccaaaggagagcagttagatagcagttagcttcccagaattactaaatcccaatcttcagaattaaatattttattggactatatccttgccataagatcagactgtcctccaggagacttgtaatcctgtttcagttggaagacaaaccatttgatgctcgcctttcactactacgggtgtttgaagtgaaatcgttgttatattcctttacctccgttttcctcatcttttttctcttctgtcacttttttttactctcttggccatcctcctttgtcttcgttcttgtttcttatgtcctttcccagattctatttcatctttgctttggaacactttgtataatgtataccgatagaccactataattattattagaaaaatgttacgctgcctattacgaatttgagtaacatatatacgttgattatatatatatatatatatatatatatatatatatatatatatatatacaacttaccaataggtcctggagtttgcactaaaaataaatcaaaattggcatgttagtatgagtgtttggatgaaaaataaatttttcattaattttattctgggggtggggctttgggaagtagagtaggggagaagtgataacagtaataagaacattagggagaactaatccaggtatgatccatacaccaaaagagatatttagcatatattgcaattcagcctgagatgagggtctctctagaatccttgtcaacctaggagaggttagagacattaaaggttgaagatactgctttttaaaaaagttttatttattgatttgacaggagagagagagagagagagaccacaagcagggagagtagcagagggaaagggagaagcagactccctgtccagcagggagcctgacatgaggctcgattccaggaccaaaggatcatgatctgagctgaaggcagatgtttaactgactgagccacccaggcaccccagatactgctttttaaagggaccatccttgtactaaaatatttctgaccaactaatatgctttaggataggcatgaaggtaggagctaaggatgcagtcttctcacagcttccagcttactgactactgctttgatcagcttgattgtctctgggcaaagggtcaacaaaaccttcaatttttaatgagaatttggccttcagttgattttccagttctgattaaacctgctttcttacttggcaacgttctttttatcaaaaatgatccttggggtgtctgggtggttcagtcagttaagcatctttttttttttttttaagattttatttatttatttatgagtgacacacagagagaggcagagacataggcagagggagaacagggagcctgatgtggtacttgatcccgggactccaggatctcgccctgagctgaaagcaaatgcttaaccgctaagccacccaggtgtcccagcatccgactcttgatttcagctctggttatgatgtcagggttgtgagatggatccccacgttgggctccatgttcaaaatagagtctgcttaagactttctctctctctctctccttctgcccctcctctactctctctctctctctctctcaaataaataaacaaacaaacaaataaataaattttaaaaataaaaagaagaatgatccttggttggtagaaagccatatttttgggcttccctgaatgtagtgaccatgtatttgggcatgtttcttataggatccctgaaggttatgtatgtagagctcttataggatattttggctcctgaggcttctatgttaaggcagctcctctatgcagcctgtgcaaggtcaaagactagttcctaggtggctctgtagatacttgcatagaccacttctaggactactgccacagaagagagatggttgatgctaccctggtggcaagctgtgtttcctgtcttaagttccattgagtagcatggtgaaggctgggatcatcttgtgagtctgcctagttagttgaatctaaaaagaccagccttccttccagtgggcattgcggtgtctctcttctccatagctccttacttcatggcactcatcatgggaaataccccagttctaacccataagccccaaaaagctctgatttttttttcctgtgtgaaaaagctagaaggtggcttaccagttgtggatatcttgggccatgagtgtagacaagctagaaatttaggtattttgtaaaagtaatttaatgtttgcttttattgtatctataaaaaaattgcccttgattctggagtagaactcctaggacatctgccctttggtataagccactaaatctttagacagataatcatttcaaatatgattttgttttgttttcctatattttttactctttttccacttttaatatgtgactcctatagccttccttttcttctctttctcagctttatttatattcatttactctttttcttctcctgcctccaactcaatctttctccttccaattttcttcctacttttgttctttttaaactcttgatttttctcttttcagcatgtatcttcattctctattactctttgtattacattttctctcacttcctctcctcataaggtctttttatccccaaattttaatattacaagttcatttctaaaaaacattttgtttatttattcatgagagacacacagaaagacagaggcagagacacaggcagagggagaagcaggttccatgcaggaagcctgatgtgggactcgattccgggactccaggatcgcaccctgggccgaaggcaggagctaaactgctgagccacccagggatcccctataagtttatttaattcctaactaataacctattagaacactcaaaatggtagtggaaagagctcaagagtcagcacaacttcagtcctgatttcattattaactatcctccttcccttatttttttaggaataacttctgaacctcaatttttcatctttcaagatgggtataatatctgttatccaccaccattgaaatgctgtgaggcccaacaaaataatgcataggagagttagaaatccattataagaatcacatgaggagtgtttacttcagcagcacatatactaaaattggaatgatacagagaagactaacatggcccctgtgcaaggatgacacacaaattcatgaaggaattacacaaagaatgactagttacagatacaggacttgtattcattctgtcaggcaaatatgggaaacctcaaacatatttcttttggtttctaatttcaaaaattcctaatttgtgttaaaaatcctataatccagtgtgtgaagctatagctatttgctcttagtttataaatatgtaattatggactactgtgtcttggaacctaaccattatttataatgtttctatggaaaaatgcaataaggtaaattgctaaaagttggtgaaaataaaacctaactgtcctggagagaacttttcagagcaattaaatagaagaaacaggatttgtattattttgaacacaatctaataacaaaaaaatatttgcagggaaagcaagaagtttagatgctgtgtactaaatctttattacatgttgatgctaaagctagattatataacttagaaaatgccatttcctagggggttaaattatcaatttgtatttaagcttcatagttaatatctttttattgcagaacctgggtgaatccaacctccaggaattctgagtgagataacgaggcagtggaaacacttgaccctggagtctatgggtgtgaattatttgaaataaaaatcaactgacattctaaacattgtaaaggaccaaaatacattgtaattgagagttaggtgacttaccaatggttttttgagatagctctaaaaaaataaataaaagagaaaagaaatgaatagctgctctcagactctggagcccatagttctcatttacatgcttttcctggtaagaatctataccattaaacttggctcagctacaatggggtagtagcgatgttctttctcatggatgctaggacaatctgatacatataaggccttccttatgtgctggatctactgagaggccaagtagcaaaggtactaggtagagatcacccttttggcccatttaaacccctgtagaaaattggaaaaaccattctccatttaaacttaaatttcttccttttccccataatttcacttctttccatctcattctgtttttaaaagtcctttgtgtgatattgataagccaatggacacattcaagagttcatctttcactttatagtttgtgtttggcaatggaatgtatattcacactattaataatgacttactgaaatggtaggtagaagaaaacaaaaaggccaaaaaaaaaccatggactcccaagcccctgaaatcccaacatgaaatccagggaagggtccctaagatactgcagggagttaaaattctctacagtagagaatcagacagtaaacttactgataggtcccgtagctcctgctgagaaacagagtgaaagagagaggaagagggggagaggtgaagggagagacagattattactatgcttcatcactataagggaaataaccattcttcaacacttactctagagggagtgtcataagtagaaaccctaggtgcatcaagggttgcttacatggcaatcctcagacagattccctattggaccatataggagacttccaggaatggaggcatccccttgttttcagtgatatttgcaaactttagaggattggaataactccttccatactaattcataatgtctcctttaaattattttctctttttttcctctcatttcattagggacttattgttatttgaatagtgaacctattctatatgttggcaaattgaatttaaataaaatatttctaaaaaagtgaaccttcctttgctgacagggcataatgactgcttttctatttttttatgttagttcatgggctttgcagtctctttatttcatttggagattctttggaaaccttgtaataggaatactagagaaattgagaaacataaaacatggcagagtggtacttaagatcttctggtgagaaattaaaggaaccagagtggagaaacaaatttgatacttacgaattggtgctgtaaattgcactgaaatacaaagaaaaggaaaatcagtgtggtttgatatgagcagaatgctcatgccacaatattctttttaaagaaattatgaagcaactcgaccagagggagaattactactgcatatcagtagataattttagcaaagaagccctataaccctccctctagattacgtcatttggcattcactcagctgtctcaagggattgacactcccaggggtaggtgggatgtcagtccagttggcttttttcatcagcacacctcctttgtttttttcacgcttattctcttgcctttgctttgaatcaccagttctcctgtagctcttccttcagtttaggaaaagtctacgaacagttgttttaattatttttatcataagtaagagaattttttcgtgggttaatatttatttataattcatattattttaaatatgaattatttgggtttcccttgtcttaaactcagtgacagttcagagtgttttctttcttttttttttttctgatgccttgggcatcaggaggtgtcagtaattcaaatgcaatcaagaagtgtgggtgagacatcctggaaatggaaagagcttgggtaaggagaggtcccatatcccatagaagaccaaagagtgcaaaattaggaaacagaaaaggaactcacttatgggtccaatggctccagctaaaatatgggaaaagcaaggcagactaattagaatggttctttggcacagaaaatttacagtttgcattgaaagtatttttgggaaaacatcataaatacagacacaggaacaaaatttctacttcatcggaggaggaaataaattcttttcttcattctccatcctggaagacccttgtaactactgggatctgacagctggagctgcagggatgcagtagtcagggttccttccctggtgggtcactgtttgtaactgcggattccacagaccattgccttttttccaacagggctaatttgaacttgtttaatcagaatctatggtctcgtcttctgaaggaggcagtgggaatttctgtctccagtgggtgactttggctcccttagtcatcatagtaacttggcctgcaatatcttagcataaaagggatagaaactctcagatggctcaagactctcatagatgcagttagtgggtaaaaggattgaggcactagacctacatgtttagcaataatagcccttctcctttacaaacacacatacacacagacacttctctgtacctcttggggtacatgtgctttagtgacacttccccagtgtttactcttggttgacttttgattattttaatcatgtttcatgtgtacaaatgctccaggaagagtagatacagggtgtgatctgtcatgagccctaaccctcaaatcattcttcttcttcctttagtattggccctgccccaggagctcaagctctgaatatcttcagcagtgatggatagaaatatgttaagaaatgaatgaaaccttggtaaatttcacttttcttgtcatcggatttaaggctactcttcctgtagagaatctgaaagggatggaggaggtgcttaaatcttagagctagtgcactcaacttatttcttctctaggtatggaggatagaaaccctgtagagtaatggttctaaaccacccggggatcttcttaaaaatgcagattctgatttagtgggtgttaggtgaagattcttcacttcttagaaactccaaggtgatgctaatgtggatccttggactaacgttaagcagcaggccattaagagactggtaaaatctcaaagcatttataggtcactgtttccatttatcttttttttttcttttctgtatcaagtgactctcactcagccctcattcccagtttttctgccagagatgtttgttgtaatatcatttttctatatgaacacttcttccagacttaatctttgttactagcagggcttatacattccacacaaccatcaacagcagtctggggacccttagtcagtgagctaggactcactgctcttccttgcaagtgtgactgagatttctagcaagggatctttctacccttctaacacttttattcttaatacttttcttttggccattgaatctcaagactttgagagatttaaaagtgatagtactttctcaggaaggctccagcttattaaaataagaatagagaataaaggaggagaaaataattgacaatttgtgaataggagagtcttacatattctaacagtgctgtaaagcaaagcacgtgggaattaaagcacagaaaagaaacttacttatgggtcctgcagtgccagctaaaatataaacacaaacaggtaagtctggcaagaacatgactgaaggatgtacatttcagggagcttcaggtcaagcatttactacatattacatttacatggaaagcagtaagagggtaagtctgcatccccctcccctccccttttttccttaagagactcataagatcttatttcctgaaattatttttcttgttctcaatttttactatcttcatactgtgaaatccttttaaaagtttctgtttgtttttggtaaacaacttcatccaaccataggatttttcctttcacctgttaattttattagcagagtttatactttgctaaataaaaaaattatcagttacttagagggatcctgaaatcagcctccagttcctcacactgataaaggaaaaggagaacagtataatagtgagttgtctccttccctcctcttttatgtgcctataaaccctaccccagcacttggtagaagctaaaaaaacaaaaaacaaacaaacaaacaaacaaaaaaaacaaaaacaaaaacaaaaacaaaacagttgagaaataggagaaacttacataaaggttctggagttgctttgaaggtttttgcatcacctataatgaaaagaaaattgataagaactatgagagacaaatattgtgtaagcaaaaaaaaaaaaaaaaaaaaagacaaatataatctcatctagatctagactttcagagagcatgaagtgtaggcaatttcattctgtccacccatgtgtgcggtacaaatagtcttgagattaaagatcccaagactaggggcacctggatggctcagttggttaagtgtccaactcttaatcttgatcttgagatcaagccccatgttgggctgagtgtgaagcctgcttaagattctctttctccctctccctgtgccccttcctgctctctctctctttaaataaataaataaataaataaataaataaataaataaatatccaagatcggagagtcctactttgctagtctctagttttatgactatgtaagtcactaaacctttggaacactacttttctcatttttaaaatggacatgagggcagcccgggtggctcagtagtttagcgccaccttcagtccagggcctgatcacgactccggggatctagtcccgcatccctgcttggagcctgcttctccctctgcctgtgtttctgcctctctctctctctctctctttctctgtctcatgaatgaataaataaaatcttaaaaaaataaaatggacatgatacctcctttcttggaggcataacggcagtgaaaaatcaagaatgataatgaataggaaagctaactaagttctatcaaaattgttatgaaaagaaatatttggtgactataaaagaatgaaactcttctgtaaagtaggaagtttttactgtgtctaaagtattcagcttcagtttactttttttctaccttctctatttttccctcttatatctttttgtcatttggaaagttctgagtgctggtgacagggcattttcttgagcatttcattctattgtcttggtttgctgatctgtgtgatttcactcttttaaaaaaaatctttttgtgttccttagttacctcagtaccttagttatacgcattgcccttgcagtgagattggcagtggtggtgaaccattgctcctttcttgagagtaatcaatcttattttaagacctgaaaagcctctttactgaaacaagtgtatagatgaattaattttcacatggaatttcaaaagttttgtgtatgtgtgaagttgtgatttgaagtttacaatctacttttttttttattttaaagattttatttatttattcatgatagttacacagagagagacagagaggcagagacacaggcagagggagaagcaggctccatgcagggagcccgacgtgggattcgatcccaggcctccaggatcgcgccctgggccaaaggcaggcgccaaaccgctgcgccacccagggatccctacaatctacttttgacttccattttcctgttctggagatttttactgaaattctttccccctcttgctttccccctcaactctttcttttttttttttttttttttttaactctttcttcttttacctgttcagatttttttccttatttagtttatttctctgttgaacactttaagtgttgaagtattgttttttaaaaaattatatttagtgagagtttagtgagttgaaaaatttgctattgtttctcttaaaataattaaatttagtttatacttgtctatttatgacttggtgtttgctagtttgttgtgtttttggggaaatagcagcttttcacagaaatgacaagatctcagcacttgaaaggagatagttcctcttctatgtgttatagactaaggtaacatactgccattcccactaccaaataaagataatttacaaaacccagctctcatatacttaagatttaagaatattgaccaatattaccaggaatgatgaatatagtttagttaatgtgctaattctgatcaattagtagcaactccctggagaggagaagaattttagattgtattactggtatttgccactggcaaaggtgagcagaagaggaacatatggtatgtttttggaagtttttgaacagagagttttgtggctttgcccagttgaagacaaataatcatgacagtgaaagatttccatttactttcaaagtaaagaaacagataaaaaacttaattataagactcgagcatcctgccaaaatactaagtattatgtataaacataataagattaagatatagattaaggacatagcttctgtggatagtctgcctaatgaaaatatcagaattagttctcttagagagtaccaaattttccattactaaatggaaatactggttgtctttattgcctcagcaggtctcgtgaattgtgaacctgttggctataggagatactggggaagttgagcatttgaaaagtgcacaccctctctagaagcattcaaattcaaaatttaaaataacgtgatgttggtctcctggaacacatgtgtggatggcaatgggctaatgaactgccaacttgggagctctactctgaaaaaggaagagatttaagtgagcaccctacatacttcaacagcagtacaatgtgagatttgcatcaccaccaactgtggcctggcttgagatagaccaaatgaataccttttttcattaatttaatcataggtattggctgggtcacatttaattaaaccctgtaattctacaaactagttcaggttgtgaagcacctggagtaatttttagatacttttagagaaaattatgaaataatgatctttgagcaagaagtaattttaatcattgtaagaatgaccaaaaatataatattcagtgtgaaaaattttatcagaaacacatagctcagaagaaaaaaatctgtcaactagaattacctcttcctaaatttttaatttttttttgtatcactttccgtaattccttacttttctgcccctcattcctctttcaatcttccctttgtttagaaaatgtggtcattttgctttcgcaataaatggaaatcagttccaggagacagatttaagcttcttcacctcaatttttcttctttctctattcatgctttctacaacccctcacttttctgttctgttctgttttacaactggtagttgaaattagttataaaagcttaatgagaaattaaataatttgcttatgttcaaagacgcagtacatagggagctggcatacaactccaggcagcctagctccagagcatgcatctgcaacagtctctttgtatatttataatacattaattaacaagtaaacttatttttaaagtggttcttaatagttcttattataccactctcaattcatggggacataatgcttattttcaataatgaggtgaacagtaatttattcccaagcacacagccaaagtaaaccatataatttctttctttgtgggtgtgtgtgggggtgatgtagttagagagggacacagagtccaaggagaaactgttgggatggaagaaaaccaaacctgctctgtactcgaaggagagggagttaatggaagaggaaaaatcaaagctatagaagagaagaagctatgactgctgaagagaaggtggggcagggagataaggtcccatgacatgacatgagtgcagggatttgcttgaaaccaagaaggggtgtttcattgtcttagggagaaactgtgacaggtgagcatgttgtcagtaagataactaatgaaggagaaggtgaagaacgatgagcctcaagcgctgttactttgacatagcagggaccagacaaggcagggagacgtcctctgcctagtgtaggggccctataataccagattttgaaagaagaaaaacttacctatggatccttgcagtaatgctaaagaacaataacaaatattcaaataagtttagagttgatggtttaagtaatccacccatttcccaagagtctttcctgaaattgtaccctccattccccagaaggcacatgggttaccagacttgcaggtctcaaatcttcctcccccttgggcactatctaggagtgaaattctcaggagagtctcaaggtttactgtattttcaatattctgatttcattcagcacctctcttttcccctatttccaatctcccctctttcttttctcttcttattttggagaatctcctttccataatgtaacagcttcaagaaacagagaaaggcaatattagaaagattctaattttataataaaagactgaggctgagagaggggaaggtctgtgcctgagcatgttaaaaaaatatatgcagttttcaccttcaatttttctgattcaaagttcagtgcactttctcctgtatcccatacgtttttctccttccgttctttctggaatactcctttagaagtaaatttctttcctatatatcgactctctctctctctggttctttttattaatctctggaatgttcctctttaaagtgtcttaagtaataggaaaggtttgtggaacttttagtattattaaatcatgacaggattatcagtatgtagctactatagaatgaaccccactatattcagtggaagaaagctgagcatttgtcttatttgccttatgttggaggttaaattcctgtgtgaagtctgatcttagatcattttcaccatcttctggaaccttatttaactaatctctaaaagaacagggtttaacaatgctctgttcagctcaacttttaataattcatttagtctaaatccacaaactgaagtcctgtattcctctgcctttcatccttagctgatagaatgtaggataacagaaaagcaaaaaggctgacattctaaatttagggcctgcccaggaaaggtcagacagggaaaacaaggtcccagatatcaaggattcatggcagagaaacaactagaaatatgctcaattcccttataaactgtgttagttgaacacacagataaattcatgaggtcgattgcttaaatgcatcagagttaatcccctttgaagaaaagcttcaggaagaagctttcacactgccctcctctgtgattttggtcacagatagtgtacggatacagtacatttgtgctgcgacagaggaggactggtgatgagcagggaagccatttactttttctttgtaaaggttgaaactctttaagggaactttgaagacaataagtcttggttaaactttcgttagttgtcctatgtacttctttctttttacctcctgcttactctctttttcctgaattgagaaatagaaaagagacttaaatactgttcctggagttgacactgaggaataatggcaaaaatccacaggaatctggattaattggtttaaaaagcatataattctcacggaactagaaaggaggtcctgattagtcttctgaagtacagtgggtgaccagatatttgaatcccagttcctctgattaatagctatgttaccttgcataagtcatttaattttttgtgcctgagattattcattttaaatacaagatttataataatatctatttcataggatttctgtgaagatgtaaagtgcttaggacagagcctggaaacatactccatacatattattataacattgtttcaaattgcaatccttatctatgtatacctgtgtatacctgcatgggggagatggaccataacctcctttgcctcagacactgtgttggtttaagatttttaaagaaataatagaatcaagcccttcgttctcctggtgtgagagcccttccccaagttaccatagtccactgagatgcttctgagaatggcctctcaagagagcctcattcatcctctaggaccacacaggatattaaacttcggagtgaatggccccatacatctctcacctaaacattatgtataacaactaattactcaccttcctctgagattaatttcagtatgtgtcacatatccatttaccttattcaccattaggggataaatctcatcttaaggagcatattatcataatgattagcatagctcctagtctgattttctttcttaccctctaatatccagcacaccatgctgtctggaattcatatcagcaaattctcccatatctttaagttctccacatgttctcttcattattttgttttagtaagcccaattgtcctttaaagtactatgtctcttgcagccctctgaggaatggctatttttttttatctcatactcatgtaccacagggcctgcaaatattgcaggagaaattaaagatctgagtttattatttagcacatgtcaacctgaagatattttactctgttcctatcataaattatccttctgtaacttaattgaattaaaaaaagcaaaacaaaataaaaactctgttgattataacagtaataaaatattgagcctgatagttttccaaggttatcttcaagatgtatatatatattttttcttacatatacatattatgtatctatgtaataaaacagcctattcatcagatgcagttttgacacagtatcagactggcaaaataattttgagatttatattaattcacatttttttgcatttttgaatttcatattaaaaattgaagtaatatcttttgcatatgcataatgtcctaaatttcttgaaactttttttcaggaagatactttaaattgaaaaattaaatatttttaatggtgtcctggggatagttggacaagcacaggatactcaaaagctcggtgtttagaaacctcagtttttcattctatgaactatgtgcctttgggtaagttagacaatatcctcaatgtcacttttcttacctgtaataactgtaaatatggactcaacaaacatggcttctttaattacagttctcctttactcttattccctgcccttttcacaaacttcttccttccttcctcctgcttctgagtcaaagaagatatttggttttgctgaaactatcatagccagctaaaaccatttgaatcttatcttcatttgtaatcagtggacttttcattaacttcagataaaatgttcgatgatgagaaggaagaaaagatgaaggacaaggctaggcagagttaaggcacaaagggaatcagatttgagaaagagaaaaaaaacttacctctttgttctcctgaaaagaaacacaaaaaaggttatgtggttgtctggcatttttttgttgctttttttttttttcatttttggagtatcagaacagggtatccctggaagcactaacccctgagtgtcagtcaaggctcagggaggtagagcattaaacacctcctccattgttaccattcaaaccctggaacaccttgaattgaattgggggaaactaaaggaacttaccaatacttgatcgagacagtgctaaaagaaaacaaacaaaaatgagatttttgtgcttcagggagaacctaaaattccatagctactatatgaggaaaaggttgtgggaaagaggacagcaatgggtcacattccattttctattatcaggtgcaatgcaatgtggagggctgatggatatccagttacagattggggtataaattttaggtttttgtataattctacagtaattctgatagggcagggtaggattacaaaacctatgcaatttattttttaagatctcttagtaagataataacaatgtttatgagaattgctagtttcttagtccatggaaacttttcttcctcctgtgacttttgtctttccttatcctgctgcttttgttctttttgttttctttctctacttaccttcctcctcttcttctctctctattttgtttctcttttttcccctttgtttgaaagatcttttgtcccaaaagatctactacataagagcttcaacagggggtttctacttctcaaaagtcattgggtcctataaggatactcaataacaagaaaacaaaatcaggatgctcctagatattaaaagatagagtcaaggcagataaaaggggcttgttgtcaagatggatattcaccctctcctctatttacttggaaaagttgggcttaataatttttaaagttttatttttattttttaaaagatttttattcatgggagacagagagagataggtagagacacaggcagagggagaagcaggctccccacgaggagcctgttgtaggactggatcctgtgaccctggaatcacaccctgagcggaaggcagatgctcaaccactgtgccacccaggtgcctcaatttttaaagttttaaaacataaaactgaacttgagacctaggaagggaagtctccaaggaccatctatcaagaaggaagccatcatctatatatcttaaaggaaggttcatcacccatatatcttaatgggaggttggcttttcaacacatgatcaggagcaaaaattaaggccataggtctcatgcaatggaagaacctggaactaattgttctgtatatctcacaaaagcactatctgtgaaattggaaccattcatatctgtttgtcagggtttgccaggaagtgatctatttgcaccaggctatggctggaaattgagtctccagcaatgaatagaactctcattgtaagccaagttcaggtatagggcccacatttgaacctctcatataggggagaaactgaattaataggattgttgcacaataggaagtttatgaggaactcaaacaaatgacaactaatgaacttacagatataagttgaaacacatttaaggaaatctactgcagtgatagatgccacaacaaatgagactacacatataaaaagaaggattcaaagggaatttcaaacaagtgtttttcacatattcaaagatatgaaagaaggactagaatccataaagcaaaaacagcattaatcaggaccaactatatttgacaaagaacaaaatgaaagcagatgtagaaaatagagtcattatattataaatcattaggtgggtaaacaaagagaataggtgtaactgaagaaataattcacaaatggtaaatctaagggaaatcatccaggactcaatatcaagaaataaagagacagtatgacaaagttcaccgtgttgtttaccaaagtaacttcttttttctccaaggcatatgtgtggtagatagaagaatctctcccctaaatgtccacatcctaatccctatccctggaacctgaatatgttaggctacatggcaaaagggatctaaggttgcagatggaactaaggttgctaactagctgaacttaaatagagattttatcctggattatctgtgtggactcagtggaatcataagggtctttaaaaatggaagctggctcaagaaacaaacagtcaatacccaaacaatcaatacccatacccaagaaacaaacaatccagtcatgaaatgggcaaaagacatggacagaaatttcaccaaagaaggcatacacatggccaacaaacacatgagaaaatgctccgcatcacttgtcatcagggaaatacaaatcaaaaccacaatgagatcccacctcacaccagtgagaatggtttaaaatgaacaagacaggaaacaacaaatgttgggagaagatgtgcagaaaggggaactctcttgcactgtgggtgggaatgcaaactggtgtagccactctggaaaacagtgtggagtttcctcaagaagttaaaaatagagctaccctatgacccagcaattgcactactgggtatttaccccaaagatactgatgtagtgacacatggggacatctgcactccaatgttcatagcaggaatgtccacaatagccaaactgtggaaggagccactatgcccttcaagagatgaatatatatatgaatattactcagccttaagaaaagacgaatacccaccatttgcttcgacatggttggaactggagggtattatgctgagtgaaataagtcaaccagagaaggacaatcatcataaggttgcacccaatacatggaatataagaaatagtgaaagggtgatggacactaaggagacacttgttggggtgagcactaggtgttatactatatgttagcaaattgaatttaaattaaaatatttatttagagagggaatccctgggttgctcagtggtttggcgcctgccttcggcccagggcgtgatcctggagtcccaggatcaagtcccacatcaggttccctgtatggagcctgcttctccctctgcctgtgtctctgcctctctctctctctctgtctctcatgaataaataaataaaatctttaaaaaatatatatttatttagacttaaaaaaaatggaagctggagattgaaaggagtcacagaaaaagatgtgaccatggaagaaggccagagtgatgtgtatgggaagcttagtcaatttttgttagttttgaagatggaggatgggggaccatgtgccaaggaatatccagaaactgaaaaagcaaggagactgctttgttttcagaatttccaaaagaaacacagtcctgctgccactttgattttagcccagagagacatgtgtcagatttctaacctatagggacacctgggtgcttcagtgattgagcatctgacttcgcctcagggcatgattctggagtcctgggatctagacctgcatcaggctctctgcaggaagtcttgttctccctctgcctatgcctctgcctctctctgtctctcatgagtaaataaaattaaaaaaaaaatttctaacctatgaaattaaaataatatatttgtatcattttaagccattaggtttttggtatttggttacagtagcaatagaaaactaatgcaatatggtttgactgtttcctctgcagttaggggaactatatgagcgagttctagcaaatctaatcttgaaagagctatgtgaaataacacccaggcttccccataaaagccttgaactcatgatcttctcctgaactctgcctgtgtcagaagccattagttgaagttggtggagacataggacaagatgaacttacgtgcttaagtcattgctgagaggaaggccaactaccaatcaggcatccctgatttcacataataatataattttgtgaatagaaccacagagattttaagatttatcgattatagggtcacagactgatgtaattaataaaaatgagatagacaaaggaaaaattattagtcttggaagatgagaggggaacctttacatatatttgatagttatcttagaaggagagactatgacttgttaggtggatagatatagacataagtataaaaatggaatatattcatagcagttaatgtcaagaattttctgtaaacaaagacaggagtccacagaatggaaaatcttgagtcctgagcaagataaatgaagttaacctcatacccagttacatcataattacaatgaagaatgcaagaaaaagggaaaatattaaaatcatagatcattatcaacaataaaaagtgccagaaaaaaatgaaataaatcttcaaaatcttgagagaaaaaaatgttaactattactcagctaaactctcatttaaggctgagggtgaagtaaagctattttcagtcagacaagggcttagaaaaacgttcacatgcacgtggagccataagaagagcaaaagggatgggatccctgggtggcgcagcggtttagcgcctgcctttggcccagggcacgatcctggagacccgggatcgaatcccacatcgggctcccggtgcatggagcctgtttctccctctgcctgtgtctctgcctctctcgctctctctgtgtgactatcataaataaaaattaaaaaaaaaaaaaaaaaaaaaaaaaagaagagcaaaaggggaggaggggcaagatggcagaagagtagggtccccaagtcactcgtccccaccaaattacctagataagcttcaaatcatcctgaaaatctacgaattcggcctgagatttaaagagagaccagctggaatgctacagtgagaatcgcgcttctatcaaggtaggaagatggggaaaaagaaataaagaaacaaaaggcctccaagggggaggggccccgcaaggagccgggctgaggccggggcgagtgtccccaggacaggaggagtgtcctcccggaggagcaggagctgcacccaccttcccgggggaaaggggcccgcggggaggtggagcaggacccaggagggcggggatgccctcgggctcccggggacactaacaggcacctgcgccccaggagagtgcgccgagctccctaagggctgcagcgggcacgcggggacccggagcagctcgggtgggctcggggcggctccgcggagggggctgcggggcgggagcagctcggggggctccggggcggctccgcggagggggctgcggggcgggagcagctctgggggctccggggcggctccgcggagggggctgaagggcgggattgagaatccaatagcacaggtccggagcacaaggcgccgggacacagcccaggatccggcctccaccgggaaagggagaggccgggagggcccaggaccccaaggacactcctgccccgagctgagcagatcagcggccccgccccggagcctccaggccctgtagaccgagagctccggagttactgcgggggctgactccagggctccagatctggccccgccactgcggttgttcctcctggggcctcacggggtaaacaacccccactgagccctgcaccaggcaggggcagagcagctcccccaagggctaacacctgaaaatcagcacagcaggcccctcccccagaagaccaactagacggacaagttccaggggaagtcaagggacttaaagatacagaatcagaagatactcccctgtgtttgttttgttgttgttgttttgtttgctttttgatttgtttccttcccctaccctttttttcctttctttttcttttttttttctttttttattccttttttctttttctctcttctttccttctttctctcctctctttttctccttttcccaatacaacttgcttttggccaatctgcactgagcaaaatgactagaaggaaaacctcacctcaaaagaaacaatcagaaacagtcctctctcccacagagttacaaaatctggattacaattcaatgtcagaaagccaattcagaagcactattatacagctactggtggctctagaagaaagcataaaggactcaagaaacttcatgacagcagaatttagagctaatcaggcagaaattaaaaatcaattgaatgagatgcaatccaaactagaagtcctaacgaccagggttaacgaggtggaagaacaagtgagtgacatagaagacaagttgatggcaaagagggaaactgaggaaaaaagagacaattaaaaaaccatgaagatagattaagggaaataaacgacagcctgaggaagaaaaacctacgtttaattggggttcccaagggcgctgaaagggccagagggccagaatatgtatttgaacaaatcctagctgaaaactttcctaatctgggaagggaaacaggcattcagatccaggaaatcgagagatccccccctaaaatcaataaaaaccgttcaacacctcgacatttaatagtgaagcttgcaaattccaaagataaagagaagatccttaaagcagcaagagacaagaaatacctgacttttatggggaggagtattaggataacagcagacctctccacagggacctggcaggccagaaagggctggcaggatatattcagggtcctaaatgagaagaacatgcaaccaagaatactttgtccagcaaggctctcattcaaaatggaaggagagataaagagcttccaagacaggaaggaactgaaagaatatgagacctccaaaccagctctgcaagaaattttaagggggactcttaaaattcccctttaagaagaagttcagtgaaataatccacaaaaacaaggactgaatagatatcatggtgacactaaactcatatctctcaatagtacctctgaacgtaaacgggcttaatgaccccatcaaaaggcgcagggtttcagactggataaaaaagcaggacccatctatttgctctctataagagactcattttagacagaaggacacctacagcctgaaaataaaaggttggagaaccatttaccattcaaatggtcctcaaaagaaagcaggggcagccatccttatatcagataaactaaaatttaccccgaagactgtagtgagagacgaagaggaacactatctcatacttaaaggttctatccaacaagaggacataacaatcctcaatatatatgccccgaatatgggggctgccaaatatatcaatcagttaataaccaaagtgaagaaatacttagataataatacacttatacttggtgacttcaatctagctctttctaccctcaataggtcttctaagcacaacatctccaaagaaacgagagctttaaatgatacactggaccagatggatttcacagatatctacagaactttacatccaaactcaactgaatacacattcttctcaaatgcacatggaactttctccagaatagaccacatactgggtcacaaatcgggtcttaaccgataccaaaagattgggatcgtcccctgcatattctcagaccataatgccttgaaattagaactaaatcacagcaagaactttggaaggacacaaaacacatggaggttaaggaccatcctgctaaaagatgaaagggtcaaccaggaaattaaggatgaattaaaaagattcatggaaactaatgagaatgaagatacaaccattcaaaatctttgggatgcagcaaaagcagtcttaagggggaaatacatcgcaatacaaacatccattcaaaaactggaaagaactcaaatacaaaagctaaccttacacataaaggagctagagaaaaaaacagcaaatatatcctacacccagcagaagaagagagttaataaagattcgagcagaactcaatgaaatcgagaccagaagaactgtggaacagatcaacagaaccaggagttggttctttgaaagaattaataagatagataaaccattagccagccttattaaaaagaagagagagaagactcaaattaataaaatcatgaatgagaaaggtgagatcactaccaacaccaaggaaatacaaacggttttaaaaacacattatgaactgctatacgccaataaattaggcaatctagaagaaatggacacattcctggaaagccacaaactaccaaaactggaacaggaagaaatagaaaacctgaacaggccaataaccagggaggaaattgaagcagtcatcaaaaacctcccaagacacaagagtccagggccagatggcttcccaggggaattctatcaaacgtttaaagaagaaaccatacctattctactaaatctgtttggaaagatagaaagagatggagtacttccaaattagttctatgaggccagcaccaccttaattccaaaaccagacaaagaccccaccaaaaaggataattacagaccaatatccctgatgaacatggatgcaaaaattctcaacaagatactagccaataggatccaacaatacattaagaaaattattcaccatgaccaagtaggatttatccccgggacacaaggctggttcaacactcgtaaaacaatcagtgtgattcatcatatcagcaagagaaaaatcaagaaccatatgatcctctcattagatgcagagaatgcatttgacaaaatacagcatccatttctgatcaaaactctacagagcgtagggatagagggaacattcctcaacatcttaaaagccatctacgaaaagcccacagcaaatatcattctcaatgggaaagcgctgggagcctttcccctaagatcaggaacaagaccggatgtccactctcaccactgctattcaacatagtactggaagtcctagcctcagcaatcagacaacaaaaagacattaaaggcattcaaattggcaaagaagaagtcaaactctctctcttcgccgatgacatgatactctacatagaaaacccaaaagtctccaccccaagattgctagaactcatacagcaatttggtagcgtggcagaatacaaaatcaatgcccagaaatcagtggcatttctatacactaacaatgagactgaagaaagataaattaaggactcaatcccatttacaattgcacccaaaagcagaataaacctaaccaaagaggtaaaggatctataccctaaaaactatagaacacttctgaaagaatttgaggaagacacaaagagatggaaaaatattccatgctcatgcattggaagaattaatattgtgaaaatgtcaaggttacccagggcaatttacacgtttaatgcaatccctatcaaaataccatggactttcttcagagagttagaacaaattattttaagatttgtgtggaatcagaaaagaccctgaatagccaggggaattttaaaaaagaataccaagggatccctgggaggcgtagcggtttggcgcctgcctttggcccagggcgcaatcctggagacccgggatcgaatcccacgtcgggctcccggtgcatggagtctgcttctccctctgcctgtgtctctgcctctctctctctctctctgtgtgtgactatcataaataaataaaaataaaaaaaaaataaaaaagaataccgtagctgggggcatcacaatgccagatttcaggttgtactacaaagctgtggtcatcaagacagtgtggtactggcacaaaaacagacacatagatcaatggaacagaatagagaatccagaagtggaccctgaactttatggtcaagtattattcgataaagggggaaagactatccattggaagaaagacagtctcttcaataaatggtgctgggcaaattggacatccacatgcagaagaatgaaactagaccagtctctttcaccatacacaaagataaactcaaaatggatgaaagatctaaatgtgaggcaagattccatcaaaatcctagacaagaacacaggcaacaccctttttgaacttgaccacagtaacttcttgcaagatacattcatgaagtcaaaagaaacaaaaggttcctcaaagagttaaaaatagaccagccctaccacccagcaattgcactgctggggatttaccccaaagatacagatgcaatgaaacgccgggacacctgcaccccgatgtttctagcagcaatgtccacaatagccaaactgtggaaggagcctcggtgtccatcgaaagatgaatgggtaaagatgatgtggtttatatatacaatggaatattcctcagccattagaaacgacgatacccaccatttgcttcgacgtggatggaactggagggtattatgctgagtgaagtaagtcaatcggagaaggacaaacattatatgttctcattcatttggggaatataaataatagtgaaagggaatataagggaagggagaagaagtgtgtgggaaatatgagaaagggagacagaacgtaaagactcctaactctgggaaatgaactaggggtggtagaaggggaggagggcggggggtgggagtgaatgggtgatgggccctgggggttaatctgtatgttggtaaattgaacaccaataaaaaataaataaaaaaataagtaaaataaaaaaataacaaaaaagaataacaaaaggactatacttgggtaagaagagagaaaaggacacaggatatagcaaacaatcataagaagacaaaatgctgatacatttttataaatctattactataaataagtaaacaattatttttgttcttgaaagtcatactatgaaacaacatggaagatgttgaaagggaagatagtcaaaagaggttattgtctagtcttagaggaagaataatatactgattaggttttgttttttttttttttagaaaaatcaagtggtatgaatgttataaatgttaaggacagctttttcgcaacgggtttgccgccagaacacaggtgtcgtgaaatcaccgctaaacctaaaccaaaatgggaaaggagaagactcacatcaacatcgtcgtcattggacacgtagattcgggcaagtctaccactactggccatctgatctacaaatgtggtgggatcgacaagagaactatcgaaaaatttgagaaggaggctgctgagatgggaaaaggctccttcaagtatgcctgggtcttggataaactgaaagctgaacgtgaacgtggtatcaccattgatatctccctgtggaaattcgagaccagcaagtattatgtgaccatcattgatgccccaggacacagagactttatcaaaaacatgattacaggcacatctcaggctgaatgtgctgtcctgattgttgctgctggtgttggtgaatttgaagcaggtatctccaagaatgggcagacccgtgagcatgcccttctggcttacacactgggtgtaaaacaactaattgttggtgttaacaaaatggattccactgaaccaccctacagccagaagagatacgaggaaatcgttaaagaagtcagcacctacattaagaaaattggctacaaccccgacacagtagcatttgtgccaatttctggttggaatggtgacaacatgctggagccaagtgctaacatgccttggttcaagggatggaaagtcacctgtaaagatgggaatgccagcggaaccacactgcttgaagccctggattgcattctgccaccaagacgtctacaaaattggtggtattggtactgtcccagtgggtcgagtggagactggtgttcttaagcctggtatggtggtcacctttgctccagtcaatgttacaactgaagtaaagtctgttgaaatgcaccatgaagctttgagtgaggctcttcctggggacaatgtgggcttcaatgtcaagaacgtatctgtcaaagatgttcgttgtggcaacgtggctggtgacagcaaaaatgacccaccaatggaagcagctggcttcacggctcaggtgattatcctgaaccatccaggccaaatcagtgctggatatgcacctgtgctggattgtcacacagctcacattgcctgcaagtttgctgagctgaaggaaaagatagatcgtcgttctggaaagaagctggaagatggtcccaagttcttgaaatctggggatgctgccattgttgatatggttcctggcaaacctatgtgtgttgagagcttctctgactatcctcctctgggccgttttgctgttcgtgacatgagacagacggttgctgtgggtgtcatcaaagtagtggacaagaaggcagctggagctggcaaagtcaccaagtctgcccagaaagctcagaaggctaaatgaatattatccccaatacctgccaccccagttttaatcagtggtggaagaacggtctcagaactgtttgtgtcaattggccatttaagtttaatagtaaaagactggttaatgataacaatgcatcgtaaaaccttcagaaggaaaggagaatgttttgtgaaccatttgttttttttttttttttttttttttgtgcgtgcgtggcagttttaagttattagtttttaaaatcagtactttaaaaaaatgtaaaaaaaataaaataaaataaaatcagtactttttaatggaaacaacttgaccaaaaatctgtcacagaattttgagacccattaaaacaaaagtttaatgagaaaaaaataaataaataaatgtaaggacaaataatataaaagctaccaaaacaggtaaagcaaaacaaaaggaagaagaaaatttaacaatccaataaaaagtaggaaaaagatttaaaaaataaaagaataaaacatggtaaatagaaaacacagtaaaattggcagaactgaagtaaaatatatcagcaatttacaataaatgtaaaatggactaaagtctgaaacaaaattttataactgttaatgtgaacagagtcaagcaatatactatttttaaaaagacacaaataagaaaaaaacaagctgtaaggttgaaaataataggatataaaaatagttaataggaaaatacatattagaacaaaagttttgtagtaatactagtatcagataatgtagatgtagccaaaagtgttcatgagtctttggatggatatggtattattgtacaaagcgattttttaaaaaaagaacaattatatgttgaacttgtatatatctaaccagaatatggaaaggaaaaatgggaagtattaaaaagaaaaatgacatcaaaagtagacaattatagttagagacttaaacttagctgtctgaagctagtatataatgcaaaagaataacaatagagaacatttgaataataaagttaataagcttgggctgatagtacatctgtgaatagaatcttgaatccaaccaataaaaaatattttttgtaagtttacttacaaagcatcaaaagtctcaacacatttcaaagaacctaaatcacacacatcccacttttatatcataatacaattttaaatcaataataaaagtagaaaaactaacatacattaaactaaaacacactttctgtaatttatttgttaaaattatgggaattatgaaatgtttaaactgaaagtcaaagaaaatactatatatcaaagctttatgaaatgaggttttaatagcatttagaatgaacttaaatatttttattagaaaataagaaggtctgaaaattaatgaagggtttcacatagtaaattagaaaaaggaacaaaaatagaatgaaggaaatactagagataaaaacagaaactaataaaataggaaaagataattagtagatattttgcaaaaccaaaattgattttcagatagagtaataaataatagcaactatctttggcatcgatgatgatgatcaaagagagaaagaaggcacaagcccagtgatactaggaataaaaataggacatatccatagatagagtgaacaatttttagaatcataaaataatttcatgccattaaaaaccaaaaagcattaattaaaatatattcaatacttattcttaataagatttttgttagcaagctacaaatagaaattttctgaactccgtaaaagggaggtgccaaatggaagcaagcatcacatttaatggtgaaaccagaagtattcctgctaatgacagataccaagaaagattcctgtgattattgctggtattagtgctgggtattatggacagaaaaagtttgagagctggaaagaagactcaaaattgttagtttttgcagataggactttctgcatacaaaatccaagagaatctaaattattggaagtcttagagctcaacagggtggctagatacaaaatctactctcaacaataaaacatacaatttatacagcagcaatcattgtctgtaaaatccaacagaaaaaaacaccattcacaacagaaataaaaacaagtatgtgcataggaattaatctaacagaagatgctctagaccctttagagaaaattatagaacattattgaggagcatataagaagatttgaataatagatacattatcattttaatgcataggaagaattgattttataaatctacagacttggtgaaattctaaagaaatcttactgtgactcatacagatttaacaaatgaattgtaaaattttgtaagaatagaagcctaagaataggcaaagcatttctgaaaagaacaacaaagataaaaaaaaaatgtgccattcctcatgataaatgtcataaagctttagtaatggaagcaattttatatctgttgagcaaaagacaacagtttcctgaaaacagaagagaaaatccaggggaaaactaagtataagataaaagaggtattacaaatcaatgggtaaagaatgcataagtcaatgggacaattagttttccaaagagaattaaacccctctctatattatttataaacaagcaaaaaaaaaaaaatcccaaacgcaaaaacctccatttggattaacatcctgtctatatggacggagaaactttataactattaagagaaagtgtaggataacatttttgtaatatccagacaagaaaggccaaaaaacaaaacccccataaaaatcagtcggagaaggacaaacattatatgttctcattcatttggggaatctaaataatagtaaaagggaatataagggaagggagaagaaatgtgtgggaaatatcagaaagggagacagaacgtaaagactgctaactctgggaaacgaactaggggtggtagaaggggaggagggcggggggtgggagtgaatgggtgacgggcactgggtgttattctgtatgttagtaaattgaacaccaataaaaaataaattaaaaaaaatctaaatgaaaataaaagattggcaaatactacaactaattgtgggtgggtggggaggaggaagaatggggacttctaaatgtcaagagacaccataaaaatgtaaaagtaagagatagaattgcaaatatttgcaatatatgcaagagaagatatttgcaaatatataaaagactagctttcataattataaagaatttctaaaattcaataacctaatagataaatgggtaaactaaatgaagcctaagtaggtagtaaacatatgagaagatactcagtttcagtagtaagtgggaaagtgcaaattaaaaattttacactaagtggcaataatgtgaaaatatgacaaaatcagggttgttaataatgcaaggaaatgggaaacttttacacattttgatgtgcctcctatgtgaataccatggaattcaattaaatgacaactagtaaaataaaaatgtgtttaagttacataaatgttcatacgcattgagattaatcccatttcagtctgtgtaccttggataaactattttagaaactacataaggacattttgtagcattatttatgatagcagaaattagaaatattgagaacatgtcagtaggagaaagaatagaaaaaatatgttcacaaactgaaatttaacaattaaaatatgtaacctggttttctgtatactttcaatactacaatattttttttggaaaaagcaagttgtaatgatgcagaatagtgtcattttagtacaatttttacatgaatacatacaaaacaatactatatattgttcagtgatgcttagcaattatacaaatagatgaaaataaacttacaagatttatggtacatttttaagggcttgggcagtggggaaagtggaatgtgtggagggatgaggacgaaagggatttctatattatctgtcacttgagaaatatgacaaaaaatctatcaaatataagatgtgaatttacaagtgtctatttttgtactttaaaaacttctttgagagaaagaaaaagaaaaatacagaaaccacagagtgtgcaaaccagataggggaaaaaccataaggaacttacctagggagttggttgatggtgctaaaacacacacagagaaacatgaggtaaattgtcaggatttggatccttgacttgcatatcagtcagtcactgtgacctcctctcaggagttgcagcccaggcccagggcgacccactgacctggtggtgggcaccagaggccactcccaactccatcctttccatctatctaaaaggtttcagctttttagtagacagatgctattcctatgaaactccgtggcttacatttttctttgtcctcatcccttccccctcctttcctttcttttcctctccttttctcctcctttatttctatcacttcctttctctgtcacttatcattttcttttcttttcttttcttttttttttttttgcattcctctcagtcagtttggaaaccagcagaccaagtttggaaactgagtttgctaatggcagactatcctaaaccagtgctaggagactttctattacctagttttcatatgaactgatggtatgctctttcctcagagcatttacaatctagggaaatgttaccaatgggaagtaaattttcattgaaaaacaagagaatacttactgtaatctccttttgatccctctaaaacacaaataaatcaagaaaaatcagtttagattttctatttctgtagttttgatatcattacagaggattacccaattaacaccctcaaatatccaagtaggcaagaagctgcaggcaaaatcttctgatggactactttatgagtcaaatgacatgaaaaagtaagcaaaggttaacaaagggaaatatctagggagaaaaaataataaactatgcctggaaagaaacactgaagtggaagaacatgttagttataataagttgaggctaagtaagaggaaaaaaaggcaaatatttaatcagctgattgagaattcaagtttaatgaagagatggcaaattataatgaatacacacacctatatacatatacatacatacatatatagatatagatatgcatcctataacctaaaacttattttttagtgatgccatggaaacattttctaaaagatctggagagagacaaaggaaattatatgaaaactcatcatgctatcatttttattttcatgaaagtgtaaaaaccaacactctggaaatgacaaattatgttgcatgatggtctaatttgatattttactaaagtataagtaaaaatctacccagaaatgtaaagacaatattgttttctctcatcccctttctgaaaatgagttctttccttctatacctgagtatagaaatcttatcactgtgataagattaagtccaagacacaaaatcttctggtttacgctaatgttacttgtttctccaggctctgtcagtattttaaaaacagaaaataccgaaaggcgctgaacactttcatgtgctgtaattatatttgctgtaaaacttaataacattaaaaataaattcagtgcatttcaaaatttgtgaattatcatggcaactttaatctataacatgtgatatatttaaatactaaaacttaagtactaaattttatacacctaaacagacatgactttgctcaatatttttcctgtcagaagattgtagtctccagttgatttatatttatatttatttatatttatatttatatttatatttatatttatatttatatttatatttatatttatatatcctgaatgatagaagacagcctggtgagtttgggaacttagcaacaagatgactgagattcatagggccaccttagagtgggaaatcaaagaaatgagttgtcatttggctttatgaattttagattatggcttatttagatcacaaaaaatgcctactaatccaagttttccctaagaatgcaagggtagcctagaatagatggaactggaggttattatgctgagtgaaataagtcaatcggagaaggacaaacattatatgttctcatttatttgaggaatataaataatagtgaaagagaatagaagggaagggagaaaaaatgggtaggaaatatcagaaagggagacagaatataaagactcctaactccgggaaacgaactaggggtggtggaaggggaggagggcgggggtgtgggggggactgggtggcgggcactgaggggggcacttgacgggatgagcactgggtgttattctgtatgttggcaaattgaacaccaataaaaaataaatttattattaaaaaaaaaaaagaaagaaactaagattgcagactctacactaaagttccatagctggaaattagtaaggtattactaaatcgtgtaagaataaattatatgaaattagagtaagataattctaaacttctatcaggttgagtcacttgcaagccctgtggctttgggcttttttcatttttcttttttttttttttttttttcatttttcatgcttacatttctcttctgtaaattagggataataatgtatatagtacgttaattgatttaagaactgcttattaaggatcatccttactgataacaaaaataaactataagaaggcaagtataaagaaaccagttaggggtcaggtgaagtacttcaggcaagagatgttaatgcttgggctaagattgtcatcatggttaaaagtgatctaatttggaatataatttggaagtagtgggtatgggatttgatggtggattgtatgaggagagtgagagaaagaagttaaaggaatagatggcatgagcagttgggggaattcagatactactaccggtatgcagcaggattaggacttgggcttcggatgtgttaagagtgagatacccctcctctatcttcaggaccactgtattatgtttgtgtaggttggttgttgcacagagagatttggggactgaaatcccagcaatctttgagtagggctgcatctgcctagagagaggaatactctctaatttgcacgagagcaacctgtaggctaacctatagaggccttgaataaccacaggggcttttgggggtaattcattctatgtggttcacagggtcatttgtagatgttaaaataaaatgaaatgtccccaagagtggctagtacataagagatattgggtgcatttaattatctccctttcctgtcgtgtataattgcattttacttatctgtgtatccttacatttctcacattccgatagcttcttgcacttgtttaatgtaatgttgtaatgatgaattattctgagaagttttgttttcccaagaaacataagatgtaaatgacaacagtagaggaaagcagcccttgtttgtgctcttggaatttcagtacatgggtcgaatttcagtacatgtgatgaattttcagggattttacttaccttgatcatcataggaagcatctagaggattgaaggaaaaacataagattcttaatttctcataaatagatttctgtattaatttcttaaaaattcaacatctaatttatttaccactttctgttgaatacaaatgccggaatcctaaaagacaagattaaaacataatgagattctatcttgacaagtatgcctacgatatttactttttgggtgaaaatctgtttacctcttcttagatctctgagagggacaattttttgggggggaaaaaccagataaagtttattaacagctcatcaagcaatgtttaatcgtatgtctaaggccaactagcaggatttttctattttcccagatgttcccattttctttggattccatttcagaaaagagaggatgccacagctctttgctcctcactctgttggtcatgacagatgaattatagaagtaagaagaggaggtatacatgaagaggccaagtgtggggcatgacagcaagcaaagtgaccaagctgcttcctctctccttttagaaatacaaatctttatgcttgtaaagtgtgtgtgtatgtgtgtatctgtgtgtccctacaaaagaggagagtgctttggaatctacttagaaacattagatttctggactttttatttcaaattatcattatttttgagtcatgtcaaactacatgtcctgatttgattaatattaattaatttgattagtattagtaatgttaataataaatactgaaattcaattttaaaagagccttttttggtcttaaccaaatggtaatagtgtagtgtgagaatatgagtatagaactccgggccaccaacctggatatggatatatccaactcctttttttgctaggtgaatttggttaagtctcttaaacttttgcatacaatttcatctttttaaaagattttatttatttacttatgagagatacagaaagaagcagagacataggcagagggaggagaagcaggctccatgcaggaacctgatgcgggactcgatcccagaactctgggatcacatcccgagctgaaggtagatgcttaatcactgagccactcaggtgtctctcaatttcatcttctagaatgaagataataatataagttatgctcacctattgtgctttatagcttacagtgtcttttcatgtatactattcagtcttgatgacgacccatgaattatatactttatctctattttatatatctaggaaattgtttcagagaagtttcttagcctttccaagatcttggaaataggagctgtaaaattttttttaatgtcttaggatggggacatatttgccttttctgagaaaaatacacaaatctatcatctatctatccatttatctatacacacacatatatacacatacacacatagaaagatggattgacagttggatatgatcacagcaaaagatatgctgacttaacaaatcatgctcaaagggagatgagtttctttgttctctaaggaacacattcctccattaattctgtggtagctcctaatccccttacctctaccatcctcatagtccagaagaccagcacctggagaaaaaaggagagtgtgcttcatggttttgcttcttgaaaaggagagaggctttaagactgagagctaataatagaaatgaactctcagtaatgaataatgatgggaattattttactttgcaagaacgagggactgtgcacagtgggagcagataagtgactgtgccagtcaccagtttcactagacttaatagtaggtcagaagaggcctcaaattgatttccttcttggtactccaggatttagctcctgtttttcttttcttactaatcctggactatctttcagcaactttgatgtctcactagacattgccatagaaaatctgcatctcttaacatcttgaactcagtgttctcagtcataatcattttagttgttttcactcttattattcctggctatctttgattcttctacctagccaccttgctgaggccttcttcactaccagatttagaccttgtattccattgcttgtggtatctgctgtttttgtgacttggtatttctgttgctgctcttggaccacaggcagcatctgaagagagcctcagaatcatgcagacctatcccctattagattttttctgcccaatttcggtttggtactcagtattgcatagaaccctttggtggatttctctcagtaaattagaagttcagttcatgggatgatgcattatgcaaattgctggggatacaatggtaaacaagacagatttcaatcctggcttatggaaattccattatgctttctatctttgcttttttcatgagtcttaatacgtactttgttctgaactgtatcttgagacatcaatttctgtggaagaatgaagcaaaaatattgctattagctacttgtgagagttgttcttcctcctcacccaactcttctcactataaactctgcttctttgctcccaaggtggccctcttgatatgatatgttacagattcctacctcttttcagcacctccagctagtcctgttctacgggtacctccacactaattctctgagggctcataggtactgagatgagaaatagggaggggatgcagctgactagaagggagtggggaagatactgaggaaaatcctggaaagagagatcttgtggcatagaaatatgccattgtctacatgggccccatctctgtttgattgacaaatacttctctgtgtttgtctcttcttatcatctctgcagtattaagtcactaaaaatcttgaattcttttggtttaatactagctaacagtgtctactagcacagtgtcttgtcttttccatttttattgctcagatcatttcccttggagctcaagtgattttagaatattcttattactattgctaaattcaatctgcttttttggggggttgacattgttggtaatgagatttgggagttcaaaagtgcaagaggaatcactagtaagtcaaagattctttgattcatgtattgaaatagattcccataatattgacaaagtctctagatatctagtaagtagaaacaaactgtgactggatcttatatcccttccattgtggctttcacagaaaatttccatcttgacgtgttactcaccattttgcttgcgtcgtgtccatcttgttaataaaatagccagaatggcaagtcccaatagagtcaggatgacagccaaagttatttctgcaacaaaacttcacctgtaggcctgcttatttagacctggtcattatcagagacaacttctggttgcctcttaactgttttcaccaaatagacatttctcctctacccccttttctgctacctgaactcctttcttccctcatcttattgtcccctacccatttttttatgttgttctttttggtcagatactaagaatctcaactgctgtatatccttgatttagagtggaaaatgtggcagatttcctcctcaattggatcctttactctctgcaggcagaagattagaggaaaacagtaatacacaaaacaagccactgagaaaaaaaattagttctaacaatatcaaacatatattagtatactagtatgtaatatatatacaatatataatatatatacaaacatatgtttatatatatatgtatatatggaatgtgtgtgcaaatatagttacatgagtgagtgaccaaaaattttagaggctcctgactgaatgaagttggtcataataatgaaaaccatagcagaagacagaaatttcttaccattgggaaagaccttttagtcatcatgcacaaagccattcatgataagagttatttgtgatgactgttattttggttaatagaagaaagcatgctggaactgcctgaatgatatctgtgtatgtgtaattggagagacaaatcttaattagataccttgcaaaggttatgaagaactgagactaaggagcctttagaagaagaaaggcagacaggcagacaggcaggcaggagggagaaaaggaggaaggaagtggggaagaagggagggaaagagaaagagaagtaggaaggaaggaggaggaagggaggaatgaatgaatgaatgaacaaagctatcacaaatcttcccatgacagtgaaaaatggtgaagacaattgaactatgaagggctaagaaaattaattacaccaagattaagactgctgtcagtaagtgatagatgaattcacctcaggatgtaatgacacacctccaattggggaaaattgggcaaatgtctatcaaatctttcaggcgttagatcatgtgagaaaatttcctcaacaagtcagccttctgggattttctcctaatgaatcactaaaattaatagtaaatagtcggtttggcttctttcatgcaagtcagaatttcatcattgatgtgaaataattcttaggggaaagggataaccaggttgtgtacttggatcaagctctggtactccctttgagtagtgtctgaaatgcagtagctattggacagaagatgatccactccatttataaggaaaataagaggaagaattgaagcagattataaagtgaggagtattaccagaagtgagatagcaagttaaggaattttcctattattccagaggatggttattttcttttactaattcaaattcctgaaaccaaagggaaaatcagtgttctcactcttgagttgagttgactgtggattgttttccccagacttccagaaggatcagtgagagtgaaagaaaggatattgaatttgaaagaaagcagcaagtaaggtaaagcagtgtttcagtctctgaggataagacatctgagtcagtagtgtccagaaagccttagagagggagtcagtccatacccaagactgccattttccaggtatcgtcttcagtgggttctgtgtcatctggatttctttgtcagagggagatcaagataaacggaacactccaagctcactgtttctgagcagtatgaacttggatgtgggggaggcccttgtagataagcatgcagagggttgcagaggaactatatggctcaggttgatcagaccaaagcagactacaggagtgtggtctatgagggttccagaatctgtgtcataacaaagaactagaacttcagaggggcaagaagaaaggaagaggaggaccaagtggctgggaagatccagaatattttggaggactttaatcttatgattttggaagggaatctactctatctaagctctggaataagttctaactttccagacattttgaggccagagattgcgtttccatcatcttttacactgagatatgtgaaatcctccagccaaaaaaattgcagagtttctgactccagagctcacactctatttacaaagtcacatttcatttcaatcttgggggcctactgttcatgatagtctatagatgacatgccacttcagtaaacaccagggccctagcccataccagaactgtatgtcctgggtcatagaaaaaagccacagtttaaaagagcaactctaatataaaggaaccagccttagaatcctccaaatgggggtgcctaggtggttcagcggtttagtgcctgcctctggcccagggcctgatcctggagtcctgggatcgagtcccatatcaggcttcctgcatggagcctgcttcttcctctgcctatgtctctgcctccctccctctgtgtctttcatcaataagtaaataaaatcttttaaaaaatcctgccaagggatccctgggtggcgcagcggtttggcgcctgcctttggcccagggcacgatcctagagacccaggatcgaatcccacgtcgggctcccggtgcatggagcctgcttctccctctacctatgtctgcctttctctctgtgtgtgactatcataaataaataaaaattaaaaaaaagtcctgccaaatgatgagggagctgatgaatcttcctgggtcagaagggctccactggagcaccactgtttatgctccccctcctccttgatcttatagatgggagcaggatctggacatggtagccagcctaccatgtcagtgaacccagacctgtcacccctaccagccctagccatcccaccaaggtgtccccagatggtgcacactggaacacctctggtcagtgttcaccaaagctccaaccatcacatcaaggtgatatagatgcagatcaccctggaatattccagggctgcatcacgttggcttcagatagctctctaggctattcctagtgtagagtgttctcggacttcccagctaatgtctgctttggctctggctatcccctgcatggagcatcttgggaccccctggtctgcaccttgccttgtccagctattccaccacattcctgaactgaacactctaggaactccagcttgcatgcacttccaccaaagttgtcatgccctgtgtggaatgccctaaaactcactagcctttgtgctgcaccttggctccagccatcccactagggcatcatctctgtggagagtcctggaacaccttggtttatacccacttgaactccagctcttctgccaaggtgctttctctgcatagagccctaggaccttctagcttgcacccaatataactttatctgtccttccagggcatcctgtgtacagagagccaaaggactgcactggcttgcacccacttcatcttaggtgtcctaccaaggtgcccctgaatggagattcctcaggacatcctcgcccacactttcctctgttccagctgctccactaaggcactctctgtgaggagagccctgggacatcctagcttatatccacttcattctatctatcctgccaaagtgccctaaatgcgtactgccctgggccccccaccctgcatccacttcagcttcagttctcctccaaggacaatcaatcactgtgtagagagccctaggacatcctggcttgcacatgcttcagttcagctgtccttccagggcaccctctgtgcagagagcctcaggattgccccagaccatgtgcacttcagcttcagccatccaaccaaggcagccctattatggactgcccagtgacctccagcccataccagccataaccccagccagtcagcaaaaattgctaggcacacatagttcacacaggagatgaatatacacatgaccattctctcaagtttaggagaaataaccattccatttaatttgtagaaacaaacacagttaagcaaaatggagagacagaggaatatcccccaataaaaggacaagacaaaacctcagaaagagaactaaatgagatggacatcagcaatatgcctgacaaaagagtttaaagtaatgatcatgctcaccagactggagagaagaacaacagaatgcagaacttcaacaaagatagaaaatatgaaaaagaaccaatcagagttgaataatacaactgaactgaaaaaacacaccagacggaatcaactgtagattagagggtataggacaggtcagggatctggaagacagggtaatgtaaatcacccaagctgaacagcaaaagaaaaaaataactaaaaaagaataaggataggttaagggatgtcctaggcaatgccaagtgaacaaacattcacattatagcagtcccagaaggaaaagagagaaaggtgtagaaaacttatatggaaaaaatccaaaaccaatagaatacattatttgtaggtgaacatggaacattttccaggatgtatcacatgttaggtgacaaagtctcaataaatttaagaaggtttaaatcaaatattacatttctgactacaacattatgaaacatgaaataaatcacaagaaaaaaactcgaaaaaacaaacatggaggctaaacaacatgctactaaacaaccaataggtcaatgacaaagtcaaagaagaaattaagggaaaaatacatggagacaagtgaaaatgcaaatacaatggtttaaaatctttggaatgtaacaaaggagttctaaggggaagtttatagcactatagacctacttcagcgaacaagaaaaagctcaaataagcaatccaacctaatacctagaggaactagaaaaagaacagacaaaacccaaggtgagtagaaggagggaaataatacaatcagagcaaaaataaatgatatggagatgagagagagagagagaaagaaagaaagaaagaaagaaagaaagaaagaaagaaagagaaagaaagaaaaaggaaagaaagtatagaacagatcaatgaaatcaagagctggttctttgaaaagataaacaaaatcgataaacctttagccagacttattaagaataaaaaagaaaggacccaaataaacgaatcagaaatgaaatagaagcgataaccaataccatagaaaaacaattataagagactactacaaaaaactatatgtcaggaaattatacaacatataagaaatggacaaatttctagaaacatacgatctttcaaaaagtttaatcttcaggaagaaatagaaaatctgaacagaccagctactggtaaagaaattgaatccttaatctaaaaaactaccaacagggaggagggcggggggtgggggtaaatgggtgaggggcactgaggggggcatttgacgggaagagcactgggtattactctgtatgttggtatattgaacaccaataaaaaataaatttattataaaaaaattttaaaaactaccaacaaaaatccaccatcagatgtatgcaaggtgaattctaccacacatttaacgaagcattgatacctattctcctcacactattccaaaaaatagaagaggaaagaaatcttccagatatattctatgaaagcagctttactgtgataccaaaaccaaaataagaccataagaaagtaaacgatagtccaatgcatatagatgtaaacgatagttcctgatgcatatagatgcaaaaatcctcaacaaaatatttgcaaactgaatccagcagtaaatttaaaagatcatttgctacaaacagtttattccagggtttcaaggataggtcaatacttgaatcaatcaatgttatacattatatcaacaaaatgaagggtaaaaatcatatgatcatcttagaatggatggaataaaaaaataagaaataacaagttttggtgaggatgtggagaaaaagcatccttgtcaccttggtggggatgtaaaatgatacccactgtggaagatggtattgaggtttctcaaaaaaataaaaatagaattacaatatgattcagtaattctaccacttggtatttacccagggaaatgaaaacactaattcaaaaagatatatgtacccttatgtttattacagcattatttatcatagctaagatatgaaagcaacccaaatttccatcaagagataaatagatagggggggaggagcaagatggcggaagagtagggtcttcaaatcacctgtctccaccaaactacctagaaaaccttcaaattatcctgaaaatctatgaattcggcctgagatttaaagagacaccagctggaatgctacagtgagaagagttcgcgcttctatcaaggtaggaagacggggaaaaagaaataaagaaacaaaggcctccaagggggaggggcccgcgaggagccgggctgaggccggggcgagtgtccccaggacaggagagccccgtcccggaggagcaggagctgcaccgaccttcccgggggaaaggggctcgcagggagttggagcaggacccaggagggagcagatgccctcgggctccccgggacagtaacagcaactgcgcgcccaggagagtgcgccgagctccctaagggctgcagcgcgcacggcgggacccggcgggacccggagcagctgaaggggctcgggtggcggctccgcggagggagctgcgcggccccgggagcagctcggaggggctcgggcagaggaagaggctccgcggagggggctgcgcggttccaggagcagctcggaggggctcgggcggcagctccgcggagggggctgcgcggcccgggagcgcgaatccaccagcgcaggccccggagcacagggcgccgggacacagcccaggatccggcctcccccgggacaggcagaggccgggagggcccaggacagcaaggacgctcctgccccagctgagcacatcagcggccccgccccggagcctccaggccctgcagacggagttcctgccggagctgaatccaggtttccagagctgccccgccactggggctgttcctcctgcggcctcacggggtaaacaacccccaccgagccctgcaccaggcaggggcacagcagctcccccaactgctaacacctgaaaatcagcacaacaggcccctcccccagaacaccagctagactgacaacttccaggagaagccaagggacttaaagtacacagaatcagaagatactccccggtggttctttttttgtttgtttttgttttgttttgctttttgatttgtttccttcccccaccccctttttttctcctttctttttctttctctttttcttctttttttttttttcgtttttttttctttttcttccctttttttttctctttctcttttctttccttctttctctcctctctttttctctttttcccaatacaacttgcttttggccactctgcactgagcaaaatgactagaaggaaaacctcacctcaaaagaaagaatcagaaacagtcctctctcccacagagttacaaaatctggattacaattcaatgtcagaaagccaattcagaagcactattatacagctactggtggctctagaaaaaagtataaaggactcaagagacttcatgactgcagaatttagagctaatcaggcagaaattaaaaatcaattgaatgagatgcaatccaaactagaagtcctaacgacgagggttaacgaggtggaagaacgagtgagtgacctagaagacaagttgatagcaaagagggaaactgaggaaaaaagagacaaacaattaaaagaccatgaagatagattaagggaaataaacgacagcctgaggaagaaaaacctacgtttaattggggttcccaagggcgctgaaagggccagagggccagaatatgtatttgaacaaatcctagcagaaaactttcctaatctgggaagggaaacaggcattcagatccaggaaatcgagagatccccccctaaaatcaataaaaaccgttcaacacctcgacatttaatagtgaagcttgcaaattccaaagataaagagaagatccttaaagcagcaagagacaagaaatacctgacttttatggggaggagtattaggataacagcagacctctccacagggacctggcaggccagaaagggctggcaggatatattcagggtcctaaatgagaagaacatgcaaccaagaatactttgtccagcaaggctctcattcaaaatggaaggagagataaagagcttccaagacaggcagcaactaaaagaatatgtgacctccaaaccagctctgcaagaaattttaagggggcctcttaaaattcccctttaagaagaagttcagtggaacagtccacaaaaacaaagactgaatagatatcatgatgacactaaactcatatctctcaatagtaactctgaatgtgaacgggcttaatgaccccatcaaaaggcgcagggtttcagactggataaaaaagcaggacccatctatttgctgtctacaagagactcattttagacagaaggacacctacagcctgaaaataaaaggttggagaaccatttaccattcgaatggtcctcaaaagaaagcaggggtagccatccttatatcagataaactaaaatttaccccaaagactgtagtgagagatgaagagggacactatatcatacttaaaggatctattcaacaagaggacttaacaatcctcaatatatatgctccgaatgtgggagctgccaaatatataaatcaattattaaccaaagtgaagaaatacttagataataatacacttatacttggtgacttcaatctagctctttctatactcgataggtcttctaagcaaaacatctccaaagaaacaagagctttaaatgatacactggaccagatggatttcacagatatctacagaactttacatccaaactcaactgaatacacattcttctcaagcgcacatggaactttctccagaatagaccacatattgggtcacaaatcgggtctgaaccgataccaaaagattgggattgtcccctgcatattctcggaccataatgccttgaaattagaactaaatcacaacaagaagtttggaaggacctcaaacacatggagcttaaggaccatcctgctaaaagataaaagggtcaaccaggaaattaaggatgaattaaaaagattcatggaaactaatgagaatgaagatacaaccgttcaaaatctttgggatgcagcaaaagcagtcctaagggggaaatacatcgcaatacaagcatccattcaaaaactggaaagaactcaaatacaaaagctaaccttacacataaaggagctagagaaaaaacagcaaatagatcctacacccaagagaagaagggagttaataaagattcgagcagaactcaacgaaatcgagaccagaagaactgtggaacagatcaacagaaccaggagttggttctttgaaagaattaataagatagataaaccattagccagccttattaaaaagaagagagagaagactcaaattaataaaatcatgaatgagaaaggagagatcactaccaacaccaaggaaatacaaacgattttaaaaacatattatgaacagctatacgccaataaattaggcaatctagaagaaatggacgcattcctggaaagccacaaactaccaaaactggaacaggaagaaatagaaaacctgaacaggccaataaccagggaggaaattgaagcagtcatcaaaaacctcccaagacacaagagtccagggccagatggcttcccaggagaattttatcaaacgtttaaagaagaaatcatacctattctcctaaagctgtttggaaagatagaaagagatggagtacttccaaattcgttctatgaagccagcatcaccttaattccaaagccagacaaagaccccaccaaaaggagaattacagaccaatatccctgatgaacatggatgcaaaaattctcaacaagatactggccaataggatccaacaatacattaagaaaattattcaccatgaccaagtaggatttatccctgggacacaaggctggttcaacacccgtaaaacaatcaatgtgattcatcatatcagcaagagaaaaaccaagaaccatatgatcctctcattggatgcagagaaagcatttgacaaaatacagcatccattcctgattaaaactcttcagagtgtagggatagagggaacattcctcgacatcttaaaagccatctatgaaaagcccacagcaaatatcattctcaatggggaagcactgggagcctttcccctaagatcaggaacaagacagggatgtccactctcaccactgctattcaacatagtactggaagtcctagcctcagcaatcagacaacaaaaagacattaaaggcattcaaattggcaaagaagaagtcaaactctctctcttcgccgatgacatgatactctacatagaaaacccaaaagtctccaccccaagattgctagaactcatacagcaattcggtagcgtggcaggatacaaaatcaatgcccagaagtcagtggcatttctatacactaacaatgagactgaagaaagagaaattaaggagtcaatcccatttacaattgcacccaaaagcataagatacctaggaataaacctcaccaaagatgtaaaggatctataccctcaaaactatagaacacttctgaaagaaattgaggaagacacaaagagatggaaaaatattccatgctcatggattggcagaattaatattgtgaaaatgtcaatgttacccagggcaatatacacgtttaatgcaatccctatcaaaataccatggactttcttcagagagttagaacaaattattttaagatttgtgtggaatcagaaaagaccccgaatagccaggggaattttaaaaaagaaaaccatatctgggggcatcacaatgccagatttcaggttgtactacaaagctgtggtcatcaagacagtgtggtactggcacaaaaacagacacatagatcagtggaacagaatagagaatccagaagtggaccctgaattttatgggcaactaatattcgataaaggaggaaagactatccattggaagaaagacagtctcttcaataaatggtgctgggaaaattggacatccacatgcagaagaatgaaactagaccactctctttcaccatacacaaagataaactcaaaatggatgaaagatctaaatgtgagacaagattccatcaaaatcctagagaagaacacaggcaacaccctttttgaactcggccatagtaacttcttgcaagatacatccacaaaggcaaaagaaacaaaaggaaaaatgaactattgggacttcatcaagataagaagcttttgcacagcaaaggatacagtcaacaaaactcaaagacaacctacagaatgggagaagatatttgcaaatgacatatcagataaagggctagtttccaagatctataaagaacttattaaactcaacagcaaagaaacaaacaatccaatcatgaaatgggcaaaagacatgaagagaaatctcacagaggaagacatagacatggccaacatgcatatgagaaaatgctctgcatcacttgccatcagggaaatacaaatcaaaactacaatgagataccacctcacaccagtgagaatggggaaaattaacaaggcaggaaacaacaaatgttggagaggatgcggagaaaagggaaccctcctacactgttggtgggaatgtgaactggtgcagccactctggaaaactgggtggaggttcctcaaacagttaaaaatatacctgccctacgacccagcaattgcactgttggggatttaccccaaagatacaaatgcaatgaaacgccgggacacctgcaccccgatgtttctagcagcaatggccactatagccaaactgtggaaggagcctcggtgtccaacgaaagatgaatggataaagaagatgtggtttatgtatacaatggaatattactcagctattagaaatgacaaatacccaccatttgcttcaacgtggatggaactggagggtattatgctgagtgaagtaagtcagtcggagaaggacaaacattatatgttctcattcatttggggaatataaataatagtgaaagggaaaataagggaagggagaagaaatgtgtgggaaatatcagaaagggagacagaacgtaaagactgctaactctgggaaacgaactaggggtggtagaaggggaggagggcggggggtgggagtgaatgggtgacgggcactgggtgttattctgtatgttagtaaattgaacaccaataaaaaaataaaaataaaaaataaaaagtaatgaaaactaataacctaaaaaaaaaaaaaaaaaaaaaagaaagcagaggattacaaagtcttgctttttgtttttgtgtaaatatatcctagaatatttgttttaaaattttcttatacgcttaaggtacttttgtctaatatattgtgttcattttttgtgtttaaggaaactttggaatttcattaaagaatttataaacgtaaaggaaacaaacaatacctctcaagtgactggaaaatgacctatgaaaattcacagccaccatgtacaggatgaatatttgcagatgtataaattaatgaagatacatctcagtttttcagttttaatctctaataaagttaacatagtatgtgtaacctactcaagttattggaataaatacatgtatgcaaaaaaaaaaagagataaatagataaggaaggtgtgttgtgcacacatgtgcgtgcacacgcacacacacacacacacaaactggaatattatgtagccataaaaagggaatgagctcttgccatttacagcaacatggatggacccagaaggtattatgctaaaagcaaagtaagtcagagaaaggcaaataccatattgtttcacttacacgtagaatctaaaagataaacaaaaattagaatcagacttataaatgtagagaaccaaatgatggttgccagagaggaggggtagaaggatgggcagaataggtgaagggaagtgggagatacagacttccagttatggaatgaataagttacagactaaaaggtagagtatagggaatatagtcaatggtattataatagtgttatgtggtaacagatggtggctacacttgtggtgaagttacaatataaatcaatctgaaaaccataaagtacattagactagcaataattgtattttggacactttattgtcctttttatattctttaatacattccatgatcacactgtaattttactttgcctttttaagataagcaaatacataaatacatgaatactcttggggggggggattgtatgcatagtcttctttcctactcgtctttatattttgcatctgcctgactaggccagagttgcttagagagtttcaggggcggtctcgttgcatgatgagaatgtcctgagataagagctgcctttggagaatttccatttatactggttagctacagtacaattgacctgaacatttggtagattatgctactacatcatatgtataatgcacatgaacccacagatatctttaatgctcatattgtttattaaacaagtatttactcaaacctactacgtacagcgctctgtaggtctagtaacacctacttaaaatgacaatgaaattgacacactgcaggagtatcagtaactaaataatcaagcacaggacattgtgcatattcaactatggatgtcatctgctgccatccttaaaaggaggctgcaccattcaggattagactcaatcacaagtgacaatggctttgagatttaaaagtttatttttcattgaaaagaattcaggaattgagcaatagttctttagttccatgaagctgtcaaaaacccaagctcattctgtgttctctgccatccatgtcgtattacatagtcaaagatgttcttagagttccatccattgtgacacatccagtcatcagaaaaagtaaagaaaacaggaaaagcacacatttttttctttaaagacacatctcagaaatcatacagaataattcagtttgtaatgcactggtcatcatttaatcacattcatcaggggaggcaggaaaatctaatcttcaactaggctgttattgggtataatgataagaaaaggagtctataacaaaggaagaagggagaattgatatgaggggcaattatgaatctctgcctcggaacaccatcttgagaaagaaccagaaagaaggaagaaaaaaataaatttgtggctgctgggagtgttgtaattatcataggggctcaaggtcgtaattactcatggaaagacaggcatatgaattacattgttctccacctggacaggtggttagggagcctgagtcagggaaccaaaatctgaaaaatggttttaggtatcctaaatactaaataccactgaatttgttctgggggaaggaaaaaatgtgggatctatttgtcatattatagaaaaatacatctccagcatcataatccaggaatacccccacactaaggggtttttctcttatagtaagacaggtttctggggaggtgggggcccagtactcccccttatagaggctgatggcccagagaccattctgtggagacactgtgaccctcccctttcttattacattatccatacaaattcccaggtcctaggaaagtgtgccctcaaccttaacctccagtacgaacctcccctaactaatgtccaactgccccagcacacaggggagggagtggaatctctgggtggagctgggtagatcttgatgttcttcttgccagcttactcgtctcccgttttcagacaggaggagtgaaggatgggcagtggctgcatccagggtcacatttactgcagacaagtggactattattattctgggaaggatctcagtaggcctgagccagaggttccccactctctgagggtttctcttaccctggttagatctaactcccctctacccatcttttcctgagactggcccataaggagcaggatccctcctgcatcatcatagcctggaacttttctttcctccaatctataagcaacaaatgtacatgagaatccaccctctaaaacatagctgcctgtctcaccagaatactgtgagtataaatgccctagattaattcaggaataagagcaaccaaaggaaatactcttccataaccttaaatatctacttacctttgctaaattatgtttgacttgaagatctggcacatccctatgctctctttatataagtcttttctcttgttttcttagtctagctagatgtttgtcaagttttttgatcttttcagaaaaccagcttttggtttcattgatttttttttctcttttctttttctattcactattttatttatctacactcatctttgttatttccttcttcatgttaggtttggatttagtttgatcttcttcaagtcccttaaggtatacaattagattattgatttgagatatttattttttatttttcaatacatatatttacagctgtaatgtttaccttcatactgctttagctatattcaacaagtttcagtgtgtgtattttcactgttatttgtcataggtattttctaattttccttgtgatttcttctttaacccattgataatttaagtgtattacttaatttcaggtttttaattgccagtttttcttgttattgatttctattttagtctgttataaaaaatacactttgcattatttcaccttttgaaatgttttaatatttgtctgtaacttatgttccatcatggagagtgtttcatgtgcacgtaagaacaatgtgtattctgtttttgtggatgaaatgttctatatatgtctgttaatcagtttatagtgtagtctaagttcttttttttccttattattcatcttgctggttgctgtatctattactgaatgtggaggattgtagtatgtaactattgttgtagaactacctattcttcaattctgccagtgtttgcagcatttgttgtgaggttctggtgtttgctgcatttatatatctatttgttatatattcttggtgaattgtcacttttaaaaatatacccttttctgtatcttgtaacaattttttgacataaatgttgacttaaagtctattttgtctgataatactattatagattactatatactatacatacagtactatctatagcttttttctttgatatttgcatggaatttctatcattctactttcaatctatttgtatctttgtatctaaagtgagtctcttgtaggaaacataaattaaaatttggatgatattgtttcaaaatttggctgatattgtttctacttatatatgtcagttttgcctgtctgtgcctttttattggagggtttaatccatttacctttaccagctccccagttactgatgaggggagcctgggtggctcagctgattgagcatccaactcttgattttggctcaggtcatgatctcagggtcataatatccagcccccaataagatctgtgcttagctgggagtctgctagagatcatctccctcagtatccccacctcgtttctcaaataataaataaatcttttaaaaataattactagtgaggaaatacttacttctgttgtcttactattgattttgtgtatgtcctacagctttttttatatttcatttttctccattgctacttcttttgtgtttattttgttttatttctttttttctatatttttttatttttatttagtgaaaatttaaggtgttttgggtcaccaaatttttcttttatgtgatttttctttttctaatttttatattctttattatgtctggatcaaacatgtgtcacagtttcattgtatatgatttcagagtgatctccttgaatttttgtttttatttcttttattttaatttaaattcaattacttaacatatagtgtattattagtttcagaggtagagttcagtggttcatcagttgcaatcagtgctcattatatcacataccctccttaatatccattaccccattacccccatctcctcaccaccctctcttccagtaaatgtcagtatgttttctgtggttaagagtctcttatggtttgtttccctctgtgatataatcttattttatttttctgtcactctaggctcctctgctttgtttcttaaattccacgtatgagtgaaataatattaaaattgtttttctctgattgatttatttccttcgcataatgccctctagttccatccatccatccacactgttgtaaatggcaagatttcattttattgatggctgagtaatattcaattgtacatatacaccacatctttatccattcatttgtttatgaacattttggctgtttctacagtttggctattgtcaatattgttactgtaaacattggggtgcaggtaccctttcagatcattacatttgtatctttgggttaaatatgtagtagtacaattgctgggtcataggatagctatatttttaacttcttgaggaacctccatactgttttccagagtgggtgtaccagcttgcattcccaccagcagtgtaagacagttcccctttctccacatccttgacagtatttattgtttcctaacttgttaattttagccattctgacttgtgtaaggtggtatatatcattgtggttttgatttgtatttccatgatgccaaaaatgttgagcatttttttcatgtgtctgttggtcatttgtatgtcttctgtggagaaatatctgttcatgacttctgcccatttcatgactggagtttttggttttggagtttgatacgttctttatagatcttggatactaaccctttatctgataaaacatttgcaaatatcacctcccattctgtcagttgtcttttggttttgtcgactgttttcctttgctgtgcagaagctttatatcttgatgaagtcccaatagctcatttttccctttgtttcccttgcctttggtgacaagtctagcaagaagttgctatggctaaggccaaagagattgctgcctttgttttcttctaggactgtgatggattcctatctcacatttacgtctttcctccattttgagtttatttttgtttatggcataagataatggtcttattcttctgcatctggctgtccaaatttcccgacaccatttgttgaagagactgtcttttttccattggatattctttcctgctttgtcaaagattaactgaccatagagttgattttgataggaattgcattgaatgtatgtattgctctgggaagcatagacattttaacatttgttcttctaatccatgaacatggaacatatttccatttctttgtgtcttccttaatttctttcatgagttttttgtagttttctagtacagatcctttacctctttggttgagtttattccttggtatcttgtttttaggtgcaattgtaaatgggatcaattccttaatttctctttcttctgtttcattgttagtgtatagaaatgcaactgatttctgtgccttgattttatatcctgccacattgctgaattcctctatgagttctagaaattttggagtggagtcttttgggtgttccacatagagtatcatgttatctgtgaaaagtgagagttgacttcttctttgcctattcagatgacttttatttctttttgttgtctgattgctgaggctaggacttctagtgctatattgaacaacaatagtgagattagacatccttgtcatgtccctgaccttaggggaaaggctctcattattttccccattgaaaatattcacggtgggttttttgtacatggcttttatgatactaatgtaagttccctctattcctacactgtgaaaagttttaatcaagaaaggatgctgtactttgtcaaatgctttatctgcattactgagagattcttgtcctttcttttattaatgtagtgtatcatattaattgatttgtggatgttgaaccacccttccagcacaagtataaatcccactttgttgtagtgaataatccttttaatgtactgttggatcctattggctagtatcttggcgagaatttttgcaaccatgttcatcggggatattagtctgtaattctcccttttggtggagtctttgtctggtttatggatcaagataatgctggcctcatacaatgagtttgaaagttttcccttcatttctattctttttttttatattgtactgtcaattggctttatcgttatacaacatattagcaatctttccatgttagtactctatttttaattttatttattttattttttcttttgtatatattttttattagagtttgatttgccaacatatagtgtaacacccagtgctcatcccatcaaggacatttctattctttgaaatagcttcagaaatttggatattaattcttgtttaaatgtttggtaggattcccctgggaagccatctggttctggactcttatttgttgggagatttttgatgactgcttcaatttccttgctggttattggtctgttcaggttttctattccttcctgtttcagttttggtaatttatatgtttctaggaatttatccatttcttccagattgcctaatttgttggtgtacagttgttcatagtatgttcttataatggtttatatttcttcggtgttggttatgatctctcctctttcatgattttattaacttgggtcctttctcttttcttttgattaagtctggctcagggtttatcaatcttattaattctttcaaagaaccagcttctagttttgtttatcttttcttctgttcttttggtttctatttcattgacttctgctctcatctttatgaattctctattcctactgggtttaggctttatttgctgttttttctctagttcctttaggtggaaggttaggttgtgtatttgagacttttttgtttcttgagaaaggcttgtattcctctatatttccctcttaagaccacttatgctgcatccaaaaagttttgaacagttgtgttttcattttcattcattccatgaatttttaaaaattctttaatttgctggttgactcattcattctttaaataggtagtgtttaaccttcatgtatttgttttccttccaaatttcctcttgtgtttgagttcaagtctcaaagcattgtggtctgaaaatatgtagaaaataattccagtcttttagttctggtttagatctgatttgtgagctagtatgtgatctattctggagaatgatttatgtaactcactaagaatgaatattctgttgctttaagatggaatgttctgaatatatctgtgaagtccatctgatccagtgtgtcattcaaagccattgtttccttgttgatcttctacttaggtgatctatatccattgtgggatattaacacctactattattgtattattatcaatatgtttctttaattttgttattaattggtttatataattagccacttctttgttagtagcataaataattacaattcttaggtcttcttgttggatagacccgttaattgtgatatagtgactttcttcatctcttattacagtcttcggtttcaaatctattttgtctgatagaaggattgctacctcagctttcttttgatatccattagcatgataagttgttttccatccccccactttcaatctggaggtgcttttaggtctaaaatgagtctctctctctcttttttttaaatcgaatctgatactctttattttttaattggagcatttagctcatttacattcagagtaattattgaaagatattaatttagtgccatgtgttaccagtaaggtcattgtttctgtatattgtctctttcctttcaggtctatgttacttttgggctctttctttacttataggatagcctttaatatttcttgcagggctggtttagtgatcacaaattttcatttttgtttgtcctgatgaggcagctcttcatctctccttctattctgcatgagagtcttgctggataaagtattcttggctgcatattttttcccatttagccccttgaatgtattacgtgaggtctttcttgcaagccaggtctctatgtataggtctgctgcttgcctcatgtttctacctcaatgggttaaggatctcttgtcccaagctgctttcaggattttctttttgtgcctgaaatttgccaacttacctattatatgttaaggtattgacctatttttattgatcttgaggtgggttttctgtgcctcctggacttgaatgcctgtttccttccccagtttagggaagttctcagctataatttactcaaatataccttctgcttctctctctctctcctctctctttttcttctccctctggggccccaattattctaatattgtttcactttatggtatcactgatctgtcaaatccgcccctcatgatccagtagttatttatctctctttttctcagtatttttattttctatcattttatatttcttatcactgattctcttttctgcttcatttattatagcagttagagcctccattttttattgtaacacagtaatacctttttttatttctccagactcgattttagttctattatttctccagaaagggattctcttctatgcttttttcaagcctagctagtatctttataatcattactctgaattctagcttcaacatcttatttttatccatatttattaagtctctggcagttagtattgcctcttgttctcttttctggggtgagttttcctgtcctctcattttttccatagaagaatagatgaatcagagaataaaatacaaaaatatcaaccacgactccacaaaacatacactagacaaatcagaagagattatgaaaccaagaaagaaaaaagagggaaaaaagagaatataatcaaacaagtggctagaacagagtgatatattaggtcctggttgtatttttttctgtatgttagaagaaactagatcccaaaattgtaaagaaagaaaaacatatgtatatatatattcttcttcttttctttttcttccttctttcttcttcattcaaagagcgaatacagtcatacactgagaataaggggacagtagaattggaaatttaaagaaaatataatttttttaagttggctccatgccatgcatggagccccacacaggacttgaattcatgactctgagatcaatacctgagctgagatcaagagtcagacatttaactggctcagccacaagggtgctccaaagaaggtgggattattaattaaactgaatgcaaaagtaaggaaatgcaagagtgtaagtagccaagtaatcaagcactgaacttcacatctcctgttccacctaaatattcagttgtggatgtcatctgctgtcatatatatatatatatatatatatatatatatttttttttttttttttttttttttgctgtcatatttaaatggagagtgcatcagtcagggatagattcaatcacaaatgacaaatatccaatatataaatgtcttaaagatataaaagtttattttacacagaaaagaattctgaagttacataatggagtaggtccataaagaagcccaaaacccaagtctattctaatttctctgccattcatgtcatattacatagtcacaaatgttctttcagttccattcatcataacacattccagttagaagaaaatgtaaagaagaaaagaagaatacaattttcttttaagggtacattccaggaatcatacagaataattagtttataacacaccagccatcaattagtcacatgcagcaagtgaaggtaaaaaaatctaatgttcatatggggatgtcataggtcaaggtaattgtatgaaaacatctataactggaagaagggagaattgatatgaggggcaatcacagtctgtgtctcagacaatcataacaatggatcagtaagatgaaggaaaatatcaattagcatctccttgggtataatcatttgcaattcaaattatttctaattctttgcctttaacaaactttaatttagctgttaatcggtaggactttccaaaatagctttaaaaatctatcgtcttggattttatcatttacttcagaaggtcaaagtagtaagttatgagctttaactaaaatctttctatttccagtaatttacaattaagcatcaattagcatctccttgggagagaattataatcatcactggggccaaaaataatcgtttctcatatatttctcatataattctcataaatgaattaaacattacctccatggacagatggttagggaacctgagtcgggggaccaaagcctgaaaagtggtcttatagcacgactgaatgttatctgggtaaaggagaaaatgtgggatccatctgtcatattatagtaggatacatctccagcatcataatccaggaatatccccacactgaggggcttttctcttatagtaagacaggtttctggggaggtgagggcccagtactctcccttatagagcctgatggcccagaaaccattctgtggggacactgtgatgctccccttccttgttacattatctatacaaattcccaggtcccaggaaagtgcaccctcgaccttaacttcccagtgggctctcccagagctgatgtgcagttgacccagcacacagggataggagtggaatctctgggtggagctaggtagatcttgatgttcttcttgccaggttacttgtctcctgtcttcagacaggaggagggaaggatgggcagtggctgcatccagggtcacatttactgcagacaagtggactattattattctgggaaggatctcagtaggcctgagccagaggtttccccctctgtgagggtttcttttgcccttagtagatgtaactcccctctgcccatcttttcctgagactggcccataaggagcaggatccctcctgtatcatcatagacttaccagcctggaacaattctttcctccaatctataaggaacaaatgtatatgagatctcatcctctgaaacatagctgcttgtctcaccagaatacaatgagtataaatgccctaggattaatttaggaataagagcaaccgaaggaaaccataaccttaaatatctacttaccttttgctaaattgtgtttgacttgaagatctgatacatctctatgttctctttatataatgttccctcaggataaatagcaattaaatatttaggttgttgaaaggaaatagggaatatggcaaatctgatcaaataacttattttttgttttagttttctcagatttttagcagacaataccactctacctatgctcaacctgtgctcaaaaataacaaaactgctaaaatttaagtagataacacattgttatctactaaaacattgagtaatctactgagatcatggatgcatgctttggagttgctttgatttttagcacattgctttgtacacagtaggtattgatttaaaatatcttcgatagtaggattttctgtatcagagttcatatcacttaccagcatataattgtgccttcctccagtctggggcgggggagagaaagaaggaaactttttactttttttccttccctgttttctcttattgtcttttccatttctccctttgtcccatttcttcttctaaaatccttgggcttcctcttttaattctgtattattttcatatttcattttttttcaaatatcatagtaaaaaagatcatgtgtaggccaagtagcaatatagaagcaagacaagggagcaggagcaggaaagagagagcctaaaatcaagatgaaggatggaggaaaggaggaagaaatactgaatcaattgaagtttgcacttctgagagaatttactaaaactctttaaatttagaaagctaatgctacagatgcttctttggcaaccatagacatttttgttgtgtttctgcatactattttgctactttcaggaaggacccaagagatggaagaatagagctttccaagaaataagcattactcaccgaacttgtattgagccttcctcctagctgagagaaaagacataaacacacatgtatgttatagatgttaacatcttaaggaagacacagttaaatgtttgtgtctgcatattggccaagcaaaattcatttcaaaatcaattaaaggaatctctaaagtacattccatgtaaaaacttcactacaatttgcaaaatacaatctgtatactatacagtgtaggacatgaagatttaaataattcttcttatgtgatcagtgtaggaatatcttagaaaattgccttagactttagtgatatgtcatcaatgaattttgagtgaaaaaagtggatgaaggaagagcaatttattgaattaataattaaatgaattcaagtaaaaatgaaagaggagtaataactatgactggaaagggacagtaagcaggcaaagcatccaaaaatacttacataccttggaccacttgaaatatggtcaagagaaggagactctcatgtgtcaaggtttcacttgatgtcagtaatatgcaaagtgtgtaaaaggccaccaaaaggaggaacttctcacacttggcaactttggagtctgaacccatccattaagaactggggcaatattatatacaaaatgatgggcactttgtctcagaacacatgttgggggactcaatttaaagggcagttttctattaaatggagaaaaccacttcttcttagcctaatcacctcatctcaccaaacttataatgaaattatgacaatcatctggaagatagaagcctaagaataaatcaaaggaacgaaaggaagcaaagaaaaaaatattcttagggaagacatcagtaaaaagaatgccagaagaaagttaccaagctcctgccgaagtccttctcaaaaagaaaaaaactcatgtaaatgtcagtaaatgtcaaggaaaactaacaaagaaaatgaaaatgagttgaaaattttcagtgcacaccatattggtaacataaatgcaatcagaaacaaacaaacccaaaaccaagaaacagaacatgaaaaaaatagcaattaagtacatttttatcttagaaaagtgagaacaatttttcgacaattaactgaataagagaagaatgatgaagatgtggaaagaggaattactagaatttcatctaacatatttgtcttctagacagttttatgtatataaataattcaagtttagaccaaaatatatatttaataacataatttcctaagaaatgttaacttgttagtagcttattgaagtagattattaattttgaaaattcttttttttgtcaggctaaataagatgcctttaagtgaaaacattatttgtataattagtggtaaactatgtataaatcctaaaatgttttttttttttttagattttatttatttattcaagagacagagtaacagagagaggcaggggagagagagtaggagaagcagggtcccctcatgagcagagaccctgaagtggggctcaatctcagaactctgggatcatgatccgagctgaaggcagacgcttaaccaactgagccacccaggtgcccctgaaaaggtctttttagaaaatgtcactgactgagactgggtataatcatttgcaattcaaattatttctaattctttgactttaacaaactttaatttagctgttaattggtaggactttccaaaatagctttaaaaatctatcgtcttggattttatcatttacttcagaaggtcaaagtagtaagttatgagctttaactaaaatctttctatttccagtaatttacaattaagcagagaatttctcagcacataaatcttttaaaaacaaacagaaaatataatgtatgttgattactgactcatatatttggaagaaatgaaatttttaagatgagttatagaggaaaatgaatgctgattgtataaacaaaatgttagaagagtgtgttttaaacactcattttattttttccctaaaatgtggctttatgctttattgacatcccttaggaaacttccgtggaaatttcaaaagattagctcacttattaaattgacattttgtaaaaagcagtaattgaaaggatacaatcatatccttatacaatttatatgattccaagattttgtgtatgtaggacttttaattgtcctacattctcttttttaagagtttatttaaattcaaattagttaatatatagtgtaatattagttttaggtgtatgcttagtgattcagcacttccatacaacaccagctattcatcacaagtgcactccttaatccttgtcatctagttagcccatctccatgagttaccctctggtaaccaaaaatttgttatgtatgcttaatagtctgtttcttgatcacctctctctggcttttttatcccccatgttcatttgttctctttcttaaattccacatatgggaaatcatattcatctttctctgagtgacttactttgcttagcataatactctctagctacatcctcatcattgcaaatggcaagatttcattcctttttatagctaagtaatatttcatttgatatatatgtatatatctcacatcttctttatccattcatcagttgatggacacatggctatttccatagtttgactattgtagataatgttgtaaaaattagggtgcatgtatcccttagaattcatacttttgtattatttgggtgaatatctagtggtgtagttgctggatcataaggtagctctatttttaactttttgagggacctctatgctgttttgtagagtgcctgcatcagtttgcattcccactaacgatgcgtgtgggttcccctttctccacatccctgccagcacctgttgttacttagattttagccacttgacaggtgtgaggtgggatcccattatagttttgatttgtatttcccttatgatgagtgatgttgagcaacttttcatgtgtttgttggccatctgtttgtcttcttcatctattcatgtcttctgacaaattttttaattgagttatttatttttttggtgttgagtcatataaattctttatacatttgggacactactcctttatcagatatgtcatttgcaaatatcttcttccttttcactttttgtttgtttccttcaatgtgcagacgcctttcttttgatgaagtcccagtatttttgcttttgtttccattgcctcagatacacatttagaaagaagttttggctgatgtcaaagaggttgttgacttggttcccctcaccaattttaatggtttcctatttcatatttcggtcttttgtccattttcaatttcaattaatttttatgtatgatgtaagaaagtggtccagtttcattcttcttcatgttgccatccagtttttacaacagaatttgttgaagagactgtcttttttcttttggatattcttttttgtttgtaaaagattaattgaccatataattgtgggatcatttctgggctttctattctgttccattgatctatgtatctatttttgcaccagcatcatactgttttgttcagttttgtaatataacttgaagctcagaatcatgtttccaatttgcttttcttttttcaagtttgcttcggtatctggggtgttttgtcttatattcttttttttttaaagatttatttatttatttatttatttatttatttatttatttattcatgatagacatagagagagaggcagagacacaggcagagagagaagcaggctccattcagggagcccgatgtgggactcgatcacaccctgggtggaaggcggcggtaaaccactgggctactggggctgcccttgccttatattcttggaggaaatctctttggcatgtatatccactgtgtagtcctttttccatcttctttgtatttgatagtctaaaacatctattaatactcatctctgtctcccacattgtaacttttctaaatttagatgcctgttagtacaattttcttcacagaaaaaagaaaataatgtcatctcatacccatcttgtgagaaaaatctcatcatttctaaattacatagtaggaaaggaagaggaagcaatgaagagggttctaaatcaagtgaatccttcttggataaaactaacacattagaactttaaaaatatttcagctttacacacatcttactaatgaattcatttgtcagaaagatgatgcctccttgattgaaacaagacaaatgaaagagacaataatggaaatattgataggaagagacgatgatttggaaaggtaagatactgagacaaatcataaaatgatgtatacatttgaattgaggtagatgatcattatgacaaaggcaagggtacaaaaaatatatgagaaaatgacaaggtacacaatggaatacattactggtatttgttttattttcattctcctctaaaataaaaggaagaaaaaacagtttattccaatgaaaacacaatgtcaggaaaggaggagatcaaaaattggaacttgtttcctaatttactctgtggtccaagtggactcgtatttgttgaaattggaaccttgaggttccagacgatatttcaccaatcagtggcaatgttttacatccttctaccccttccttcaaaaggaactaaattagtaaataaactatgagagcagggaggacatgtcttcatctggaattcacaatatcaatcattcctccttcactggaatatcacctattttagataaaatgaaaatatgtatatgtatgtatatatatatgaaaggtacttaactgtgatgaaaaaaaaatacagtaaaggcacccatctgtccaaacctgtacattgtaggtagtcacatgacacctagaatgtacattaaaaagatattttcctaaatcccattcccgaaatatcaacaatataattaaaattgtcattataaagagagaatattaaaattagaatgattatattaggcttttttcagaaacctcctaggtcaattatttcttttgtccacataaaataattcataattaagatgttactttgaaatattcttaagacatttagtccttctgccaatatttatttatttatttttattatttattttaatgtttcaagtttttatttaaattccaactaattaacatatagtccaatattagtttcaggaatagaatttaatgattcgtcacttacatataacacttagtgctcatcacaacaaatacactacttaaaacccatcacccatttagcccaatgccatgtcgacctcttctcaagcaacccccatttttcccttaagagtcccttttatggtgtgcctctcttctttgttttcatttccttacattcatctgctttctttcttagattccacatatcagtgaaatcaggtacattttttatattcattcatcaattgatggatgcttgggctttttccataatttggctcttgatgataatgtgctataaaacattggggtacatgtgccccttaaaatcagtattttttttttttttagtatttttgtatcctttgggtaaataactactagtgtaattactaggttacagcatagttctatttttaactttttgaggaacacccatctatttttttaaatttttatttatttatgatagtcacacagagagagaaagagagaggcagagacacaggcagagggagaagcaggctccatgcaccgggagcccgacgtgggattccatcccaggtctccaggatcgcgccctgggccaaaggcaggcaccaaaccgctgcgccacccagggatcccaaggaacacccatctagactgtctgcaacagtttttattcccatgaacagcataagagagttctcttttccctgcattcttgtgaaatttgatatttcctgtattgttaattatagacattctgacaatgtgaggtggtatctcaccatagttttgatttgtatttctctgatgataattaatctttagcatcttttcacgtgtctttttgccatgtgtcacctgcatgttggcagaggaatagtatacatcaaggagaggggtggtaatggagggcatacagattaaaatgcaggaaatgttacagacacccaagaaacctatcattttgaaggagatcaaaagtaatggaatatcaaaaattaatatttttccctgtagtcatagtgaaaaaacaaaagtacaaatggaaagatcaatgtacaaatggtgggagataaccacaaagaaaatttgaattggctgaaaaatttattttaaattaaccctataagatttcaggtgaacactcagagaggcatacaacaggggtgcagagatcactgctttctagagatattcactggtaaataaaggataggagaatagagttaatttaatgaattgacaaaaattttaggagtttagttctggttgtttaatttataaaaatattcttcttccttttcacagtgttttggttcctatttatccagtttgttagctttagagtggccattagctgctttaaatatatttgttaaatctcagtattgcagtagctacatcatataaagttcccacaaatactgtaaaaggggatactgaaatattgttcacataaataatgtgaggtcatgttttggggtgcctctattcacatttttgtccactgattaattcacagccttattttatttgactatgttaactcatggctgaatgaagatcatcttaactaaataacatggttgcaaaatccaggaagccaaatgaacagggttctcagaaagattctgtttctcaccagagttatactatgccttcctcctatgtgagagaaaccatatagacacatatatatgagaaaggttttctaaacattagaaatgagatatgattaaagccctatatctgctaatgattgtttttgcaaaatggccaagtcatgtccattccctatttaaggaatcacatgaaatccattccattgaataaatatcattgaataccatgtgatatgtagggacatgaagatttaaataattcttgtggtgagatactgaaattggtgtagaaatatcttagaacataaccttagacttcagagatatagtatcaatgagattaattggatgaaaaatgcttgcatggggcacatgggtagctcagtcaattaagcatctagttcttgattttggaggtcatgatattagggtcctgggattgagccccacatcagaatccacgctcagtgtggggtctgtttgaggattctctctctcgctcttcctctgcccctctctcctctctctctgataaataatttttaaaaatgtatgtataaagatccccaaaaacaatttattgaattactaattgaacagataaaagtgcaagtgaaagaagagtaataagtatggttgagtgagaaaatacccagttatagtcatgtaaaaatatttatataggtctgatcacttgataatatggtcaaggggagttcaatagcaagtctcagggttatacatgaatacagtatgttcagagtgtttaaaaggccaatggaagaaaaaaaaacttaactcagaaactttggaatctgatcctttcagatttaggatattttcatattcacagtacagggcactccaattcaaataacatgtgggaaaatcaaagtgaaatggtgttttctagaatatatcctgtattcaaacaagcacattcttcttaacctagtcctttgcatctcacaaaccttaaaatgaaattataataagtatctggaagatagaagacgaagaatatatggcaaataaaggaaaggaaaggaaactggtggagagagagaatgattagggacattaatattggagaatttcaggaagcacaaataaagtggagaataattgaaaattcaagaaaatgaagagcaaagatggggtgggtaatgagttaaagaattagaaaatgccaagaaaaaaatcatttctatacaatacattaccaaaggaatgtgagtctgaaaaaatttaccaatttttccatgaagttctcctgaaagagaaatggagaaaacttttaaatgtaaaggcaaataaacatggaaaagtcagatgattggaaaactgccaatgcagtgcaacaatcattgcaataaaatggaccaccaaaggaataagaatctgaaaataattaccaatttcttccagaagtgctcctgaaaaataaaatggagaaaattttgtaaatttgaaagagaataaatatggaaaagtcagatgattggaaaacttccaatgcagtgcaacaatcattgcaataaaatggaccaccaaaggaatatgagtctgaaaataattaccaatttcttccagaagtgctcctgaaaaataaaatggagaaaattttgtaaatgtgaaagggaataaatatggaaaagtaagatgagttgaaaattgccaatgcaacataaatttttaggatgaacataatgagaaaaaagtaaacaaaaagcacacaaaaaacctgaaaaatttgcaagagagcacatgcttatcctcataaaggaggaaaatgagtgaattttctgaaataagtaagtactatacaaatgttgaagtgtcaggccacctagaatattatcccacacttatgtccttatagatggttttaggtttttagggaattcaaggtttggaccaaaatatgtatttaataaaataagataattttataaaatattttactggtagtggtcttttaaaattaattttataattttgtcaattactttgacaagtatacataagcaagttgtcattaagtgaaaacaaaacttgtataaatagtaatcaacctataaatcctggaaaagtcttttttgtggatattaaaatcatcgagaaatgaatggctgtaatgtgtggacacagatttttctgtaagtcttatggtttctaattctttgagtttaacaagtgtgctataacttaattgtcaatatatagaacttttaaaacaagctttggtaaacactgaatttttagtgttgaactcagaagaaatggaaagaattgagtgacattgctttgctctaacccattttctcccccattctaacatatattgctaagcaccaattgcttagcacctgtatctcttataaacaaaggagaaataagtggactaaaattgatgctgaaattgatttgagggaaataaaatatgtgttaatggtaatataagaattctataaatatcctgagtgctatagaaataccttcatgtatttttaagttgagcatagtgtatataaaataaaataaaacagtgagtgttgagaaaagctctctcgtgtacaaaatccttcaacctctactgtttttggtgttaattcctctgcctgactcttttcccatctttcttgcattgtttggatcctcacttcacctataaatccttatctctatctcccagttttagatattcttaaattatatacctcctggtctaattttcctcataagaaaaacagggttgttatcacctctatccattggtggaaagaaaatctaactatttctaaaccaaataacttaaaaagaaggaaaataaagcattacgtgatgagaattcagttcaaaactaatgacctaaccttacgttgggtgatatatatctgacaaacaaaagtactatcatttacacatgccttataaataaaatttacctagcagaagtgatttgcctacataaatcaaagggtaaaaacatatggaagtaataatgagggaagttgaagtataaaacaaaactgcaaactttagctggaaagataaaataatgaaggaagatcaagaaaaatatgtgtatcttggagttgatcaagatgatgatggagagttgaagacaaaggtacaagaattagataaaacaaagacatacacagaataataagttaattaaatttgctttttacctacttatctaaacacagaagatgaaccaattcatgcaaaaagaaagactaatattaggaagggaggagggaaaaacttgaaacacttctatggtttccttctggtgcaaactgactgacatttttgagaactggaaacattaagctccaaaggcattttcgccaacaataggtaattttagtttatcattctcactcctttaaaaagtacatttagcacttattttaagaaaatttgacccagggatccctgggtggttcagcagtttagcgcctgccttcagcccagggcgtgatcctggagtcctgggatccagtcccacattgggctccctgtatggagcctgcttctccatctgcttctttctctctttgatttatgtaggtaaatcacttctgtgaggtaaatttttttagtaatgcatgtgtgaatgatagtatttttgtttggcagatatatattaccccaacgtaaggttaggccattagttttgaactctcatgaataaataaataaaatcttaaaaaaaaaaaaaaaaaaaggaaagaagacccagtgaaatggtacataggactttctctgggatagccagtgccgaattattcattttgcattggccttgtaccattttgaatataaagcacaacatatatatgtgagataggttttccaaaagtgttaagtaagcatgcaataatgacacttagccaccaataattgtatctttaggattattcataacatctttgctatataaattcagatgatatcttacattctaatccttgtgaaaacataaataaaatgggaaaaatatataggtaagaagagatattaaactttatgactattttagggtcttattagagaatttggtaggaacattggatagtagattctcatgtcactcacattaaaaaaaatcagatttagaaatatcaatgaaatttccttgagaaacaaaactcctgtacaaagattcaaaaggatggcgcttgcaaaattaatccctgggtaaattaaaatgtaaagaaaaagtgtaattataatggctggaaagaaaaaaaccaggcaaaattatctaaaagtacttacacacatgagaacacttgactaatgattaatggcaataaaagagttgactaatgattaatggcaataaaagagtgagcctcagtctcacacttgacagtgaataacgtcagaatttacagaaggaaaagggatcaacgatttaactcagtaactttggagtgctcgtccatctcttaaagatggaggaagtatcatttgtatagtaatgagcacccctctctggaatacatgataaaggacttaagtaaagtattgtcaataaatgtaattgaacgaaaaccatgtggttgttggataaattcctttatttcaccaacttcataatttttacacactgacaaggcatagaatgaaagaaagagagatataggaaaagatggaaaagacaggaaaacagaagcaaaggaaacctaatatgggaaaagtgcagaaaccaaacaatggggagggaaagcagacattcaagagaaggggaagcaaagggatggcatgcaagtgaaaaggcaagaaatgccagtgatgagaggcatcatagtgcaggactaaagggttgtcagaatatttaccattacttttctcaagttctgaaaaacaaaacaaaaaattaatgttttattaacataaatatcaaagtaaacataaatgaagaaaattaaaatttgttaaaaattaagaatgtaaagtaaaaactaacaggatgctgcacacaggcacacacgcacacagacacacagtcatcaccttgctagcaggagaactcattttgacttacataatgttctccagaaactaaaaaaaggcagaggaaagagtgatgattttagtgaattatacagttaatgaggaatattatttctagtggttacattttatggattttttttataatgttattattctttcttactctaacatgttctttaactctatatatacctttctgtatttgtagataacacatgcacacacatatatataaacatatgttctttctctatatatgtgtatccatacaaatgtaatctcaccaattacatgtctattcatatgaacatatgttgtacatatatacatatatatgtacatatatatacagctacatagtaacaagtagtactcttttgtcaactcttggtatatgattttgtaattcatcgcaagaaattagaaagaagggacacctgggtgactacagttggttaagcgtctgcctcaggctcaggtcaggatcccagggttctgggatcaatccctgtgtcaggtgctctgctcaacagggaccttgtttctccttctcctccccacttgggggctttctagctatttctgactctctctcaaatcaatcaatctttaaaaaaataagttagaaagtgaataattccaatgaatacatacaaatcttttttcagctctggtcactttcacttttttacttcagaaaatattgtaagagtatccaattgaattatcagttaatcctcacaaataattatttgatacaaataatcactaaagaagtttgagtatttaaccagaaaaaatgttaaaggtaaatggtattgtcataattttattcttccttcctccctcacttcatccttctgttcttccctttctactttcttttcaattacttattctcaattatttctgtgtctccaagctttactttccccatgtcatgatggtgaccattatcatattgaagtaaactaatgaaaagagaaaataaaaataaaataaaataaaataaaaaattaaagaaaataagagagaaaattgataggaaaggaatgagagtgaagaaagaaaaagaagggagaaaattaattgaagaagcagaaatagggcagcccaggtgactcagaggtttagcacctgccttcagcccagggtgtgatcctggagacccgggagacctgggatcgagtcccatgtcaggttccctgcatggagcatgcttctccctctgcctgtgtctctgcctctctctctctctctctctctctctctgtgtgtgtgtgtgtgtgtgtgtctcatgaataaataaagtaaatctttaaaaaaaagcagaaatatttgtaaaacagctgtgttattttcactttggaagaaaccatccacattatggagatttaaaaaatctaaggagaaataaacaagaatgatgcagatgtcagtgctctctttcatcaatggatacatcatctagatgtaaaatcaacaaagaaacattgggcttgagctacactttatatcaaacagacttaagagacatatatagatcatcccattcaatagtaccaaatgcacatccttctccagtgcacaagagacattcttcaggatagatcatatgttaggttataaaacaagtcttgacaaatttatgaaaattgatagcatatcaagtatattttttatcacaatgatatgaaactacagatcaataactggaggaaagttaacaaattcacaaatacaaagagagtaggcaacgtgtcctgaaaactcaattggtcaaagaggactaaagaaaactcacagaatttcttgagatattctcaaaaatggtgagaaaagggaatcacagcatatggaaacataagggaaatagcaaaagccagtcctaagaggaaaatttagtgatcagtgcctacattaagaaagaagaaagatcttaaataaacaacttaacttgaaacttcaaggaaatgcaataataaactaaacccaaagttagtaaaggaaggaaataataaaaaatcataccagatataaatgtaataaaagcaagaaaaacaacagaaaatatcaatgaaactaagagttggttttttgggaaagataagcaaaattgacagatgttacactatcttaaaaaatgggagacttaaatgaataaaattgtaaatgaaagagaagacttcacaactgatacaacagaaatgcaaaagatcatgagatcactatgaaaaacaaattggataacttagaagaaatgaataaattcctacaaacatacatatgaagactgaaaaatgaagaaatagaaagtctgaactgaccaataatgagtaaagagattgcatcactattcaaagccctctcataaagaacagcccaagacctaataattttacagatgaactttaccaaatgttaagctaaaaattaatgtcaatccttctcaactcctctaaaaaattgaggaagtgaggacaattgcaattttatttttcaaagccagcattatcttcatataaaggcagaaaaggacactataagaaaattctaggtcgatatccctgatgaacataaatacaaaaatcctcaacaaaactagcaaactgaactcaacagcatataataaaagtcagaaaccatgatcaaatgggttttaccctgggatgaagggagatcagcatatgcaactcaataagcataatataccacgttaacaaaaataagtataaaaatcaggtaatcatctcaatagatgcaaagaaaaatacatgacaaaatccaacacctcttcatgataaaaactctcaacaagttaggtacataaaaatgtacctcggttttataagggccataaatgagaaacacacagctaaactcatactcacaggtgaaaagctaagagcttttcctatgagatcaggaacaacagaaggatgcctttagtcaccacttcttttgaatataatacgggaagtcccagctaggcaagaaaaaaaagtcatcaaaacctgaaaggaaaaaataaaacattctgtttgcagatggcttgatatgatatgtagaaaaactcaaagaccaactaaaaatgtttagaactagtaaattcaataaatttgcaggatgtaaagtaaacatataaaaatctgtcgtgtttctatacactaacagtgaactatttaaataagaaattaagaaaactaatgtctttacagtagtatcaaaaagaataaaatatctaagagtaaatttcactaaggaagttatagatgttttactgaaaaccataagaaattgttgaaaagatttaagtagacacaaatgagaaaatatcatgttcatggattggaaaatttaatattattaaaaagtacatattacttaaagcaatctatggatatgatgcaatccctatcaaaattccaatttcttttctatttctatgaaaaaaatcctaaaattcatatggaacaacaaaaaaactgaatagctaaagatatgttgagcaaaaccaaaaatgaaaacaaaacaaacagaaaacctaacaagaggcatcacacaacatgagtacaaaatatactgcaaaagtatagtaatgagcggcctgctttcccgccacggtggatgcagtggccgcagcccaggagcagctggcttcccgcgcggtggcggaggacgctggcggcgcctgggagaggagttgacgataactttcaaatcatcctgaaaacctacgaattcggcctgagatttaaagagagaccagctggaatgttacagtgagaagagttcgcgcttctatcaaggagggaagacagaaaaaaataaagaagtaaaaaagcatccaagggggaggggccctgcgaggagcagggctaaggccggcggtgagagcctccaggacaggggagccccgggagggaaagccgctggggctcccaggagggcggggatgccctcaggctcccaggggcactaacagagcacctgcgccccagggagagcgcgccacaccccacggccgagctccctaaagggctggagggcgcgcccggtggggccccgggagcagctcaggcagcggctcaggcggcggctgcgtgcggagcgggctgcgcggccccgggagcgggattccagcggcgccggcgcccgtcggggaccgcagggcaccgggggacacagcccaagatccagcgctgcccccgggacgggcggaggtcgagaggacacaaggcagcaaggacgctcctgctgcagggggccggagctgtgcagatcaccgccaccaccccaccccgcccccgccccggagcatccaagcccctgcggactgggagctggtgtaattactaagggagctgactccagagttggagagctggctgccgacactgttgttcctcctggtgtcaccttgtacctgggactgagcagaggcctcatagggataaagagctccaactgagccgtgcatctggcagggggctgggaaactcccccaggtgcacaacctgagaatctgcacagcaggcccctcccccagaagagcagctggaaggacagggaaaaagcaagttattgaccaagcagcactggaaagttccaggggaagtcgagggatttacagtatatagaatcagaggatactcccccttgttttttgctttctgttccccccctcaacccccttttattttctttctctctttttctcctttttccagtacaacttatttttggccactctgccctgagcaaaatgactagaaggaaaaactcaccacaaaagaaagaatcagaaacagtactctctcccacagagttacacagtttggattacaattcaatgtcagaaagccaattcagaagcacaattataaagctactggtggctctagaaaaaagcataaaggattcaagagacttcatgactgcagaatttagatctaataaggctgaaatcaaaaatcaattaaatgagatgaaatccaaactggaggtcctaatgaggagagttaacgaggtagaagaaccgtgagtgacagaagacaagttgatggcaaggaaggaagctgaggaaaaaagagaaaaaagatcatgaggataggttaagggaaagggacagcctcagaaggaaaaatctacatttaattggggttccagagggtgccgaaagagacagaggtccagaaactgtatttgaacaaatcatagctgagaacttccctaacttgggaagggaaacagggattcagatccaggagatagagagatcacccctaaaatcaataaaaaccgatcaacacctcgacatatatatatttttaatttttttattggagttcaatttgacaacatatagcataacactcagtgctcatcacgccaagtgccccccttagtgcccatcacccagtaacacctcgacatttaatagtgaaacttgcaaattccaaagataaagaaaagatccttaaagcgggaagagacaagagatccctaacctttatggggagaagtattagattaacagcagacctctccacagagacctggcaggccagaaagggctggcaggatatattcaggatcctaaatgagaagaacctgcagccaataatactttatccagcaaggctctcattcagaatagaaggagagataaacagcttccaagaaaggcagaaactgaaagaatatgtgaccaccaaaccagctctgcaagaaatattaagggggactctgtaaaagaggaagtccaaggaagcaatccacaaaaacagggactgaataggtatcatgatgacaataaattcatatctttcaatagttactctgaacgtgaatgggcttaatgaccccatcaaaagacgcagggtttcagactggataaaaaagcaagacccatctatttgctgtctacaagagacgcattttagatgtaaggacacctacagcctgaaaataaaaggttggagaaccatttgccattcaaatggtcctcaaaagaaagcagaggtagccatccttacttatatcagataagttaaagtttatcccaaagactgtagtaagtgatgaagagagacactatatcatacttaaaggatttatccaacaagaggacctaacaatcatgaatatttatgccccgaatatgggagctgccaagtatatcaatcaattactaaccaaagttaagacatacttagataataatacacttatagttgctgacttaaacacaatactttctacaatcaacagatattctaagcacaacatcctcaaggaaataagagctttaaatgatacgttggaccagatggatttcacagatatttacagacctttacatcgaaacacaactgaatacacattcttctcaggtgcacatggaactttctccagaatagaccacatactgggtcataaatcaggtcttaactgataccaaaatattgggatcatcccctgcatattttcagaccataatgctttgaaactagaactaaaccacaagaagaagtttggaaggatttcaaacacatggaggttaaggaccatcctgctaaaagatgaaagggtcaaccaggaaattaaggaagaattaaaaagattcatggaaactaatgagaatgaagatacaaccattcaaaattgttgggatacaacaaaagcagtcctgaggggaaaatacatcgcaatacaagcatccatccaaaaactggaaagaactcaaatacaaaagctaaccttgcacctaaaggagctagagaaaaaacagcaaatagatcctacacccagcagaagaagagagttaataaagattctagtagaactcaacgaaatcaagaccagaagaactgtggaacaaatcaacaaaaccaggagttggttctttgaaagaattaataagatagataaaccattagccagcctaaaaagaagagagagaagactcaaattaataaaatcatgaatgagaaagaagagatcaccaccaataccaaggaaatacaaacgattttaaaagcttactatgagcagctatatgccaataaattaggcaatctagaagaaatggatgcgtttctggaaaatcacaaactaccaaaactggaacaggaagaaatagaaaacctgaacaggctgataaccagggaagaaattgaagcaatcatcaataacctcccaagacaccgaagtccagggcctgatggcttcccaggggaattctatcaaacgtttaaagaagaaaccagaattattctactaaagctgtttggaaagatagaaagagatggagtacttccaaactcattttatgaggccagcatcaccttaattccaaaaccagacaaagaccccaccaaaaaggagaattatagaccaatatccctgatgaacacagatgcaaaaattctcaacaagatactagctaataaaatcctacagtacattaagaagattattcaccatgaccaagtgggatttatccccgggatacagggctggttcaacactcgtaaagccaacaatgtgtttgatcatatcaccaagagaaaaaacaagaaccataggatcctctccatagatgcaaagaaaacatttgacaaaatatagcatctgttcctgatcaaaactcttcagagtgtagggatagagggaacattcctcgacatcttaaaagccatctacgaaaagcccacagcaaatatcattctcaatggggaagcactgggagcctttcccctaagatcaggaaaaagacagggatgtccactctcaccactgctattcaacatagtactggaagtcctagcctcagcaatcagacaacaaaaagacattaaaggcattcaaatcggcaaagaagaagtcaaactctccctcttcgccaatgacatgatactctacatagaaaacccaaaagcctccatcccaagattgctagaactcatacagcaatttggtagcgtggcaggatacaaaatcaatgcccagaagtcagtggcatttctatacactaacaatgagactgaagaaagagaaattaaggagtcaatcccatttacaattgtacccaaaagataagatacctaggaataaacctaacccaagaggtgaaggatctataccctagaaactacagaacacttctgaaacaaaatgaggaagacacaaagagagaaaatattccatggtcatggattggaagaattaatattgtgaaaatatctatgccaccaattaacatagacgtgtaattaacatgttcagtgcaatccctatcaaaataccatggactttcttcacagagttggaacaaataagcttaagagttgtgtggaatcagaaaagaccccgcatagtccaacgagttaaaaatagatctgccctacgacccagcagttgcactgctggggatttaccctaaagatacagatgcggtgaaacgccgggacacctgcaccccgatgtttatagcagcaatgtccacaatagccaaactgtggaaggagcctcggtgtccatcaaaagatgaatggataaagaagatgtggtctatgtgtacaatggaatattactcagccattagaaacgacgaatgaatacccatcatttgcttcaacgtggatggaactggagggtattatgctgagtgaagtaagtcaatcggagaaggacaagcagtgtatgttctcattcatttggggaatataaataataatgaaagggaatataagggaagggagaataaatgtgtgggaaatatcagaaagggagacagaacataaagactcctaactctgggaaacgaactaggggtggtggaaggggaagagggcgggggatgggggtgaatgggtgatgggcactgagggggacacttgacgggatgagcactgggtgttattctgtatgttggtaaattgaacgccaataaaaattaatttattaaaaaaaaaaagaaacgacaaatacccaccatttgcttcgacatggattgacctggagggtattatgctgagtgaaataagtcaatcagaaaaagacaaacattatatggtctcattcatttggagaatataaaaattagtgaaaggaaataaagggaaaagagagaaaatgagtgaaaatatcagtgagggtgacaaaacatgtgagacaccaaacatgggaaatgaacaagggatagtagaagggggtgtgggcggggcgttggagtgattgggtgatgggcactgaggggggcacttagtgggatgagcactggtattatgctatatgttggcaaattgaactccaataaaaaaaaattttttttaagtatagtaatgaaaactgcatggtactaagataaaacagatatagaccaatggaacagaatggaaagccccaaaataaatccacacttttacaataaattgactttgaagaaaaatgtgtcaaaacatacaatggggaaggatagtgccttttgtgttgcaaaaactctatatcttcatgcagaaaataaacttcaaccttttcttgtaccatagaaaccaacttgaagtagaataaagacttaaacagaagacctgaaactgtaaagctaccataagaaaatgtaggggaaactcttcttggcattggtatcagcaacgaatttttggatatgacctccaaagcacagacaaagtaacaaacatagacaagtggcattgtaccaactaaaaagctttttcatagtaaagcaaacaatcaatagactaaaaattaacaatttatccacattcttaccaacagttgttaccttatgttggtgggattataagctggtacagccataaaaaaaagagtatagaagatcctcaaaaatttaaattaagagataaggaagatgacatagtaggaggaccctgaacttacctcatccgatgacatacccaggtaacatctacatgtatgcaactctgagaatgacctgggaactggctgaacagatcatggagacaaagccacatccagaaaagttaaaaaggttgaaagatctggctaggaaccaaatccccagcctgaccaaccgtaaactaaaggaacatcagaaggcacagaaaactgagattacacctcacactgggtacccatggccctggggacccatactgggaagatgagtccctataatatctgggtttgaaaaccagcaaggtttaactcttggaactttaaaaatcagcaggctgaaccttaggagagctggagtccaataggaaaccaagttcctgccatcaaagagcaagcatactaaataattaagcaagagacatagcatagatacagcagttagaaggatatctgggatatacctgaaggagatttattgactaaacttataatgtgtcctgcaggggcaggaatctacagaagatttctcagggagcaaaagaacctgtgggtattattttttctcctctttccccaacctagacagtcagatacttgtggtagctcctactaatactctctccctttttagcaccataagcctcaccctggcatgccatgcatgcctaccacatgtttttataagccatgtacctgcaagtctgaagtattttaagtccaggccatcgccaggatcattcctagtgggcttagtgatgctcctgttgggaaggagggcagaatacgagacctcttgggtcacagggcaaaaaatgattctaattattgagatgcaattattggagtggtggcatggcctctcaggggacaaatggttggcaggtgtcaagatgctgccctggtcactagtataaaaacagagatcctgtgtgggcagtaaatctaagagtcagccgtctgctattctttactatagactctgaaccactgtgtactcactggagtgcttttctggggcaaaccagcacccaccacagtgcagcaagaccctcccctgggggattagtgcaggtccatgttgcaccaggtccctaaaatttggggttttgaaacccagctgcactattgagataaagcataagagtacgctacctgctaagtaaactggacacagacagggtgaaggtggggatctgaaggaacctaatgacacaaagaggggagctgatctgccatttggtgagggatttctgaagagtggcaggtgtgaagtccctgtttggggacaggagactgtggtaatgccatttccccccagcccatcagcactatcatcagaacaacttcagtgagcaacatagcatccccagtggagtctggagctgcttacaccatgccttgccccccttgcaccctgcaggtgcatctcccctagggcaagtctgcctgagattcagcacagcaagctctcccacagaagaccggcacaaacccctcacatgcaccaagtctactgacctttggctgctgcaatcttcaggaaacagaatctagcctcttttaacaagcagaccaaaaatatccagttaaaacctgccacacagaggaaaatgtccaaacaacccccacagcaggcaagaagagactctgcagcagtctgagctgagagaaacagcagccaaaacacaatagcagagtgcacactctgaaacacctcctgaagcaccaggctcaaaacagtgtaggacctctcaatatagccattactctcaggagcaggaatataacaggcttttataaaatcacataaaaaagtgacctagacaaaatgacaagatggaggaattcatgccaaaagaaagaataggaagaaatcatagccagggatttaatcaaaattgatataagatgcctgaaccagaatttaaaacaacaatcataaggatactatgtgggtttgaaaagtatagaagacactgaagaatcccttactgcactgcagagataaaagagctaaaaactagtcaagccaaaattaaaaaaaaaaattctttacctgagatgcaaaactgactagatgcagtagatagatgcaatgacaaggatgggtgacacaagggaacaaatcagagatatagatgatcaaaatatggagaataatgaggctgtaaagaagagggaaagaaacattgaatcataaatgtatactaaggaaacttagtgacaccttaaggtataagaacagtcatatcttatgtgtcccagaagaagaagagtggaaaagggggccagtatttaatttgagaagattataactgaatacttctctaatctggagaaggaaatagacattaaatctgaaagacagagaactcccatcaaattcaacaaatactggcctataccaagtcatatagataaaattccacacatacaagaaaacaatcctgaaaaaagcaaggaggaaaaagcttttaatccacagcgggagataaatcatgtttgcagtaggtctgtccacagaaacttggcaggccagaagaaagtagcataatatattcaacgtgcagaatgggaaaaataagcaacaaagaattctttatccagcaaggctgtcattcataataaaaggagagataaagagtttcccagacaagcacaaactaaagttcttgaccatgaagcagccctgcaagagacattaaagaatgccctttgagtggggaaaaaataaagaagaccaaaagcaaaaaagactggaaaggaacagagaacatcaccaaaaacaccaactgtatagctaatacagtggcactaaattcatatctatcaataatcactctgaaggtaaatggactcaatgctccaatcaaaaggcatagagcatcttaatggataaacacacacacacacacacacacacacacacacacacacatacacacaagacttatctatatgctgtctacaagaaacttacattttagaccaaaagacacctgcagattgaaggtgagaggacagaaaaccattgatcatgctaatggatgttaaaagaaagttggagtagtcatacttatatcagacaaactagattttgaaacaaagactgtaacaagatgaagaaggggtctatcaatcaggaagatgtaacagttataaatctttatgtccccaaattggaagcacccaaatataaaaatggatcaataaacataaataaatacattgataataatacaataatagtagaggactttaacaccctacttacagcaatggacagattatctcagcagaaaatcaacaaggaaacaatggctttgagtgacacactagaccaggtggactaaagagctatattcagaacatttcatcctaaagcagcagaatacatattcttttcgagtgcacatggaaccttctccagaacagatcatatactgggtcacaaatcagatcttaactgctgcaaaaaagattgagatcattccatgtatattttcagaccacaacactataccacaaatataccacaacacagtggtatatttcagaccactgtgatgataaccacaagaaaaaatttggaataaccacaaatacatggaggttaaacaacatgtcggtaaacagtgaatgagtcaacaggagatcaaggaataaatttaaaaatatatacaaacaaaactgaaaaaatgatcatccaaaaactttgggttacaacaaaaggtgtcccaacagggaagtatgcaatgcaggcttacctcaagaagcaagaaaagtctcaaatacataacctaacttcacacctacaggagctagaaaaacaatagcaagtaaaacctaaagccaggagaagaagggaaataataatgattagagcaaaaaataaatgatatagaaacaaaaaaaatggtagaacagataaacgaaactaagagctgattttttgagagaatcataagccaatatcctgatgaacatggatgcaaaattcttgacaagatggtaggaagttgagtccaacagtacatttaaaatggttcaccacgaccaagtgaaatttatttctggcctctatgcagggttcaatatttgcaaatcaattcataacatataccacatttataaagctggtggtgtcataataccggacttcgatttatattacaaaactgtagtcatcaagacagtataatactgtcacaaaaacaggcacatagaaatggaacagagtaggaaactcaaaaatgaaaccacaactatatggtcaacttatctttgacaaaagcagaaaaaatatccaatgggaaaaaagtctctacaacaaatgatgttacacaaactccgtagcagtgtgcagaataatgaaactgagccatgttcttataccatacacaaatataaattcaaaatagatgaaagacctaagtatgagagaagaaatcatcaaaatattaaaggagaacacagacatcaaccactttgattaacatgattaaattcttacaagacacatctctggaggcaagggaaacaaaagcaaaaatgaactatgataaaatgaactcaagataaaaagcttttgtgcagtaaaggaaaatcttgttaagattacaataatacccactatattccacaaaactaaaaggcagcctatggaatgggagaagatatttgcaaatgacatatctgataaagggtttgtatgcaaaacatataaagaatttatcatactcaacaacacacacacacacacacacacacacacacacacacagactaatccagttaagaaataggcagatgacaagaatagacattttcccaaagaaggccctcaaatggctaacagacacataaaaaatgctcaacatcactcatcatcagggaaatacaaatcaaaactacgatgagataacacctcacacctctatgaatggctaaattaacaacacaagaaacaacaggcattggtgaggatgcagaaaaagggaaccctcttgcactgttggtgggaatgcaaactggtatagccactttggagaacagtatggaagtttctcaaaaagttaaatatagagctaccctatgacctgtcaattgcagtaccaagtatttatccaaaggacaaaagcagtaatttgaaggggcatatgaactccactgtttctatcagtaatgcccacaatagccaaaatatggaaagcacccagatgtccatcaatagatgatggataaagaagtggcatatatatatccaatgcaatactactcaggcatcaagaagaatgaaatcttaccctttgcaatgacatggatggaactagagggtattatgctaagggaaataagtcagagaacaattatgatatgatttcattcatatgtggaatttaagaaacaaagtagatgaacataggaaagggagggaaaaataagatgaaatcagagaggaatacaaaccataagagactctaaactataggaaagaaactgagggttgctatagggaaggagggtgggagtgtggggtaactggttgatgagcattagggagggcacgtgatgtaatgagcactgggtgttatatatgttctatgcaactgatgaatcactaaactctacctctgaaactgttagtacattatagttaataattgattttaaatataaaaataattaaaaattaaaataaaaaattttttcatcattcagtttgtaaatgttcaactaatatcccagtatttagtatggaaacaagaatcaccttatgcatcatgatctctgtgccacttctgcagagaagacacatctaatggactaaaggaggtaaactgcctgctatatgggctagaaaaagagatttagtatctaattgataattgttaaccaatcatactattataaatgcctctgctctcccaataatgatacaaaagaccgacaaggcattccaagaaaagaaaactacagaccaatatccattatgaatattggtgcaaattcctcaacaaagtactaaaacaaaccaaaatcagcaacatactaaaaggattattctggatgatacagtgggaagaactcccactggattataaggatggttcaatatacaaaagttagtgtaatacacaatattaatagaatggaagggaagaaaataaacccatgaacatctcagttgatgcagaaaaagtaattaagaaaaaaattcaaaaaaaattcaacacgttttcacgatactcaataatctaggaatgagggtgacttccttaacacaattaaagatatctgtaaaaaatctactactaacattatactcagtggtgaaagactgcaaggttttttctaaattcctgaatgagacaaggatggctggttttgccatttatattcaatatactgaaagttctagccagaacattagataagaaaagggaatataaggcatccgtattggaaagaaagaataaattatttattttcacagatgatatgttcttataataataaacacttgcagggggggaaaaacaaattcagcaaagttgcaggatataaagtcaacatgcagaattagtttcactaatatattaacaatgagaaatttaaaaggagataaagaaaacaatcccatttacaatagcatcaaaaagaataaaatattttttaaaagattgtatttatttgacagaaagagagagagaaagagaaagcacacaagcagtcggaacagcaggcagagggaaagggagaagcaagctcccgcctaacagagcccaatgtgggactcgatctcaggactctgggatcatgacctgagccaaaaacaagatgcttaacagactgagccactcgggcaccccaagaataaaataaataaaacttaacaaaagacctgtacactgaaaacttcaaaatattgttgaaaaatcaaagacataaataaatagaaagacatcccaagtttaccaactggaaggcttaatatttgttaagattacaataatacccactatattccacaaagtcaatgcaatccatacaatatttaggtgttctgttttgttttgttttgtaaagcagaaaagcatcctaaaattcatatggcatctcaaaataaccaaaacaaagaagatcaaaacagaaaaattcatacttcctgttctcaaaatttactacaaagttacagcaatcaaaacagtgtgatattgccaaaaggacagatgtatggaccaagatatacgacaaatatatgaaacaagaaaaggagttcagaaatcaatcaatctttatatatatggtcaattgattgttgacaaggtaacatggccattcacagggaaaaggacaaccttctcaagaatgatgctaagggggatccctgggtggcgcagcggtttggcgccttctttttagcgcggggcgcgatcctggagacccggaatcgaatcccacgtcaggctcccggtgaatggagcctgcttccccctctgcctgtgtctttgcctttctctctctctctctctctctgactatcataaataaataaaaattaaaaaaaatttaaaaaaagaatgatgctaagaaaactggatatttacatgcaaaagagtgaaactgaacctttgtcttctaccatacacaaaattaactcaaaatagagcaagacataataataagagctaataccatataacttttagaagaaaacatagagaaagtctttgcaacattgttttgataataaattattggacatgacaacaaaaacacaaacaacaaaatgaaaaaaatagatgaatttgactatatcaaaattaaaaacttttgtgcatttaaaggaaactatcaaaattaagtgaatgctcttttgggtaagaatgttattataggcataaaattatttttgcaagtactttttaaaaactaaaatgaccaaaaaataataatataaataaataaataaataaataaataaaatgaccagtatagtcaatgacaaccagaaacacaagaaatcaagaccacatgaaagaagtgcagtcactttggacgtttgatagcaccttaaaacagtaaacatataactaccatttgatccaggaattctgttcctagaaatatgccccaaataaatgaaaacataagtccacataaaaacttgtgtacaaatattcatactaatgttgtcagaatatccaaaaagtgaaaacaattgaaatgttcataaactgatgtcatatatccatacaaggaatattatttaccaataaaaataaatgaacatggataaaacttgaaagcgaaagaagcccatcacaaacaactgcatattatattgttccatttatatgaaatatccagagtaggcaaatccatagagacaaagagtagattaatggttgccaaaaactggaagaagaggaaagtggaaagtggctactcataattatgtttttttctttttgtaatgctaaaaatattctaaaagtaaatgtgcacccacaattaatatgtaacaactttaaatcccctatgtaaaacccctttgcatggaaatctggagtttcttttaatatttctgaaagaaaattgagatagacatttcttgtaattccaaataacataaaagagcagtgattagataaataatactatgggcccacagtttctgacccagaagaagtaattgtatttgaaggggcctcccttaataatagtgtttcttgcatgttttccttacccgttaaagtgcaggaaaactcttttgaaggcagctgcataattaaatgagccacatcattcttagggccaagaactatcagataattaaagaatcacagcaatattaaaagtcttaaagaagagtgggtaacatttatttatatccagctttgaatttgattagagaagaatgagagggtagaaatcacttgatcataatttgtttatcataaaatgtgcatttcatcctaataactctgagaagaattaataactaaaaggagaggcatcactccggtagattttaaaacagctataattacagaagcagaaaagaatgaagagtaatacttctctccatataccaaataaattataatgataagtataaaaaagtgaagccatgagaaaaaccttaaagtgaatacaggtgaatatatttctaacacttacgcttcctaaaaataatatccaataaacattatagccaaaattagccaaaattaacatacttgaccaaacaggaatattttgcaattcaaaagccatcataaagaaaatgaaaaagcaaatgacaagaatggacaaagcatatttttaaaagattttaaaaaattatttattcatgaaagacacacagagagaggcagggacagatgcagagggagaaggagggctccccatagggagcctgatgcaggactccagcccagaaccccaggatcatgacctgagccaaaggcagacactctatcactgagccacccaagtgcccctggacaaaacattttgaaatataagaaaaactaaactctaacttccttccaatgttaatatttgattatgtttaaggtatctaaaaattagtcactgaatcagatatctgagtacaaattcagcaaaaataaatctaccatttactgaatacatactatattttaaatattaggcattgtggtttttttctcataatcatccttaatcctcacagcagccctgggatataggtgttatttattcccactttataactataattcaaaggacttatgtgactttcatttaattcataaatatctggatatacttagaaataaggtttataatctatcacttaggtacactgactcagataaataatgagttaagaagtataagagggtcataatcacacacaaacatgcagacagcaactgtttatatttatgaaagtacaataaagcaggttgcactatgaaatatcatttgtatgtctacaattatattcatatctacatctatactatatatatactatatatattgtatcttcagggaagattcagggaaacattttagccaccattgatggaacttttcaagacagaaaaacagcaaactcaatataaacatgtatagactttaacctaaaaattccgtatgtatgactgtatactaaaaattatatggttttatggataagctttatgcacaaaattgttcctcagtacattactttcaaataataatttggtaacaatctaaatgtaattttacatattacatgtacatgcaaagacatgttcatttatacataatatacacataaatatgtaaataaaagtacaccagaagtatgtctgtttatatgtaaatatgtatagttatttttgtgccatattatttcctttttgtctattttgcattttttagtcattaacttttttctttttttttttaagattttatttatttattcatgagagacacacacagagagagaggcacaggcagagggagaagcaggctccatgcagggagcccttgggtctccaggatcacagcctgggccaaaagcggtgctaaaccgctgagccaccagaactgccctcatttgcttcttctttaaaacataagatagaatgaactttgtgtgagatttttaaatttctgaataataaaaagtccccagattaagatgtggtagagaggcagggccacattatcaagaatttatggaagaatattgcctattttcttagtctagctaaagatttgtcaaatttatatttacaaaaaatagcttgtagtttcattgatgttttctgttgtgtctctggtttctgtatcagcccaacatattatctatcctggagaattttccttgagacttgagcataatgtgtattctactactgctagatggactcctctttatttgtctgctaggataatttattctacagtgttgtcaaatttgctgtctccttatgatttcctatgtggatgatctatccattcaaaaaagtggggcactgatgttccatacaattattgtattgccatatatttctctctttagttaatacatgctttgtatatttaggggctttaacgttggagcatgtatttttttaaagtgctatattttattggtaaattgaccctttttatcataataaatgaccttctttgacagttttgacttaaagtctattttgacagttttgacttaaagttgattttgtatggtatttagtcaggcctgttccgttttgcttacaattcttatggaatatattctcccattccgtcacattgagcctgtgtataaagtgagtctccgctaactctgggaaacaaactaggggtggtagaaggggaggagggcggggggtgggagtgaatgggtgacgggcactgggggttattctgtatgttagtaaattgaacaccaataaaaaataaattaaaaaaaaaataaagtgagtctcctgtaaggagcagataattgagtcttactatttaaaaactccactagccaatttaatttagagccttttgatgcaaaatttaatctatttacacttaaagtaattatatataggtgagaatttatttttgccactttgttaattgttttcaatttctttttttcttctctttttgttttccttcataatactgtgatttttttttgtagtggtatgctttcattcctttctctaattttatagtttgtgtatctactacaagttttttatttgtgtttacataaatatgaggctggcataaagcatcttatggatataactgtctattttaaactgtgagcaacttttgattgctttggacagcattacacttttcctcctccccacactatgtattattgatgtcacagcttacatctttttatatcgtgtatccattaataaattattatagttattatttctaaaatacttttatcttttaaatttcatactagagttgaaattgattatgtaccacaatacagtattagaatatattgtatttaattatacttttaccagggagttttatactttcatgtgctttcatgctgctgattagtttcctttcatttcagcttgaagaattagacatataaggcatcactagtgatgaagaacccctttatatgagaatgtttgtctctcctttatttttgaagtacagattttctgggcataatattcttgtttggcactttttcagtgttttgaacatatcttactctctctagacctgtaagatttctgctgagaaatccactcacactcttaatgggggcttctttttttcatggatcatttttcctacactttaaaaattctctgtttgtctttgacttttgataatttaattataatgcatacattaaacttatttatattcttggggcttcatgaacctggatgtctatttccttgtgtttgtaaatatacctttaaatagactttctgcactctgtttctttctcttcttgtgggagtctcataatgcacatatggattcacttgattgattcccatagcccattagactctcttctctctttttctctttttgttcccatgagagcataatttcaaatgacctttgtttttattggttgtacattctgctcattcaagtctgttttcgaaaacctctagtgaatttttcaatttagttttcatactcttcagctacagtatttctatttgtttctttaaaaaaatttcttactgttgaacttccattttattcatgtattctttacctgcttttgttgagttgtccatttgtgttccactgtaactcactgagcttctttgattattattttcttttttttttaatttttatttatttatgatagtcacagagagagagagagagagagagagagagaggcagagacacaggcagagggagaagcaggctccatgcaccgggagcccgatgtgggattcgatcccgggtctccaggatcgcgccctgggccaaaggcaggcgccaaaccgctgcgccacccagggatcccaagattattattttcgattctttgtcagacaatttacagatctccattctttagggttagttaccggagatttgccttcttcctttgattgtgccatgttttcttgattcttcgtgttcctcgaatgtttgctttgttgtctgcatgtttgaaaatgaagctacctctcccagtctttatggactggttttgactgagagataatttcactggtctgcagtgtttgaggctgaccttttggggagtgcactctacaactatggccaatgacaccctcccttccttccttttttgaaaacaaaaatcaaaaaaaaaaaaaaaacaaaaaaaacaaaaccctcagtcttcctcatctcaatcaaaccaaacagtgccagctgtggaagaaaactttactttgttgctgctgtcaggcactcaaaatgaggccagatggaaaccaagtccatgtaaagtggtctgtgttactgggggtaagtcctctttcacttctctccttgatggaggaaaaacccaagttctgccttttttcccaatcctacaaagcagttcttgctgtaggagcatagcctcccttttcctttgttagtagttgtgtgaagtcaccagacactgcaggtaatttggtgctccatgaggcaagatagaaataaactccatagggggcacatctaaatgcttactttcctatgctcatattttgttgaggattcttgctgatatcaatattcaaacgtctttgttttgctttggtatcagaataatggtgttctcatagaatgagttaggaaacatttgatcttcagcgttgaagattttgtgaactattggttttagttctttgttaaatgttggattgagcttgccattgaaactatctggtcccgggaagattcgtggagagatgtttaatggttttatttgtggggagatttttaattaccaatgcaatctcctcagtagttatgggtctgtttagattttctgtatctccatcattcagtcttagtatgttgtgtgtttctaggaattttgcatttcatataggttatccaatttgtgtacaattgcttatagtactttctcatgatactttaaacctctataaaataattataagatcacacttcctttctgattttagttatttgtgtcttcccccctttttaaagtcaattaagtgagagactcatcaattttattaattattttagagaatcagtatttgggttgattgattttccttattctgtattttttttaaatcactcttgtctttattatttcctttgttctgctagctttgggtttagtttgttactttacctagttcctaaggcataaaatgaggttgttaattggaattctttcttattttttaggttaggcatttaaggctataaatattcctattagcactgcctttgcagcctctgatacatcttgcatgccatattttccttctcatttgtccataggtatattctaatttatcttgtgatttattctttgacagattggttgtttaagagcatgttgtttaattcccacatatttggggataatctaatttttccttctactcttgatttccagattcagtccattgtgataaaaaaaaactttgtataatttcagtccgttaaaacttattaagaattggagttttttgtctaacatataatctatcctgaagcatgtttgatacacaataaaaatgtgtattctccttttgttgagtgcaatgttgtgtatatgtttgttagattcaattgtatttcagtgctgttcaagacttctatttcttagcgataatctatctagttctatccattgttggtagttgggtactgagatctccaactattattgaagagctatttaattcctctttaaatgctgccaatatttgcttcatgtattttgaagtactggtgttgggtgtatatgtttatgattgttatatgttcttggcgaattgactcttttgtcatttcacaacatcattctttatctcttgtaatagttttttatttaaattctactttgatattagtataggcaccccagttctcttttggttgttatttacatgaaatacattttttattctttcactttcaatctatttgtggcagatgagctagtgagtcctttctggacaatgtaaaattggattatttttctcttattaatctctcaatctatgatttaattggggattttaacctacttacacttaacgtaattactgataagcaatggatacattaatcacttggtaatttgttctctgtatgtctgaaagcatttttgtcccttttttcctcactaatgcctgcttttgtgttttgtagatttttttgtgatgtaatttaattttcttctcatttctttttgtgctttgcatattgtgtgtgtatatatgcattataaagtatatattttattataaataaatattataaatatattttattataagtaaagcatatgtatttattaatcatattatagatatatattttgggagggattacatctttcaaaaagattacatataacattctgaagttataataatataattttgaattgataccaacttaacttcaactgaatccaaaaattcttggtgttcaatttactaacatacagaataacccccagtgcccgtcacccattcactcccaccccccgcccttctccccttccaccacccctagttcgtttctcagagttagcagtctttacgttctgtctccctttctgatatttcccacacatttcttctcccttcccttattttccctttcactattatttatattccccaaatgaatgagaacatataatgtttgtccttcaccgactgacttatttcactcagcataataccctccagttccatccacgttgaagcaaatggtgggtatttgtcatttctaatagctgagtaatattccattgtatacataaaccacatcttctttatccattcatctttcattggacaccaggctccttccacagtttggctatcgtggccattgctgctataaacatcggggtgcaggtgtcccggcgtttcattgcatctgtatctttggggtaaatccccagcagtgcaattgctgggtcgtagggcaggtatatttttaactgtctgaggaacctccacacagttttccagagtggctgcaccagttcacattcccaccaacagtgtaagagggttcccttttctccgcatcctctccaacatttgttgtttcctgccttgttaattttccccattctcactggtgtgaggtggtatctcattgtggttttgatttgtatttccctgatggcaagtgatgcagagcattttctcatgtgcatgttggccatgtctatgtcttcctctgtgagatttctcttcatgtcttttgcccatttcatgattggattgtttgtttctttgctgttgagtttaataagttctttatagatcttggaaactagccctttatctgatatgtcatttgcaaatatcttctcccattctgtaggttgtctttgagttttgttgactgtatcctttgctgtgcaaaagcttcttatcttgatgaagtcccaatagttcatttttgcttttgtttcttttgccttcgtggatgtatcttgcaagaagttactatggccgagttaaaaaagggtgttgcctgtgttcttgtctaggattttgatggaatcttgtctcacatttagatctttcatccattttgagtttatctttgtgtatggtgaaagagagtgctctagtttcattcttctgcatgtggatgtccaattttcccagcaccatttattgaagagcctgtctttcttccaatggatagcctttcctcctttatcgaatattagttgccaataaagttcagggtccacttctggattctctattctgttccactgatctatgtgtctgtttttgtgccagtaccacactgtcttgatgaccacagctttgtagtacaacctgaaatctggcattgtgatgcccccagatatggttttcttttttaaaattcccctggctattcggggtcttttctgattccacacaaatcttaaaataatttgttctaactctctgaagaaagtccatggtattttgatagggattgcattaaacgtgtatattgccctgggtaacattgacattttcacaatattaattctgccaatccatgagcatggaatatttttccatctctttgtgtcttcctcaatttctttcagaagtgttctatagttttgagggtatagatcctttacatctttggtgaggtttattcctaggtatcttatgcttttgggtgcaattgtaaatgggattgactccttaatttctctttcttcagtctcattgttagtgtatagaaatgccactgacttctgggcattgattttgtatcctgccacgctaccgaattgctgtatgagttctagcaatcttggggtggagacttttgggttttctatgtagagtatcatgtcatcggcgaagagggagagtttgacttcttctttgccaatttgaatgcctttaatgtctttttgttgtctgattgctgaggctaggacttccagtactatgttgaacagcagtggtgagagtggacatccctgtcttgttcctgatcttaggggaaaggctcccagtgcttccccattgagaatgatatttgctgtgggcttttcatagatggcttttaagatgtcgaggaatgttccctctatccctacactctgaagagttttgatcaggaatggatgctgtattttgtcaaatgctttctctgcatctaatgagaggaccatatggttcttggtttttctcttgctgatatgatgaatcacattgattgttttacgggtgttgaaccagccttgtgtcccagggataaatcctacttggtcatggtgaataattttcttaatgtattgttggatcctattggccagtatcttgttgagaatttttgcatccatgttcatcagggatattggtctgtaattctcctttttggtggggtctttgtctggttttggaattaaggtgatgctggcctcatagaatgaatttggaagtactccatctctttctatctttccaaacagctttaggagaataggtatggtttcttctttaaacgtttgataaaattcccctgggaagccatctggccctggactcttgtgtcttgggaggtttttgatgactgcttcaatttcctccctggttattggcctgttcaggttttctatttcttcctgttccagttttggtagtttgtggctttccaggaatgcatccattactcctagattgcctaatttattggcgtatagctgttcataatatgtttttaaaatcgtttgtatttccttggtgttggtagtgatctcacctttctcattcatgattttattaatttgagtcttctctctcttctttttaataaggctggctaatggtttatctatcttattaattctttcaaagaaccaactcctggttctgttgatctgttccaccaaaaattcttttatacacctccattgttctgtccccagtttatgttattaaaattgtcacaaattacctctttatgtattttggactcatatagatttataataactctttatgcatttgtttttttaaatgctagagaaaataacaagtggtatcacaaatcaaaatcacaataatattgtttttttatatttgcccatttatttccctttcttggtgatctttatagcattatatggctttcagttcccatctaacattcttttatttcaacctgaaggaataccttcagcatttcttgtaggacaggcctatttttaaggtatgcttcagcttattttcacctgagaatgttaatttctcctttattttgaagctcagtttttctaggtatagtatttttggctgacaagtttttctccccattatagctgccttccctttctgtcctccaaggtctttggagagaaataggctaatgattttattgagcatcccttatatttgaggagtcacttctcacttgctgttttcaagactctgtctttacgtttcaaaagtttgattataccatttgctgtgaatcacttttcatatatttttcttggagggttcattgagcttcttggatttgtagatccacatattttatcaaatttcagaaattttcagccattatttatataacctctctttctttctctctcctactgcttgggcctccatcacacatatatttgctctctcttgataatatcccacaaacctcttagactagactcactttactccgttctatattcttccaactcctcagactcaaccttttcaactatcctatcttcaattcactgattctttcctctgcctactcacatgtgttattgaacatctctaatagttattatattttttagttccagaatttctattttgttcttttctataatttctatttctgtagtgatattttcattttgttactatattgtctttctgatttcttctagttatttgtctgtgtttttattcagttctctgtatatatttaagacagttttgaataactttgtaaacctgatgtctgtgtttcctctggtatgatctgcaaatttattttcttcatctgatggtaatgttttcttgttatttgtatgcctttattttgttgttattgttgttattgttgaaatttatacatttgaaaaagtagccctcccccagtctttcctgaatctttctgtaccaaggaatttcttcactgattagctgggcatgatctgagcgtagggataataccaagatgaaagcttaaggttttctcgggtctcttttgagcagtgtcttatgttggccttcatgtgtttttctcaattctctcatgtacctgggtacttttaaattccttaactttccagagtttcctcccatgtctctcagagtctgagattgtctattgtatgtctccacctctaatgacttgccaaaagggtttctgggtctaggctccttactactttctttaacaaatgcattgcacttttcatgtctaagatccaaattagataagacagatatcagccctgaaggtagtccccaggcatattagactgctgtaaataaggaacagaagtgggaggtgtgctgatatttcccctaacccttgtggtagaggagggcaaaaggcaagtaaatatgctacaaactttcttatcatttgaacatgtttcagtcttaattggacattcatttggttactgtagatgtttgactattttccagaacacttaaaaatttattcagcaaaaaaaataaaaataaaaattaaaaaaaaatttattcagccaatttctctgtttgggttttcttgaggatcaagagagcttcatacttgcattttgctggcatcattctttcactgttatttgttaaagtttctcagtcatcttttggttggttaaagcttatcctttactagaatccttaggactaatatcctcctttcttaagtttcctgaaaaatatgcttcaattttgtattgtttttgaaaaatatactactgataaaagttttttttttttttttttttttttttggtggtagtctttcttttcttctggggatcctaaagattttttaaatttatctttaacctttgatattaatactagaatttgtttcagaattaatttttctgggtcaatttttcttttacttgaaaatttttcatgcgtttttattttatttaaaaagattttatttattttttcatgaaaaacacagagaaagaagcagagacataggcagagggagaagcaggctctccacagggaacccaatgtgggacttgatgccaggactcaggattatgccctgagccaaaggcagatagatgctcaaccactgaacccacccagacatcccatgaattttgcttttaaatatgattactggttcactattttgattttcttctttttcaattttcttcattcttcttgattttcaagattttgaatcactaatatggaatgttcaatctttttttctggcatttctactacttgtttctgatcctttatactcaaaagagaaacctttaaaaattctatttttttgttttcttcaatattctttacaaaatttattatctttattctattatctttattctttattcttttaaaatttcctttctgatttcggtgaacctttgtgcaatttctttattatttttgcatttctgcctttgtatttgcatttttgattcaaggtgttctttttttcccccatgtcttgaaatgcttgcttatacatatttaatacagtttacaatatgatataactgacttcttcagttttatacttaatttaggggatatttttgtttgcacaaaggacttcgtttgcattttctgacttttacttaaagtcatgtatggaaattgcttgggtatttctcttcatttatttaatggacagagtatttaaagatgtttttatttatttatttatttattttaagatttatttattcattcattcagagagagcgaagagagaggcagagacacaggcggagggagaagcaggctccatgcagggagcccgatgtgggactcgattctgggtctccaggatcacaccccaggctgcaggcggcgctaaaccgctgcaccaccggggctgcccaaagatgtttttatttattacttatgttctcatctttacagttactttattaatggttttggcaacaggggagaccaattatctatctttttttcctcttccattctaaatgagccttcattcatctcccttagttgattctttcctcctttcttttctctatcaataagacattttccccagagggaatagttctcctgggtagccactttacttcccacatagtttcaagtcccttttccacgtttagattttgatctaccaggtcccaatctttgtttagtcattttttttgctttttgatttaatttatttttacgggactaattttctgttactaaacttacttattctttctagaatccgatttcttgtatccccttatgtagacaatcatatcacccagaaatagagaatgtcttatttattcttttccaatatgcatagtttaatttctgtttcttgccttattgatctggctagaatctctaccaactatgatgtttaatgagagtgatgagagcagacatccatgtctcatccagttttgcaggaaaagcattcagtcttcattcattgtgatgttaactgtagtttttttgtttgtagatgccctttatcaggttaaagactttcacttatatttctagtttgttgatagttttcaacaagaatagaagtatggatatttaatttttattgaatatgttttatgtctttattgtagtgatcacattatttttcttttttagatcatgctatggtaatttatattcgtcacttttttttttttttatcttggaccagttttgcattcctggaataaacttgatttaatcacactatattatcttttgcatatattgctgtatttacttgctaatatattttgagaatttttttctatgttcttggaaatattgacctgtatttttcttttagaatttttatctgattttttgtatcatgataatgttgattttataaagcgagataaaatatttttctatctcttttatattctggaagtggtttgtaaactgatgttactgcttcagatgttcagtagaattcccattgaaaccagctgggcttggatttttctctgttgaaaaattttaaattacaaattcgatttattcagtagacataggacaatttagattatctatttattctgtaataatttttgccattggcatttctcaaggaaattgcctatttcttataatttgttgaatgtataggcttgaactttgatcacaatattgtctattttttaatgtctctaagtctttagtcattgccttctttcatcttaatcttggtaatttttgccttctcatacatacatgtatatattttacttgccagtctggctaggggttgatcaatttcattattttatcaaagtacaaacttagctattaattttttctatttttcagctttcaatagaattcatttctgatattatctttattgtttatttccttttaattgctttgagtttattttgttcatttaaagaattttaatgtggagttttagataactaatttgagacttaaataaataaataaataaataaactaatttgagactttttgaatataagaatataataaattcttctctaagtactgttttaacgacactcataaataatgatatgatgcattttcattttcatccaaaatattttttatttcttgattatttcctccttgattcatattctgtttagcagtgtgttgtttaatatccaaatcctggggggtagtgtataatttgtttatatttctgttactgatatataattaatttatgatcatagaacacaatttgtatgatttctattacttcaaacatgttaaaatatgtctgtcacctggattttgtttttagtttatgttctatgtgcaattgaaaacagttctacaatcatttgtagagtgttttatcaatgtcaaattgattgagattgttatttagttattctaaatcctattgtttcctgtctactgaaagaggaatgttgatatcttcaaatattattattattttaaagattttatttattttttcatgagagacacagagagaggcagagacgtaggcagagagagaagaaggctccctgtagggagcccaatttgggactcaatctcaggacctgagatcatgacctgagtcaaaggccaatgcccaactatccaggtgcctttctatcagttttcacttcatgtatttgacgttttgctacaaagttaatattttctgttaatttaggagtattaatgatctcaaagaatttactgaggttttttgtttgttcttgtttttaaagattttatttatttatttgagagacacagagagagaagagagagagagaatgagagagtgagtgagccggggaaggggcagagggaagagagagaagcagactcctcgctgagcaggaaacctgacatgaggcttgattccaagaccttagcatcataatctgagctaggcccccattatgattatttaatgtctaattgtatcccttatattttgtgttctatttttcttaagaatatgtcttctccagcatatgttagtattgtacatatttttctatcctatttatttattatttatattttttattttaaccaatatttgttttcaatgtgggtttctaatagtgtgtaattgggcctttcaaaaagtccaatatgatgatctctggcattttgattgacatatttagttcatttagaattaagatatctatcttaaccgctgttaagatagatttgaaccgctgtattacatctggttaatgtttgtccctgtacttttttctctgttccctcattcttgccttcttgtgagttattctagcactttttagtattctattttaacttaattattgtatttgtattttggcaataaatctttacattctatttgtttacatttgctctaggaatttaaaaagttcatacctaaactttcttattccacttagaatgaatattccaccacttcaagtaaaatgtagacatcttaaattcatacgtgcattattactttccttttcttatgtcatagttttcaggtgtattatttcacatatctgagaaacacacactgttaaaattattatattcaatagtcattcatatttttaagtttaaatattaaacttagaaaatattatttcacatttacctacacatttattatttttgttgcttctattaatttctgatgttcctagttttccctatgctattgttttcctttatctattgtttcctattgtgttcctttcagaacagctttttttgtcatatttttagaatagatttcttagtgatgaagtctcctagttttcctttattttatctgtattcttaaaagatttttttcatggagtataaaattatgaattgatgtttttcatttcagtgatttattgtttatattctacatgaatttatttttatttatttaattttaattatttattatcttattctacatgaatttattgtttttattctacatgaagagaacatggtgttggcatgaagacagacaaatagatcagtggaataaaattttgaaaccagaaataaactcatgatcatttgattttttcaaaagatgccaaggcaattcaatgggggaaaggtatagtcttttcaagagtcagtgctggcacatcagatatccacatgcaaaaagatgtcttgggatctttccctcaccctacacaaaatttgaactcaaaatgtgtcatagacctaaaggcaagagctaaaactataaaaccttcagtaagtaaaaattggagaaaaatatttgaaactttgaattatgcaaggacttctgagataggaagccaaaagcttatgataaaataaactgctatattggacttcatcaaaattaaaaccgctatgttttaaaatacactgataagaaagtgaaagaacaatacacagactagaagaaaatttgttcaaatgatttatctgataaaagatttgtatccaaatatgtaagatttcttaaaagtaaaaaataggatgacaaacattccaattgaaaaatgacaaaatagagatggcttagttgtttaagcatctgccttcagcttaggtcatgttcccagcatcctgggatagagccccatggggaaatccttgctcagtggggagtctgattctccttctccctctgaccctacccccacatgtgcactctctctctagcttgctgtttttctcaaataaaatctttttttaaataaaaaaattttaaaggcaaaataatagatatttcatcaaggaaggaatacaaaatggttataaaccacatgataaaatattcaacataataaggattacaaataataacaaatggtgtcatgcattgctgcccaaatgtaaaatggtattttggtaaacagtttgatgattttattaaatgttaaacataaatttatcttatgatttagaattcccattcctaagtgtataaccaagagaaataaaatacattttcactcaaagatgtgtatgtgaatattcctagtagaattgctcataaggcttcaaaagtggaaactggtgcagtcactctggaaaacagtatggaatttcttcaaaaagttaaaaatagaactaccctatgatccagcaattgcctgccgggtatttacccaaagtatagaaaaatattggttcagaggggcacatgcatcctgatgtttatagcagcattaaataaataaaaaattaaaaaaataaaataaacagaacaaacatgtcaaatagtaaagcagtaaaatagttttaaatttaattaaatttcttgtgactgaacccttcaaaataatttcctaaagtcttctttaggcatgatatcattgtcataatcatcaccattgccattaccatcattatcataatcattatcattgtcattgtcactaccatccccagcattcccactgacattcattaagcgctttctctgcactaagcactgtgatacatgcttcataagcagcatcacatttggttaccagaagtacttcggaagttatgatgcttaggcagaagaataaactgagattagagcaaggctacattacttgctgagtttcccacagtccttatttcagagtggaattttattcaaagtgagtattctattactagaaaaatatattttcagtaaaagagaaaaaaaaagcattagggtaaagcaacagtctccatgtaactatgtagtgctatgcaatactatgaaatacacagcaatattatgtgaagagtttggaagaccttcaaaaaattaaagaatagtataagacataccttttttttttcttatttcagccactttatttaacaatctaattagcaatttaacattatgcttcatttttcctattaggataggacatttagagtgctttgaaaatggtcagccaaaaaaaaaaataaataaaaaataaaaagaaaaaaaaaaaagaaaagaaaatggtcaaccaaaacctccaactattaaattatatacacaggcctgtcttattcattattttatgttcttctgtatatatagtatttacttaaaatggatcaaagaccaaaattcgagagcataaaacaataaaaatctttttaaaaaaatagaggtacagtggagaacctgggtggctcagtcagttaagcatctgactcttgatttcggctcaggtcatgacctcaagactgtgggaactagcccctaatcaggctccccacgcagtggagaatctgcatgaggaacctctatttctgctcctcccccactcatgtgcacacatgcacgtgtgcacgcacacacacaaattctctctctcaaacaaaataaatcttaaaaaaataataaataaacctgaattcataaaagtcaaaattatggatcaaaacagaagcagtgaagagataatgtgcataatgagagaaaatatttgcaaattatgttttgagggcctaatatcaagaatatataaagaagctttacaacttcatgacaaaaagaaaaacaatccttttagaaaatggataaagaagaggtggtatacgtatacaatggaatattattcagccattagaaacgacaaatacccaccatttgcttcgacgtggatggaactggagggtattatgctgagtgaaataagtcagttggagaaggacaaacattatatggtctcattcatttggggaatgtaaaaattcgtgaaagggaataaagggaaaggagagaaaatgagtgaaaatatcagtgagggtaacaaaacatgagagacacctaacttgggaaatgaacaaggggtagtggaaggggaggtggtcgggtggttggggtgactgggtgatgggcactgagggggcactaggtgggatgagcactgggtgttatgctatatgttggcaaattgaactccaaataaaaaaataaaaataaaataaaataaaaagaaaatgagcagaagaccggaatagacatttattcatggatatacaaatggtcaagaaagacatgaaaatatgctcaacttcttttgtcattagggaggtgcacatcaagattacaatgagataccactttataggtaccagaaagaccataatttaaaaattggaaaataacaagtattggtgagtagaggagaaattggaactctaatacattgctgtttgtaatgtaaaatagtactaccagagtggaaaataatttggcatactgtgtaaaagttaaacatagtatattgtatgatccagtaattccattcatgggtctatagcccccagattgaaacaggtatttgaacaaatacctgtgcaaagatattcatagcagcactactcacaaaagtcaaaagctagataaatcccaaaggtcaatggataaacaaaatgtgttacacccatacaatgaagtctttcttattcaatcgtaaaaaggaataaagtactgatatgtactacaatatgaatacaagcctcaaaaattttatgtaagtgaaagaaggcagacacaaaatgtcacatatttgttaatcccatggatatgagatcctaccagaaaagggaaattcacagaaatagaaagcagatagtgattgccagagactaggagtggtaggagaatgagaagtgacttaaagagtatggagtttacctggggtgatgaaattctttttggaactagatggaagtaataattataaaatattttaaatgtactaaatgccactgaactgtcaaaatggttaatttaatttaatgttatttaatgtttgaattttatctcaataaaagtaagaaatcaaatcaatagaagtgacctgcaaatgaaataacagaaggtcaccaattcatttactaatagacaaagtccttggttcaacacaacgccaagatgcccagtgctactctcatcagtcaagagctgacattgcttaaactgcatgatttgtacttatgtgaagatgaaatgcctacctgtcttttgcttagtttcttccctccttgctcctgaaaaagaaaatagacaaaaatttggagagtttagaaaaaacaaaacaggaaaaatctgttacatattaaattgaaacaaattgcaagtgtagcaatagagttggtaatagattggtatactgggaggaaaattttatttgctataatgtgaagctactgaaccccgtttctttttattgtcttattctttttattttctttttactgagtttgctgcaatgatacactttctaagtgatttaagatttgaaactcaccattttttattttctctgtaaatcatatgaaaaatattgataaaataagtgaagtgattcataaataaagatatatagatgatcaaatattagttcttttaggagcaaattctgcttttacaaaattctaaagtaccaagagcaatgcttttatccaagacaggttttccttcaataatatattttctattttggtggagataaatttccctttgacttcctcccttttctctaaataaatgcattaaataattaattttttaaaataactgatacaacataaaaataaattaaaagagggtaagacttatcaggtcattaattaattaaatcttctgtttatggatgaagagaaaactccttatttcacattttcaaaacaaaatagaagaaatttttaattttcaggattcacaatctctttatcttatttctattcatatgtttttcccttctcatttgttccttctgttatttcctgtatgcttgtagaagtttctttagcatttcttatgggacaaatgtggtaactagtttcttcttttcttgacttttcttttttccatgcattaaagtttttattttgtcttttttgctgaagtctattttcactgaatatatagactactaggttgacagtcttttctttcagtattttaatgatttcactttattgtattcttgttcctatgatttctggtgtgaaataacctggttttgaaaatttctcctttgttgttttacgttagatacctccaagagttatttatcttcagttttcaaaaattatgattgtaatatttcttttttttttttttgattgtaatatttctaggcttgttgctggtgttgttaattttagttacttgatgggtgtgaggtgatatctcattgtaattttgacttgcatttccctgataatgagtgatattgagcatcttttcatgcatcttctggccatctgtatatcttctttggggaaatgtccatttatgtcttctcatcttttaatcaggttgtttattgggtgtttctcttacactatctagctccatccatgttgttgcaaatggcaagatttcattcttttttatggctgaataatattctattttgtatatattctatttcttctttatccattaatctatcgatagagacttgggatgcttccataatttggctattgtagataaggctggaagagatgtggggatggcttatatcctttgtatagagaactttatatattttggacactaaccctttatcagatatgtcatttgcaaatatcatctcctatctgccacatctcttaggttgtcttttagttttgttgactgtttcctgtgctagaacttttcatattatctcacatctccaaggcttttgttcattatgtctatgttttcctatctgttcttcagctaggaaaattctgtggatttatgttccatcttctggtctttttgcttatcatctgcattttcctattgtgctaatgcagtaatatttaaatttcagatgttatatttttcaattctaaaattttgatttaactattttttctagtttctttttttttaagattttatttatttattcatgagaaagagagagaggcacagacacaggcagagggagaagcaggcttcatgcagggagcctgtgtgggacttgatcccgggtctccaggatcacgccctggactgaaggcggcgctaaaccgctgagccactgggctgcccttattttttccagtttctatttatctgctgtgaattttcattcttttcatttctaatctcttttattttacttgatgtagcccagcaaccatagtctccctcccttctttaaacatttttatataaagctctgtatattctttactcagatccccctaatgatagaaaatatcttgtataactgtagtaagatatcaaagccaagaaattgacatgggtataatactgttaactatgcaacatacctcatttgagtttcatcatttttgcatgtgtgtgatatgcatgtgtgtgtttatgcaatttctcccatctgtgtatatccaggtttccctggaggaacagccttagagttctggtattttatggggccaactgagtatacttctcagatattaaatgcttagcatttagaagtcaagctacagggatgcctgggtggctcagtggttgagcatctgcctttcgctcaggtcctgatcctggggtcctgggattgagttccgcatcatgttctccacagggagcctgcttctccctctgcctatgtctctctttctttgtgtctctcatgaataaataaataaaatcttttaaaaaaattctttaattcaaataattgatttccttgcatgctttaatatatttataataatttaattaaaaaatctttgcctaataagtccaacatttaacaccccaagttcctcaggcacagtgtctgcctttttttcatgtatgggccatactttcctgtgtatttgtgtgtctccaaatttttggataaaaactagtactgtgtcaactctagaaatccaattcctctccttcctccaaggcatgttattgttgttgctgctctttatgtggttagtgatttgcctgactcttgacttccctgtagtgtgtagccactgtagtctctgattacttagcttattggtcagctaatgattaatcagagattttgttattgccttgaggtaaaacatttccaacttttgctaaggggttctctgtatgggttgggatatgcctgtctgcttagaaagtttacaactttgctttagtctccattttctgcttccagcttcaatcagctagaggtgagagattggaatgctcttaggctcccctgggcattcaacatagccctgcacgtgcgagcagttttctagatttccaagtcaggatttctcaaagtcccctttgtacatctcattgcccagatcttcctttaaaagttttgttccgattcttatttgcctgactgatatcatatttctaggtagatgtaaaaatgtgcagttgattatttttgacaaattccctgaggatagagtttttcccattaaggaagttctaagcctgatcaaataatggcaacatcttgtgaatggtgcttttccagggagctgtgagacaggtcaatatggcaatactttgcttgtttcacagctaccattgttgccaggctgctgttttattttttatttttttttatttttttttttttaacagagtccagaaggaaatgtgctctgataaactgattttttttatttatttatgatagtcacagagagagagagagagaggcagagacacaggcagagggagaagcaggctccatgcactgggagcctgatgtgggattcgatcccgggtctccaggatcgcgccctgggccaaaggtaggcgccaaaccactgcgccacccagggatccccgccaggctgctgttttaaaggctatcacagggcagtcccggtgacctagtggcttagcgccaccttccgccaggggtgtgatcctggagacccaagatcaagtctcacatctgcctctctctctctctgtcatgaataaataaataaaatctttaaaaaaaaaaaaaaggctatcacagagttggagagagagggacaggagtaggccatgttacaatgcacaaacttgtactgttcttatgtagtttagcagttcttcccaaagaaataagctgtgaattgttgcacaacattgtttaatttctagagttgattgattttggcaataagcccagtattttccttgccttttttttttttgtatattttttatttacttttttggagaagtgtatttacgcagattcttactctgccaatcaggaagttctaccttaaaggtaaatttgtacaatgttattttgatgtttctctgacatttccagtaactggtatatgctatacaagaaactgaaagtagcttcagtatttgtttataactcaaaatgtttttttaatgtactgtaaagttggatttttgattacacagtaaattaactcaaaaatggtcttcttcggggatccctgggtggctcagtggtttagtgcctgctttcgacccagggcatgatcctggagtcccgggatcgaatcccatgtcaggctccctgcatgaaggctccttcttcctctgcctgtgtctctgcctctctctctgtgtctctcatgaataaataaataaaatcttttaaaaaaatgaccttcttcattaatactagttcatccaaagctttgtataaacatgttattttataaattgaatgtgacaacctttaactttaactaatatttgcaagcctgtgaatctttctgtgcattgttttagtggtttttcaaaacccaaactctaaaccgtttgaagaattctttcacatatgaatcattacaatgtccatttgtacacttttattttaaaattatttactggcaaagtatactgactaatctctggcagttcctctcccaatacttggaacagagagttaatatttgtgcacatgccttaggaataggggttgggggcagatggacaagttggcttcccatggcaggccctttccctgcacacatgaaaacctcctcttctccacaactttagccactaatgccacttctgctgctgctgccaatgtcactgtcacatatctgggcccagttcaaagcccagtcacttccctggccccatggtgttctgttctgccacaggtatttgggaatgcactgggccaatcactgttggtgcaccgatagtgttacctggaagcctgagcccactgtgtgtggactgctgctggaacacaaatgcttgcatgtactgtgaatcaattcactgctttctctgctcatatgcatggtctattgtcttactggacttcatttataaaacagatattcaaagataaacttacaaaaaattcaatataatgaaagaacattataccaaggatattctcagcactgagccctgaacagctgcataaattgcatatctatgaagccagtcctgcacacatccttttcatgaaaaatgtcattgcaggattttagtggttacatatgcagtatatgtgtagcactatgaggactaacataagaatacatggatataactagctttgtgggcccacatctggggctgaccatgcagaatctttgcaatttcgtaggtctgaatattcccattagagttataatgacttattggggcaagagtcacacaaataaaaaccagtctatctcttttatcacctatgagattaaaacagcagctttcctattgtcagttctaataatagtctctggtaaaatatttgcaattagtccttatacagattttgtatctgaaattcttaaattagattgcatgactatatattttgtaccagattctaatagtatagtgagtgtttcaatgtatgattaggaatgttaaaatatatttgttcaaactttgcttctgttttgtaccaatatccatttttattgttgtgttgacaatgttatattcatttaaatttttttattttgtcttgcttttatttaatagtatttttaattcagtgtttttgttttcagaataaaatatattttgtaggatttcattcaataataataatttattcctattgccttctatgaatagtgacaaaatcccactttatttatttggttgtttctacatgttcaggatttttgaatttgtaggtactgtataatatgttattctaatgaggtttttttttttttgcagaaaacaatgttaaaaattgtgaaaaaatgtagtaaaaattccttaacatttccccataacttttgcttgaaaattaagaatttcttatactttcacgttgtttatgataaaatatattctattttaatcctccatctaacttagtatccattctctaatataagaacctattctctaattagaaaaataactccttcatgtgaccattaagattttgattaaatgctatcagtggattgaactcatgacttttttggaaaaatacttaataaaaagaaagatctcattattaaaattcttttttatatagagtcaaatatggtactttacaacttcaaccatttatttctaatcctaacagttgaaataatggaagagagagaaaatcttcttttaatgacaagttatcaaaataatcaaatattttacatgtaactcaaatactgtggatttctctgttaaatattatttatactgttaattttagagacatgttttcagaacctttataattctgggaataatatacttgatgaattgtagtttgtcaaaatctctcttaaatatgttgcttagaagtaaatataaaaagtgaaaagtggtctgccctggtggcccagtggtttagcaggaccttcagcccggggtgtgatcctggagacccgggatcgagtcccacatcaggttccctgcatggaagcttgcttcttcctctgactgtgtctctgcctctctttttttctctctctctctgtctgtcatgaataaataaataaaatctttttttaaaaagtgaaaagtaaacaaaagagactattacatttttaacctccaattctgtttttataatgaagttagagcctgcttatctctgttataatcatcattcagaaaccatgtcaaaattagagtagtaaacacttaagatatcatgattttacatatttactaacttaccactatcacgatattcctttatgaacagagaaataataatgatgaaggtctctaggagtaagaggcaattgaagtttgtatctactccagggtggaactctgaaaaatcaatgccaaagaattttcttattaacatccagaccatcttattgctgtttctttcttttttttttttttttaaatttatgatagtcacacacacacagagagagagaggcagagacacaggcagagagagaagcaggctccatgcaccgggagcccgatgtgggattcgatcccgggtctccagaatcgcgccctgggcaaaaggcaggcgctaaaccgctgctccacccaggattcccttattgctgtttctaccatacaagttttattctatacttccagtaacctataggtctatgaccaagtttcaattttcagagataaagctaagcaattttcagagataaagctaaggagatgacagcagccactcagaagacagcatgggattgaatatctcagggtgggccaaaggttagggagatgctcattccatgagttttgaaaaattcttgagtgtgaacacttcacagtaaatgagggaatatctgtcaagtttcagggctcttctcatcactttactatactctatggagccaaaaatgatatagccagactttggtccagaaaccaaatcaagtctaatatatatttttggaagatttgtgatttcaggatagatttcagtttttaaaatcagacatgtgaaaaaaatgctccacatcacttgtcatcagggaaatacaaatcaaaaccacgatgtgataccaccttacaccagtcagaatggctaaaattaacaagacaggaaacaataagtgttggcaaggatgtggagaaaggggaaccctcttacactgttggtggaaatgcagctggtacagcccactctggaaaactgtatagagtttcctcaagaagttaaaaatagagatacccttcaagtaatcaatttcactactgagtatttacctcaaagatacagatgtagtgaaatgaaggagtacctacaccccaatgtttgtagtagcaatgtccacaatagccaaactgtggaaggaactgagatgtccttcaacagatcaatggataaagaagatgtggtatatttatataaaggaataatacttggccagcagaaaggatgaatacctaccatttatatcgacatgaatggaaatggagggtattatgctaagtgaaataagccaataacagaaagagaattatcatatggtgtcactcatatgtgaaatacaagaaataatgcaaggaaccacaaagaaaggaggggaaagtgaaggggaaaaatcatagaggaagccaaaccatgagagacttttaactctgggaagcaaactgagagttactgaaggggtgggttgttgaagggtggatagggtaactgggtgacaagcattaaggagggcacatgacatgattactaagtgttatatgcaaatgatgaattattgaaaattacctctgaaactaaggatgtactatatgttggcaagttgaatttaaagaaaaaaaaagaaaaaacaaggtaaagtcattgaaaaaaagaaaaaagtgatgcaaaaataatatgaaattcaaatgtcagtgtccacagaactcaactatgttcaatcatggtgtatggcttataactgcttttcactacaataacaaagatgaggagttgtaatcaagacagtttgtagtgcagtgatggagttataacatcatttgagtcacttgactataacaatacaactacattttgtctttgttttattaccagggaataccagtcatgccaaaacaagaaaagaagggaaggccaaagtagactttgaaaaaaacatcttaagttatattggagtggattattttcttattgaattacatgtattcattatgcaatgacactatagcaagaaaacaacagagtgagaaaatggtggcagactagcaggaccccaggattgcttccacctatgaatgcaactggtaactatcaaataatcttaaataccccagaaactggcctgaagacaagaaaaaattccacaactaaaggtagataagataccacattgaagaatttaggaagtgcatagacataatttaaggaagaaatgatccctggcttctatacaggggaggaagctctgtttatgaagaaggataagagagtgacagagagagaaagagagagagtgagggagagagagagagagagagagagagagagagagagagagagagagaacacacagaggaatgaaccaggagaaaatttcccatagtcattggcttggaaagcgaaagtggttaaatttcatgaattcttgccatcaaaggggactaacctgaagtattaaatgtcagggagcttggctccagtaggtcttgaaggcactggggctgctcttggaaagaaggcaaacaattcatagagatgcagcatggaaacagtgatctgaagagtacctggggtgcacagtggggaaattatttccccccctcagagtgtgtccctgagagggagagttcacagagacacctctccaaaaacaaaggaactagctggcatcatttccctttcctgtcccttatcagaagcccatggccacctgtgggaactagcacaataccaatactgactgcctaactggcatacaccaagcctcacaccctgcactctagtagaacttcctttctcagccaagctggcctcagtcccagcatgacatgtcattcccccagaagacagcagaaacccttgcccacatgatttctcccaaccagagaagtatgcagggcctcctctggtggaggaagtaacaggttttatttcaccaatagaccacaatacacctagttaaactcactatattcagaccagggaccaaacacttgccacaggcaaggagagcctctgaagaccactgcttgaagaatagagcagtcagagcaaaactgtacagcacatgcagcacaaagtggagacacttcctaaagcaccaggccctggaaattacatgccctcttcttcataagccattattttcaggagcaggagacataactgggttttctaacagagagaaggtggcagagatttaggcaaaataagaagacaagaatttctcccaaatgaaagaacaagataagaccaaggccagagatctaaataaaacagatataagtaacatgcatgatggagaatttaaaacaatgattataaggatactcactggacttgaaaaaataatagaagacattaagagggaaaatggcagcagaataggaccataggctcatctcatcccatggacataactagataactatcaaatcatcctaaataccaaagaaaccaccatgaagagtgacagaactaattccacaattaaagggagagaagaggacaccctaaaaaagtagcaggtgcagagatatggtttatgggagaaatgaatagcaggtgctgtggaaatcagagagagctgtggtcaagagaaaggcaaggaagaaaggaacacacagtggaatgcacaaggagaatgtttctccaaatccatcagcttgggaaatgaaagaggctaaatttcatgagttcttacaatcagtggaactggagttttaaagttcagcaggcttgggtgggatagagacctgaaggcactgccctgcttctggaaagaagacaggcaaataacctgggggacagagagtgtgtaaaaagagatctgaaaaacacctggggcacacagtggggagattattcactcttttttgaagcatatctctgagaggcagcattcacagagacaatctctgggaacaaagaaactggctgtcaccatgtctctgccctgcccctcagcataaacacaaatccaccttgggaagcagcacaatgctgacacatctacttaacttgctcattaaagcctatctcctcgcactctggcaggactgcctttctcagtcaagcttgcctcagtctcagtgtagtggcccctgccctagaagaccagaacaaactactacctacatcacatttcccaaccagagagttttgtaggcctccattctggtggaagtgatgtcaattatcccatcacaagcagaccagagcacacttacttaaaacttgccacattcaggccagagacaaagcactgcccacagaaggcaagcagagcctctgtagatggcaggcctgaaggatagtcagccaaaacacaataacagagcacacaaagcacatataagaaacatttcctaagttccaggccctggacactacgtgatctcttcttcattaagccaaaattttcaggagcaggagacataatttctaacacagagaagggagaggcttagacaaaattcaaagatggaaaaacttatgccaaatgaaaggacaagataaggtcacagccagaaatccagagcaaaacagatataataacatacctgatggagaatttaaagtggtacaagtatactcactggggttaagaaaagaatagaagacaagacaaaaaggagattcttaccacagatataagaggttaaaaagagttgatcagagatgaagagtgcaatcaattatattggatacagactcgattcaatgaacacaggctggaagaagcaaagggacaaattagtgactagaagacaaaataatggaaaataatgaaggtgaacaaaagagagaaaagaattatgcaaagtgagaatagacttaaggaattcagttactccatcaaacataataacattcatattataggagtctcaaaacaagaagagggagaaaagggagaacatttatttgaagagctaatagctcataccttccctattctggggaaggaaacggacatccagacccaagaggcacaattgggtcttgatggcagaactgccatcaaacacgacaggagttagaccaacagtaacacatattgtcactaaactggcaaaacatagtgataaagaaaaaatttttaaagcagcaagacaaaagaagaagtaacatagagaggaaaacccataagactagcaggagatttttcagctgaagctttccaagccagaaggcagtgccatgatatattcaaagtgctaagtgagaaaaatctgtagccaagtatactctatccagcaagggtatcttcagaatagaaggagagagaaagtttcccaggcaaacaaaaactaaaggagttcatggccactaaaccactcctgcaagaggtattaaaggggactgtgattggaaaagagagaccaaaagtgacagtaaaaaagtagaaaacacaaaatagtaaaaatgcatatatctataaaaaataagtaaaaactcacaaaaaggatataaaatataataacatatacttaaaacatggagaggacaagagaaaagaatgtcttcaaactaaaatgaccataaactgggcggggcaagatggcagaagagtaggagggtccccaagtcacctgtccccaccaacttacctagataactttcaaatcatcctgaaaaacctatgaatttggcctgagttttaaagagagaacagctagaatgctacagaaagaagggtttttgcttctaacaaggtaggaagattgaaaaaacaaaaaaaaaaagaatcaagtgggggaggggcccccactaggagctaggctaacgctgggtggcgaaagcctctgggacaggaaagcccagaagtgggaactttaaaaattcacaccagattctttccctagaaagaagaactcatcacaaaagaaagaatcaaaaacagtactctctgccacagagttacagaatttggattacaatctgatgtcagaaagccaattcagaagcaattataaagctaccagtggctctggaaaaaagcataaaggattcaagagacttcatgactgcagaatttagatctaatcatgccaaaattaaaaaatcatttaaatgagatgcaatccaaactggaagtcctaacaaggaggattaatgacatagaggaaggagtgagtgacatagaagacaagttgatggcaaggaaggaggaaaaaagagaaaaacaattaaaagaccatgaggaaaggttaagggacataaatgacagcttcagaaggaaaaatctacatttaattggggttccagaggacgctgaaagagacagaggaccagaaagtgtatttgaacaaatcatagctgagaacttccctaacatgggaagggaaacaggcattcagatccaggagatagagaggtccccccctaaaatcaataaaaaccgttcaacaccttgacatttaatagtgaaacttgcaaattccaaagataaagaaaagatccttaaaacatcaagagacaagagatccctaacaattatggggagaagtattaggttaacagcagacttctccacagagacctggcaggccagaaagggctggcaggatatattcaggatcctaaatgagaagaacctgcagccaagaatactttatcagcaaggctctcattcagaatagaaggagagataaacagcttccaagataggcagaaactgacagaatatgtgacctccaaaccagctctgcaagaaatattaagagggactctgtaaaagaaagaggatacccaaagaaataagccacaaaacagggactgaatagatattatgatgacaataaattcatatctttcaatagtaactctgaacgtgaatgggcttaatgatcccatcaaaagccgcagggtttcagactggataaaaaagcaagacccatctatttgctgtctacaagagactcatttgagacctaaggacacctccagcctgaaaatgaaagttggagaaccatttaccactcaaatggtcctcaaaagaaagcaggggtagccatcctcatatcagataaattaaagtttatcccgaagagtataataagagatgaagaggaacactctatcatacttaaagaatctatccaacaagaggacctaacaatcatgaatatttatgcccctaatatcggagctgtcaagcatatcagtcaattaataaccaaagttaagacattcttagataataatgcacttatactgggagactttaacatggcctcagtgtccatcaaaagatgaatggttaaagaaaatgtggtctatgtatacaatggaatattcctcagccattagaaatgacacatacccaccatttgcttcaacgtggatggaactggagggtattatgctaagtgaagtaagtcaatcagagaagggcaatcatatggtttcactcatacggagaaaataaaaagtagtgaaagggattataggggaaaggagagaaaatgaatgggaaaaatcagagaggatgacaaaacaggagagactcctaactctgggaaacgaacaaggggtagtggaaggggaggtgggcaaggcgttggggtgactgggtgatgggcactgaggcgggcacttgagggttgagtactgggtattatactatatgctggcaaatcaaactccaataaaaaattatacatagtaaaaaaaacaccctcccaataaaatccagttaaaaagtgtgcagaagacacgaacagacatctatgtatatatacatatacatacatttctccaaatacacacacatacatacattcacacaacggaatattattcagccataaaaaggaatgaatcttgtcatttgcaacaatgtgaatagatctaaagagtataatgctaaacaaaataaatcagtcagagaaagacaataccatatgattccactcatatgtggaatttaagaaacaaaacaaacaaacaaaaaggaagacaaatcaaaaaacaaactattaactatagagaacagagggtgaccaaaggggagattggtgggaggataagtgaaatagatgatgggggttaagaatacacttatcatcatgagcattgggtaaagtatacaattgttgaatcactaccttgtacgcctgaaactaatataacactatattaacgatgttggagttagaattaaaaacttagtaaatattttttaaaaacaaaaaggcaacctactgagggggaggagacattgcaaataatatatatgataagtgactaatatccaacatatataaagaacttatatgcaactgataaattactgaactctacatctgaaactaatactatatgttaactaattgattttaaataaaaataaattaaaaaaagaacttctacaactcatcaccccccttccccaaaaaattcacttaaaaatattcagaggacctaaacagacatttttccaaagaagacataaatggccaagagacacatataaagatgctcaaaatcactaattatcgtgaaaatgcaaaacaaaaccacaatgggc

SEQ ID NO: 1 - DNA, 3031985 bp, Canine spp. (residues 1,515,994-3,031,985 of 3,031,985)
  misc_feature: canFam2_dna range=chr12:3499115-7980069
  misc_feature (16348)..(16348): n is a, c, g, or t
  misc_feature (50914)..(52022): n is a, c, g, or t
  misc_feature (53454)..(53454): n is a, c, g, or t
  misc_feature (82491)..(84213): n is a, c, g, or t
  misc_feature (85011)..(85257): n is a, c, g, or t
  misc_feature (99106)..(99109): n is a, c, g, or t
  misc_feature (109125)..(109274): n is a, c, g, or t
  misc_feature (110498)..(110498): n is a, c, g, or t
  misc_feature (161503)..(161503): n is a, c, g, or t
  misc_feature (186111)..(186183): n is a, c, g, or t
  misc_feature (218699)..(219347): n is a, c, g, or t
  misc_feature (241821)..(241821): n is a, c, g, or t
  misc_feature (308246)..(308372): n is a, c, g, or t
  misc_feature (370692)..(371051): n is a, c, g, or t
  misc_feature (378070)..(378312): n is a, c, g, or t
  misc_feature (415586)..(415980): n is a, c, g, or t
  misc_feature (589760)..(589971): n is a, c, g, or t
  misc_feature (613402)..(613507): n is a, c, g, or t
  misc_feature (671099)..(671210): n is a, c, g, or t
  misc_feature (707494)..(707733): n is a, c, g, or t
  misc_feature (711846)..(711846): n is a, c, g, or t
  misc_feature (724016)..(724202): n is a, c, g, or t
  misc_feature (726289)..(726641): n is a, c, g, or t
  misc_feature (760736)..(760736): n is a, c, g, or t
  misc_feature (772850)..(773113): n is a, c, g, or t
  misc_feature (845967)..(846164): n is a, c, g, or t
  misc_feature (854792)..(855533): n is a, c, g, or t
  misc_feature (857844)..(858340): n is a, c, g, or t
  misc_feature (862119)..(862322): n is a, c, g, or t
  misc_feature (924007)..(924007): n is a, c, g, or t
  misc_feature (929947)..(930107): n is a, c, g, or t
  misc_feature (939020)..(939020): n is a, c, g, or t
  misc_feature (995934)..(995934): n is a, c, g, or t
  misc_feature (1023746)..(1024280): n is a, c, g, or t
  misc_feature (1042346)..(1042346): n is a, c, g, or t
  misc_feature (1086299)..(1086530): n is a, c, g, or t
  misc_feature (1090884)..(1091495): n is a, c, g, or t
  misc_feature (1180064)..(1180064): n is a, c, g, or t
  misc_feature (1203152)..(1203403): n is a, c, g, or t
  misc_feature (1205580)..(1205654): n is a, c, g, or t
  misc_feature (1261565)..(1261660): n is a, c, g, or t
  misc_feature (1265815)..(1268727): n is a, c, g, or t
  misc_feature (1283221)..(1283516): n is a, c, g, or t
  misc_feature (1291187)..(1291766): n is a, c, g, or t
  misc_feature (1585931)..(1586093): n is a, c, g, or t
  misc_feature (1629707)..(1629939): n is a, c, g, or t
  misc_feature (1661396)..(1661532): n is a, c, g, or t
  misc_feature (1810970)..(1811044): n is a, c, g, or t
  misc_feature (2146553)..(2146607): n is a, c, g, or t
  misc_feature (2326448)..(2326555): n is a, c, g, or t
  misc_feature (2335467)..(2335676): n is a, c, g, or t
  misc_feature (2339555)..(2339771): n is a, c, g, or t
  misc_feature (2342726)..(2343924): n is a, c, g, or t
  misc_feature (2347835)..(2347907): n is a, c, g, or t
  misc_feature (2356676)..(2357299): n is a, c, g, or t
  misc_feature (2516052)..(2516052): n is a, c, g, or t
  misc_feature (2698993)..(2699296): n is a, c, g, or t
  misc_feature (2725258)..(2727787): n is a, c, g, or t
  misc_feature (2739697)..(2741058): n is a, c, g, or t
  misc_feature (2765197)..(2765240): n is a, c, g, or t
  misc_feature (2771231)..(2771984): n is a, c, g, or t
  misc_feature (2874929)..(2875182): n is a, c, g, or t
  misc_feature (2877909)..(2878472): n is a, c, g, or t
  misc_feature (2879203)..(2879310): n is a, c, g, or t
  misc_feature (2887589)..(2887722): n is a, c, g, or t
  misc_feature (2956542)..(2956542): n is a, c, g, or t
tatcacctacacctgtcagaatagttaaaatcagaatgataagatatagcaagtgttgacaagaatgtggaaaaagaatccttgtgaactattgatgggaactaaattgctgcagccactgtgtaaaaccatatggattttcctcaaaagattaaaaatagggacacttgggtggctcagcatctgcaccatctgtctttggctcagggcatgatcctgcagtcctgggatcgaatcacacatcgggctccctgcatgaagcctgcttctccctctgcctacatctctgcctttctctgtctctgatgaataaataaataaaatcttttaaaaaagcattaaaaacagaactaccctatgatccagtaattatactattggatatttacccaaggaaaatgaaaatagtaatagaaaagatatatgaaaacacccctacgtttattgcagcattatttacaatagccaagatatggaagtaacccaagtgtccatggatagatgaatggataaaaacgtgatatctgtctatcttggaatattgctcacctataaaaaggtcaagatcttgtcatttgcaacaacatgggtggacctacagggtataatgcttagtgaaataaaccagtcagagaaatatgaacaagttatgatttcactcatatgtggaatttaagaaacaaaacaaatgaataaataatgaaaaaagatagataaacagactcttaaatatagggaacacagtagtggttgctgcaggggtgatttatgggggaaagggtgaaatagataaaggggttatgagcacattttttttaatgtttcaactttttatttaaattctaactagttaacatatagtgtaatataatttcagaagaattcagtgattcatcatttacaatacccagtgaaaagcacacttatcttgagtactgagaaatgtatcaaattgttgaatctttatattgtatatctgaaactaactttatgtctttactatttttctttttttttttctttactatttttcaattaaaaaaagaaaaagagatgattacctaccaaaaaggttttgcagaaaatactgctgaagatcatcatgtagtcctatatgtcattcagatgatttaaatttttttaaggacaagtgacttaaataaatgagataaatacaaggatttaaatagctgagatatagttattcttactcaattgatctggctattataatacaactctgttatatcctcatttctttttgttttatattttcatctttcttcttgctagagataaatctttgtttttttctcagccaaatgcctgataaggaggcttggatttatgtacataatcaccattggtactatttgagcaggaggcttttgtccggctgtcctcctaagtactttggccatctttggattgttacttttgatgttgcatctcatcttcttcctctaaaataggaagaccagactacttgcttttgttttagctgtcatgtatagtaacactaattctccatttgttgtacatgccctcgtagaggtcaataatagtgacttattgctaactcagctgctcatttttcaatgtccttaaatattctacagcaggtatgtctaccactccattcttttttgaaatgtaacttgatttgtatttctataaaacattgtttcttatctccccacccccaaactctcattctctctctctctctctctttttttattggagttcaattggccaacatatatagcatatcacccagtgctcatcccatcaagtgcccatcacccagttatttatttttgtcctcatatttttccactactgaatattactttgacattaagcaaaggattatatatgacatacataaaatcataattaagacaatgagaaaaattgtcttaaatttcaaaagtgatatggaattattactgagaaagagaatatgacaaactatatttcctattctgttatatatgcctaaaattctaaataggttagtcaatagtagcaaaaatgcctctgtgtaagacatggtcttgtatataaaacaagaaaacataggagaaattgtacacaactatgtttcacacagcttattgtggaaaagggaaacactttttttaaatattataaagcaaataaaaatggaaagtaaacatcaaagtagtccaatgccatattcttgcaagaagcatttttagagtataatataaatcttatgcaagtaataacttgaatgatactccactggtgaacaatttccattttgcatctggacagtccttgattattttcccaaccataaaaagttactcacgtattgacagtcttagtaaatatcaatttttaaagtacttactatgaatcagaattataatcagtataggttggatcctactctagtcctaagacccctagttggtgcaccttaaaattcattcactatgaatattaatagccttttagaattctacagcaatatgtttctttaaaaaagcttttatttcattattacacagagtggccagtatgagagtatcagtttttaatcctattgtgtcatctttttcaacttttagaatgtaaatatcacatatattaaatgctaattcttggacatatttttgaaataaatgacattctaatgacatatagaaaaggatggattgaagtgagctaggagttggaattgtgaggttagagagtacagcaaaatttaaactacatagaaaacatctcacctgggagcattactgatagaagagaaaaatatagggacacagagattctccaaaattagagtgcatgggtgaaaatgaaaaaggagaatctttcttcttattggaaagaaatatctaatgagagaggttatcaaactgagaactttgggaccatttataattatggagtgagaagaaacgagatgtcaggttgaccagacctgacagaataatagattcaactcttagctattgcaccctggtgtctgctctatctttgtggctcaaatacttttcttaggaacattagacatgtggacttatacacacacacacacacacacacacaaataataatagcagtaaacaagtaaaacttactattttgtgtctcattattcatacataaatttgtatcttgacctatttgctgagtcaccatttcaggaaggagttcttttcaggtcgttcaattgtaatctaaaggaaattcccaactctattctgagctgtgttggcaggattctgaaatgtctttgtgttccttatacaagcacagaaatgagtgattttaccacccagggcaaaatcctggattagacagaagctcagtcacatgcaccagtagcatgaaggtatcttaacactgctctctgtagctaggtggaatatggacttattccagaagcaagggtactctggactttggactttatagactcataaaacattttagttgcaattgttcatttagtcatttgaatacatgcagtttgtttgtttgtttgtttgtttgtttttggtctctgtctagatctccagtgaatagaagtggtaagtgtggatatcctttttgttcctgaacttagaggaaagattagatattttcattatttattatgatattattttcataaatggccttcattagttgaaaacattcccttctagtgtgttaagtgttttgttttttaattaggaaaagacattggattttgtcattttttttcttcctttgaggtgataatgtgttttttctcatcattctcttaatatcgtgtattatattgattggtttttgtatgtatgtaaaaccttttttaaggtttttcttaaagttttgaaaagctattagccagaatcatggagtaataagatacaatatttttccttttttaaaaaagtgaatacatgtgtagagttaagaagctattgcacatttatgatttaataaaataattctaaaggaaaaaaaataaggtttttacctgccaagtacaatatctggacttcctcaggaacaattgctatttattttttcccctatgtattaacaatgctttctgcttcattgcttgcttcatgactcttttgttgaaaactagacatttctagtgaaggggaccataagagaatggggaaactaagtgcaaaaaattagagaggaagacaaaccatgagagactcctaactcttggaaacaaagggttgcaaaaagggaggtgggtggggggatggggtaactaggtgatgggcattagggaaggcacatgatgagatgagcactgggtgttatatgctggtaaattgaatttcaacaaattttttaaaaaagaaagaaaactagatatttgaaatattgtgatgtttcaactctagaaatgttgttgctgcttgtatgtttatttaaagacttttttaaaagcctaattcctcaaatttacatttttgtttgtttgctgtagccattgaaatctcattcagcttgcttggtcattagctaatgattgaacagagaacatttttggcaccaaaaagaaatcccagtctttgacaaggagctgtatgtgtatattgaggctgtacatgtacattaagtgctcaggcaggcagtttacagcacgccttgttttcactttctgcttgcatcagggtcagcaataagtgaaagatcaagattgttttcaggtcttttctgagcatacacacaactatacagagtctctagctgagcctacaacatagctgtgcagattctcagagccatatgggagcttttgaaagactatataggggcagcccggggggctcagtggtttagcaccgccttcagcccagcgcctgatcctggggacctgggatggagtcccaggtcgggctccctgcatggagcctgcctctcccctctgcctgtgtctctgcctctctctctgtgtgtctctcatgaataaataaatacaatctaaaaaaaaaaacaagactatatacatcccattcctcaaactttatacatttccttctccaggtctagaattagtacttctctaagaaagtttgatttgtgttaataagaagtaatagtaaatgaccaaaattgtacactttccattttaatcccatatgtaaataattgtaaattatcactacaagaaaagttgaacaacaaattacttttcttctagtcatcaaagaattgaggttgcagagcaaaccatactttcttcgccccctcatgtccagaaagacatggctctacaattttctcaggactcctataacaaagtaccacaaagtaccacaaagtcacatgagtgactttactcatttttttaaaagattttatttattcattcatgagagacacagagagaggcagagacataggcagagggaaaacaggttctcttcggggagcctaatgcaagagtaaatcccgggaccctgagctgcaacctgagccaaaggcggacgctcaaccactgacccacccaggtgacccatatctttacttttcaatggctttttacctcacagtattatactatatttagccctataggcacaataaaattttaaattattagcctgactaggctgttttcctacttaaagataatcaaatatgaagaaatattcctcaaatttatagattcttgtgattcaaaattcaaccaatattcatagcatagtattcaaaatcttaactatctctaaattggggaacaaggcatggaaacatattccaacacaaacacgccctgcacagccatacttttcctatttaagaaaagtttttatctttattaattttgtagtaactgtgcatggttatatttccccaaaacatattttttaaaaattttatttattcatgagagagagagagaggcagagacagaggcagagggagaagcgggctccatgcagggagcccgaagtgggactcgatacggggaccttgagatcacaccctgagctgaaagtagatgctcaaccaccaagccacccaggcatcccccaaaacatatttaattaaaagattgtaaatctggcaaagatcaagaattttgcagtaaatatctatatactcacaatctaatttctatcgttaacatttaactccatttgtttattaactctgcatccttctatccattcatttatcaatccattcagtttgacatcactaataaaaaacttcagtactcatataattaactataattattgatttgttttcaattttttcttttttttaataaatttattttttatttggtgttcaatttgccaacatatagaataacacccagtgctcatcccatcaagtgcccccgtcagtgccggtcacccagtcacccccacccccggcccacctccccttccaccacccctagttcgtttcccagagttaggtgtctctcatgttctgtctccctccctgatatttcccactcattttttctcctttcccctttattccctttcactattttttatattccccaaatgaatgagaccatataatgtttgtccttctccgattgactgatttcattcagcataataccctccagttccatccacgtcgaagcacatggtgggtatttgtcttttctaatggctgaggaatattccattgtatacaatttttttcttatgatgttaaatttacatttgatgacttcgtgagaaaaaccagctctgctctgtagtatctactgatttctgtgacacaaatactttcaccatggtcagcttcaagctaccaattgtgttatctctgaaagcacataaatgatgcgcataatcaactctcatgtcgttttgtagatttaaaaaaaaattactttgagaataaccgaggaatggaattgctgggttagacttcaggtttatggatataatttaaaagaaactcctatatcttattccaaagaaccagtttttccaaagttccatttcacactccctacaaaatatataagatctcgttagactttttttatttttgccaattttattcttcctggtgattgtattctgctttgaattaacatttcttagatgactaataaagttgaacatgactttttgtacatgttggcaatttggatatcttattttttgaaatatctttttaaaactcagccgatttttatcaggtcatctgtttttaaattgtgtatgctgtagaaatctttatctttggatataagtattttatcagttatatattttgaaactcttttctctcaatctgtggtttgcatacttattttattttgtgtcttttgatgtgcaagaagtttaaatttttattaagtttaatttatcattttatcttctgtgattttatatctggaaattgttagaatgtgtttgcctattttaagttataaagaaagatatgtacttatatatactctaaaaatgttatgtcttaagcgtttatgcttggatttctaattgcttttattcttatgactctgatttttaaaagtattgttgactataatatgaagcagagatgaggactcttattttttaaaatacagatatctacccaaatttggggggaacattttattgaaaagatgttttttttcctctggaatgctttggcttctttgtcaaaattcaaataattatatatgtgagtgacaatttcaattaaatatatatgtttgctgattcttacattagtgccacaatttctagattactatagctttattataagtaattaatttggatgtctttgggtttttaaatttattttagatattctagatgctttgcattccccaaaatttcacagttggagtattgtaaatttttgtactatacatgaaattgcaataaaaactatatatcattggggggctagattgacatttaaactatcttgatactgggatacctgggtggctcagcggttgagtgtctgcctttggctcagggcatgattctgggatccgggatagagttccacatcaggctccccgctgggagcctgcttctccctctgcctatgtctctgcttctgtgtgtgtgtgtgtgtgtgtgtctcccatgaataaataaataaaatctttttttaaaaaaatcttgaatcttgcaaatcatgatcttaatatatttatccatgcatttaggtcttcttaatatctctcaccttatttttgagttttaaaaaaggattatatcaagagttataaatggttatattacataccaaagtaaagcatttgtcactttattattttttatcatttttatttatttatgatagtcacacagagagagagagagaggcagacacaggcagagggagaagcaggctccatgcaacgggagcccgatgtgggattcgatcctgggtctccaggatcgcgccctgggccaaaggcaggcgccaaaccgctgcgccacccagggatccccatttgtaactttattaagtaaatggaacaaattaatcattaaggcaaaggcattctgaaaaataagtagacacaagacatattaagaatttttttgtgtgtgtattttttattggagtttgacttgccaacatatagcataacacccagtgctcatcctgtcaagtgcccctgctcagtgcctgtcatccagtcaccccagtccccccgctcacctcccttccaccaccccttgttcatttcccagagttaggagtctctcatgttctgtcacccccattgatatttcccactcattttctctcctttcccctttattccctttaactattttttatattctccaaaagaatgagaccatataatgtttgtccttctccgattgacttacttcactcagcataataccctccaggtccatccattttgaagcaagtggtgggtatgtgatgtttctaatggctgagtaatattccattgtatacatagaccacatcttctttatccattcatctgtcgatggacactgaagctccttccacagtttggctagacattgctgctataaacatcggggtgcaggtgtcccagcatttcactgcagctgtatctttgggataaatccccagctgtgcaactgctgggtcatagggcaggtctgtttttaactctttgaggaacctccacacagttttcctgagtggctatagcagttcacattcccaccaacagtgcaagaggattcccttctccacatcctcttcaacatttgtggtttcccgtcttgttaattttccccattctcactggtgtgaggtggtatctcaatgtggttttgatttgtatttccctgatggcaagggatgcggagcattttctcatgtgcttgttggccatgtctatgttttcctctgtgagatttctgttcatgtcttttgcccatttcatgattggattgtttgtttctttgctgttgagtttcataagttctttttagatcttggatactagccctttatctgataggtcatttgcaaatatcttctcccattctgtaggttgtcttttagttctgtggactgtttcttttgctgtgcagaggctttttaccttgattaagttccaatagttcatttttgcttttgtttcccttgccttcttagatgtatctaggaagttgttgtacacaagctaaccttgcacctaaaggaactggagaaagaacagcaaataaaacctacacccagcagaagaagagagttaataaagattcgagtagaactcaatgaaatagagaccagaagaactgtagaacagatcaacaaaaccaggagttggttctttgaaagaattaataagatagattaaaccactagccagccttattaaaaacaaaagagaaaaacgttagttaataaaatcatgaatgaagaagggagatcacaaccagtaccaagtaaatacaaatggttttaaaaatgtattatgaatacctatatgccaataaattaggcaatctagaagaaatgaatgtatttctggaaaaccacaaactaccaaaactggaacaggaagaaatagaaaacctgaacaggctgataaccagggaggaaattgaagcagttatcaaaaacctcccaagacacaagactccagggccagatggcttcccagaggaattctagcaaatgtttaaagaagaaacaatacctattctactaaagctgttctgaaagttagaaagggacagaatacatccaaactcattctatgaggccagcatcaccttaattccaaagccagacaaagaccccaccaaaaaggagaattatagaccaatatccctgatgaacatggatgcaaaaattctcaacaagatcctagccaatgggatccaacaatacactaggaagattatttaccatgaccaagtgggatttatccctgggatgcaagtttggttcaacactcataaaacaatccatgtgattgatcacatcaacaagagaaaaacaaaaccatatgaccctatcaataaatgcagagaaagcatttgtcaaaatacagcatccattcctgatcaacactcttcagagtgtagggatagagggaacattcctcagcatcttaaaagccatctacgaaaagaaaagcccacagcaaataccattctcaatggggaaacactggagcctttcccctaagatcaggaacacgacagggatgtccgctctcaccactgctattcaatatggtgctagaagtcctagcctcagcaatcaggcaacaaaagaaataaaaggcattcaaattggcaaagaagaagtcaaactctccctctttgcagacgacatgatactgtacctagaaaacacaaaacactccatcccaagattgctagaactcatacagcaatttgtccgtgtggcaggatacaaaatcaatgcccagaaatcagaggcatttctatacactaacaatgaaactgaagaaagagaagttaaggagtcaatcccatttacaattgcatccagaagcataagatacctaggaataaactgaaccaaagaggtaaaggttctatatcctaaaaactatagaacacttctaaaagaaattgaggaagacacaaagagatggaaaaatattccatgctcatggattggaagaattaatatagtaaaaatgtctatgctaaccagggcaatgtacacgttcaatgaatccctatgaaaataccatagattttcttcaaagagttggaacaaatcatcttaagatttgtgtggaatcagaaaagagcccgaatagccaggggaatattgaaaaagaaaaccagggccggacgcatcacaatgccggatttcaggttgtactacaaaactgtggtcatcaagacagtgtggtactagcacaaaaacagacccatacatcaatgggacaaaatagagaacccagaaatgggccctcaactctatggtcagtcattattccacaaagcagggaagactatccactggaaaaaggacagtctcttcaataaatggtgctgggaaaattggacatccacatgcagaagaatgaaactggaccattctcttacaccatacacaaggataaactcaaaatgggtgaaatacctaaatatgagacaagaatccaccaaaatccttagaggagaacacaggcaacaccctttgggaacttggccatattaagaattcaattcactaggaatgaacacagttctgaacttctttgtgtcaaatattaaaattaacatatacgactacagttgaaagaatgcaaaatttataaaaccaggatcactgtaatgggttttattaaaatttactctatatttataaatttagtagatattatttaattgaagatgtaggaagattccaataaaaaatataacaagttagatattgtaatttcattgatttaggttacatctaaaataacattcttagatttttgagttttggctgatatatacaactctgtttctacaaacccaaaaaggaagagaatttttatcattccagatagcttccttatgcccctttccagtccactcctctaccctgaagcaaatattgttttgatttcattcaccataactgtttaattttaaatctaccagaaaattgtttttttttattggtattatttcattatgttaatatatgacaaatgtttatccatttacctaatgacatttatgttatttctagtgtttgacctttatgagtaattctgccctaacactgttgtacagctcttttgtgggtatttgtttatattttgcttgggtaaatatcatgagtgaaattactacctcatagcagagaaaaaagcttaaatttgtaagacattggcaaattgacttccaactggttgcaccattttatatccccaccattggtgtttgaatttatcatagtacaatgtaaaaaccagggaattaccatggataccacccctcacatcttattcagatttcaccagtttcacctgcacttgtattcgtgtgtgtagttccatgcaattttatcacgtgtgtgaattcatataaccaacagctcaatcacaacacagagcttttgcatcactacaatggtttccctcatggtacccctttaaagccatactatattttcatgttcattcttttcccagctcctaactcctggcaataggtaaactgttctccatctttatgatataaccgttttgagaataagtttttctgagcatgcatattgagaaaggtgaagaatttggaccattagtgaaattaccatacaactcaggaatacagcacattagaaagtgacaactactgagggaaaagaaaatattagcaataggtggggactattgacagctgcaagagagaatggggttcaatttgagtgggtcaaacagggctttgagagaagataatacctgagtaagaataggagaggtcagggagttatctaagtggatttctggaagaagaaatttccagtcagaggaaacaactacaacaaagtctgtaagataggaacatgcctgctgtttttaaggaatggaaagaggctgatttgactggtgtaaaggagccaggagtataataattgaagaaaaggtcagaaaagtaacaaatcatataacatgcacataatattataccaacattattagatataagaatatatttaagaaccaatgcatttctttagaaccaaaatatacagaacatacaatttaaaaaggtatgtaattcacattatcatcagcatcataaaatacttaggaatagtattcttatatattttggtaaactcattaaaaaataaaataataaactcattaaaaataattaataaactcattaatgccaataatttgtggaattttttgtagttgctaaataattattcacttgaataaatactaagaaaaaggctcaaaacttcagtatgtttaagttcaaaatttatgtttaaaatacctattattaaaagagatataaatggtcacaaaattgttctatgagttcagtgaaatctcaaacaaaacttaaacataaaatttctgctttggatcaagaaagagtaacaggggtttcaaacaacaacaaaacggaataaaatatatgaaacaatgattattgagacattgggcatcagacatcaaaggacaatgataactgagagatggaaaacaagtgaggaaggccctacaattgtcccagctgacttcctagagagtttccaggaaccccagaagaatctacctttctttctgacttgtagatcaatttaggaattcagggaaaccaaagtggctagggtttgcaaagtgccagagaagaaataactgtacaagcagagggaaagaatatcacagagatctatagagtgctccccttaagtctccatgtgagcactgaacagtgtatatagatgaaactacccaaggttggagaaggaatcacctgggaagaattgggggaacagtcaatggaatccacacaaggtccagaatagtcctagtttccaacagttaaagtgaaaaacctcacaactcaagacatcaggtagagtactgaggacaattttactttagtagtggggagaatttagctctacactaaaaatagtttcagattctgcctaacaatcctaaaacaatacccaaaaggatcaaatcataccaagaaactgtgttttagaacaaacctcaaaactacttatggaatgcaaaaatatctatcatctaataagggaaattcccagtgtttgacatccaattgaaaattaccagccatgcaaagaaacaagaaaatatgacccagaaataggagaaaattcaatcagtagacaagtataaccagaaatgacatagatgagagagttattagatacattaaaaataaatataactatatttcatatgttcaacaagctagaggaaagattgaccatgttaagtagaaacatggaaagtatatgttaaaagactcaaatcaaaattctagacaggataactaaaatgtttggcatgaaaactatactagatgggattagctgcaggttaggcattgcagaagaaaagattagtgagttcaaagacagaatcaatccaaaatgagatactgagaagataggaagttggggaaaaaaataaagaatgcatcagtgagctgtgatataattcaaatggtccagaatgtctgatttgaagaaataatgtcctaatttttctcaaatttgatgcaaaacaaatccaaagatttgtatctctaccaatactaaaaacaaagaaaactaaaccaaatcacatcaaaatcaaatttctcaaaaccaatgacaaaaaaaaaaaaaaaaaatcttagaagccagagaaaaaagtaacattatataaagtggaatgaatataaaaatggaagcagatttcttacttaaaatagtgtaaaccaggtatgagaggaataatatttttaaagtatgaaaagaaaaaaaatcattgccatcttaaggtttatgtgatttcaagaaataccaagtaactaaaacaatcttgaaaaaaaataacaggggaggagcaagatggcggaagagtagggtccccaaatcacctgtctccaccaaattacctagaaaaccttcaaattatcctgaaaatctatgaattcagcctgagatttaaagagagaccagctggaatgcaacagtgagaagagttcgcgcttctctcaaggtaggaagacggggaaaaagaagtaaagaatcaaaggccttcgagggggaggggccccgcgaggagccgggctgaggccggggcgagtgtccccaggacaggagagccccgtcccggaggagcaggagctgcaccgaccttcccgggcggaaaggggctcgcggggaggtggagcaggacccaggagggcgggggtgccctcgggttctccgggacagtaacagaacaactgcgcgcccaggagagtgcgccgagctccctaagggctgcagcgcgcacggcgggacccggcgggacccggagcagctcggaggggctcgggcggcggctccgcggagggggctgcggggcgggagcgcgattccaacagcgcaggctccggagcacagggcgccgggacacagcccaggatccggcctcccccgggacaggcagagtccgggagggcccaggacagcgaggacgctcctgccccagctgagcagatcagcggccccgccccggagcctccaggccctgcagacggagttcctgccggagctgaatccaggtttccagagctgccccgccactggggttgttcctcctggggcctcacggggtaaacaacccccactgagccctgcaccaggcaggcgcacagcagctcccccaactgctaacacctgaaaatcagcacaacaggcccctcccccagaacaccagctagactgacaacttccaggagaagccaagggacttaaagtacacagaatcagaagatactccccggtggttcttcttttttttttgtttttttttttgtttttatttgttttttttttttttttttttttgctttttgatttgtttccttcccccaccccccctttttttctcctttctttttctttctctttttcttctctctttttttttcttcccttttttttctctttctcttttctttccttctttctctcctctctttttctctttttcccaatacaacttgctttttgccactctgcactgagcaaaatgactagaaggaaaacctcacctcaacagaaagaatcagaaacagtcctctctcccacagagttacaaaatctggattacaattcaatgtcagaaagccaattcagaagcactattgtacagctactggtggctctagaaaaaagtataaaggactcaagagacttcatgactgcagaatttagagctaatcaggcagaaattaaaaatcaattgaatgagatgcaatccaaactagaagtcctaacgacgagggttaacgaggtggaagaacgagtgagtgacatagaagacaagttgatagcaaagagggaaactgaggaaaaaagagacaaacaattaaaagaccatgaggatagattaagggaaataacagcctgagaaagaaaaacctacgtttaattggggttcccgagggcgccgaaagggccagagggccagaatatgtatttgaacaaattctagctgaaaactttcctaatctgggaagggaaacaggcattcagatccaggaaatagagagatccccccctaaaatcaataaaaaccattcaacacctcgacatttaatagtgaagcttgcaaattccaaagataaagagaagatccttaaagcagcaagagacaagaaatcctgacttttatggggaggaatatcagggtaacagcagacctctccacagagacctggcaggccagaaagggctggcaggatatattcagggtcctaaatgagaagaacatgcaaccaagaatactttatccagcaaggctctcattcaaaatggaaggagagataaacaacttccaagacaggaaggaactgaaagaatatgtgacctccaaaccagctctgcaagaaattttaagggggactcttaatattcccctttaagaagaagttcagtggaacagtccacaaaaacaaggactgaatagatatcatgatgacactaaactcatatctctcaatagtaactctgaatgtgaacgggcttaatgaccccatcaaaaggcgcagggtttcagactggataaaaaagcaggaaccatctatttgctgtctacaagagactcattttagacagaaggacacctacagcctgaaaataaaaggttggagaaccatttaccattcgaatggtcctcaaaagaaagcaggggtagccatccttatatcagataaactaaaatttaccccaaagactgtagtgagagatgaagagggacactatatcatacttaaaggatctattcaacaagaggacttaacaatcctcaatatatatgccccgaatgtgggagctgacaaatatatcaatcaattattaaccaaagtgaagaaatacttagataataatacacttatacttggtgacttcaatctagctctttctatactcgataggtcttctaagcacaacatctccaaagaaacgagagctttaaatgatacactggaccagatggatttcacagatatctacagaactttacatccaaactcaactgaatacacattcttctcaagcgcacatggaactttctccagaatagaccacatattgggtcacaaatcgggtctgaaccgataccaaaagattgggattgtcccctgcatattctcagaccataatgccttgaaattagaactaaatcacaacaagaagtttggaaggacctcaaacacgtggaggtgaaggaccatcctgctaaaagataaaagggtcaaccaggaaattaaggaagaattaaaaagattaatggaaattaatgagaatgaagatacaaccgttcaaaatctttgagatgcagcaaaagcagtcctaagggggaaatataccgcaatacaagcatccattcaaaaactggaaagaactcaaatacaaaagctaaccttacacataaaggagctagagaaaaaacagcagatagatcctacacccaagagaagaagggagttaataaagattcgagcagaactcaacgaaatcgagaccagaagaactgtggaacagatcaacaaaaccaggagttggttctttgaaagaattaacaagatagacaaaccattagccagccttattaaaaagaagagagagaagactcaaattaataaaatcatgaatgagaaaggagagatcactaccaacaccaaggaaatacaaacgattttaaaaacatattatgaacagctatacgccaataaattaggcaatctagaagaaatggacgcattcctggaaagccacaaactaccaaaactggaacaggaagaaatagaaaacctgaacaggccaataaccagggaggaaattgaagcagtcatcaaaaacctcccaagatacaagagtccagggccatatggcttcccaggggaattttatcaaacgtttaaagaagaaaccatacctattctcctaaagctgtttggaaagatagaaagagatggagtacttccaaattcgttctatgaggccagcatcaccttaattccaaaaccagacaaagaccccaccaaaaaggagaattacagaccaatatccctgatgaacatggatgcaaaaattctcaacaagatactggccaataggatccaacagagtacattaagaaaattattcaccatgatcaagtaggatttatccctgggacacaaggctggttcaacacccataaaacaatcaatgtgatttatcatatcagcaagagaaaaatcaagaaccatatgatcctctcattggatgcagagaaagcatttgacaaaatacagcatccattcctgatcaaaactcttcagagtgtagggatagagggaacattcctcgacatcttaaaagccatctatgaaaagcccacagcaaatatcattctcaatggggaagcactgggagcctttcccctaagatcaggaacaagacagggatgtccactctcaccactgctgttcaacatagtactggaagtcctagcctcagcaatcagacaacaaaaagacattaaaggcattcaaattggcaaagaagaagtcaaactctccctcttcgccgatgacatgatactctacatagaaaacccaaaagtctccaccccaagattgctagaactcatacagcaattcggtagcgtggcaggatacaaaatcaatgcccagaagtcagtggcatttctatacactaacaatgagactgaagaaagagaaattaaggagtcaatcccatttacaattgcacccaaaagcataagatacctaggaataaacctaaccaaataggtaaaggatctataccctcaaaactatagaacacttctgaaagaaactgaggaagacacaaagagatggaaaaatattccatgctcatggattggcagaattaatattgtgaaaatgtcaatgttacccagggcaatatacacgtttaatgcaatccctatcaaaataccatggactttcttcagagagttagaacaaattattttaagatttgtgtggaatcagaaaagaccccgaatagccaggggaattttaaaaaagaaaaccatatgtgggggcatcacaatgccagatttcaggttgtactacaaagctgtggtcatcaagacagtgtggtactggcacaaaaacagacacatagatcagtggaacagaatagagaatccagaagtggaccctgaactttattggcaactaatattcgataaaggaggaaagactatccattggaagaaagacagtctcttcaataaatggtgctgggaaaattggacatccacatgcagaagaatgaaactagaccactctctttcaccatatacaaagataaactcaaaatggatgaaagatctaaatgtgagacaagattccatcaaaatcctagagaagaacacaggcaacaccctttttgaatcggccatagtaacttcttgcaagatacatccacgaaggcaaaagaaacaaaagcaaaaatgaactattgggacttcatcaagataagaagcttttgcacagcaaaggatacagtcaacaaaactcaaagacaacctacagaatgggagaagatatttgcaaatgacatatcagataaagggctagtttccaagatctataaagaacttattaaactcaacagcaaagaaacaaacaatccaatcatgaaatgggcaaaagacatgaacagaaatctcacagaggaagacatagacatggccaacatgcacatgagaaaatgctctgcatcacttgccatcagggaaatacaaatcaaaaccacaatgagataccacctcacaccagtgagaatggggaaaattaacaaggcaggaaacaacaaatgttggagaggatgtggagaaaagggaaccctcatacactgttggtgggaatgtgaactggtgcagccactctggaaaactgtgtggaggttcctcaaacagttaaaaatagacctgccctacgacccagcaattgcactgctggggatttaccccaaagatacagatgcagtgaaacgccgggacacctgcaccccgatgtttatagcagcaatggccacgatagccaaactgtggaaggagcctcggtgtccaacgaaagatgaatggataaagaagatgtggtttatgtatacaatggaatattactcagctattagaaatgacaaatactcaccatttgcttcaacgtggatggaactggagggtattatgctgagtgaagtaagccagtcggagaaggacaaacattatatgttctcgttcatttggggagtataaataatagcgaaagggaatataagggaaaggggaagaaatgtgtgggaaatatcagaaagggagacagaacataaagactgctacctctgggaaacgaactaggggtgttggaaggggaggagggctgggggtgggagtgaatgggtgacaggcactgggggttattctgtatgttagtaaattgaacaccaataaaaaataaataaataaataaataaataaataaataaataaacaaataaataaataaataaataaaaagaaaaaaataacaaagatactgtgtctggctcccactctcacagacattgcagtgcaatgagctccagagagacagttccagggcaagtgagagccagatggcactgggcagttctattcctcactgagacaataattaaacacgtgcagaggagatcctaagaaactgagaggataatgtcatcatacacattctttgtccaaacttgccaggaggagcacaagaagcacctagatacttcagtcaacttctcagagtttttaaagaagtgctcagagaagtggaagatcatgtctgctaaagagaaaggaaaatttgaagacatggcaaaggcagataagccccattatgaaagagaaattaaaacttatatctcctctaaaggagaaacaaaaaggaagttcaaggatcccaattcagtcaagaggcctccctcagcctttttcctgttcctgtttttttttctgagtatcactcaaatatcaaaggacatcctgatctattcattggtaatgatgcaaagaaactgtgagagatgtggaatagctctgctgcagatgacaagcagtcttataaaaggaactgctaagctgttaattgctaactgctaaggaaaaatactaaaaggatattgttgcatagcaagctaaaggaaagcctgatgcagcaaaaaaggaagtcatcaaggctgtataaagcaagaaaaagaaggaagaggatacagagtggcattcagttaacagaacaattatttaatataagttgcatcagagacaactgatgatggaaacgactatctcatatataattaatttgtgctgtgtaccaacaagaacctggcttgaatttccatgccaatttacaacccccatactgtaccagacaaggttagtgactactaaaatatcacaggacagagctctctaaagacacgtttggtagtgtgttaatggcaaaaagacactgtacagtttaaaaacatatcttacacagccttaaatttctaaataaatacaatttttaatataaaaaaactcacaaagatggtggattcacacttcataatttaaaatctcaccacagagccatagtaatcaaaacagagtggtattggcataaggataaacatatagagtaataaacaagaacagagtccaggagtaacctcttacatatatggcaaaataattttcaataaggttgcccagaccattcaatgtaaaaagaatagtctttttaacaaagggtgttgtgaatattcgacatccattagcaaaagaatgaagttggacctctaccatacaccattaaaaaattaaatcaaagtgtaccaaaaacctaaatttaagagttaaaaccatgaaactattgaaagaaaagaagataaaatcttcatgaacttggatttggcagtggtttcttcaatatcatatcaacagcacagggaacaaccctcgtcttccttgagaacaattacataaattagactattttaatacatcaaaagacacaatcaagagaatgaaaagacaacccacagaatgggttgcacagatgaaaaatctaattaaaatagtaatatgtcaaagccaataataaataaaaactgtaatacataaagaaaaattacagtttaattcactatattaacagaataaagcaaaaacaaaattgaaaacaaacaaataatacacaagtaacaaaaattatatgatcctagatcatgttgtttttttgacaataaatgacaaggaatgaaaataaaattataaaataaatgaaatgtgtccacaatagactttaaagtgcatgtttttggcaactttattcataatagcccaaacctagaaacatcccaaatgcccatcagcaggaaaataagtgggaaaattgtagcatattcatgcaatagaactcaactgaaaaatataaaaggaataaactattgacatatacaatagtttataccatatacatggtctcaacaacattatgttgagtgacagaaattaaatacagtagtgtattattacagtttataagttcttgaaaaggcaaaactaaaacgttggtgatagaaattagatctgaaaaaaaaaagaaattagatccgattgcctgggggaaaattgatattctatatcttgattggaatatggattatttgggtgtgtacatttgtcaacatatgtcaaagtttatacttgaaagctgggcttataaaaatatatgtctgcaaattatacctcaatcattacaaaaagaggtatttcaacaatttttagtatgagggaagtaaccccagacaatcctactagacgtttaagactattgaattgtaaggaagatacatttatcattttatgacattaatgtatgagttggaagagagagaagaaaattatttttcatcctttcattgtaaccatgccttcatatatccacaatgtcttcagtatcatatctttgaatattttgctcacaaatatggaacaaaagccctaaaattctctcctaggaatatcatgttttcaaaagaagaaaatcctattttactacaatattcctatagcagtaggaaatatggaaaatatgatggtccctctattttatgtgagatagaaatatagaaacagggagaaaaaggttgatttaagagaaaaaaaaaagcaaagcactgtcagtactgggggagcaaataatgaaaatgttttgctttctaggaggatatgataaccagtctccacaaggatccccaatgtctctcaacctccagtaattaactcttgtacagtcctctcccacattttatcagaattggcctagacatcactatgatcaactgaaacagcagaagtgatggtatatcaatcccaggaacaggctatggaagacattgcagctcccatccctttctttctctcatcacttgttcagctgcatgatgaggaactgagttctccagtcaacagccatatgaatgaattttcttgcaagtagatccaccagccccagtcaagccttcagatgactgcagctttagccaaaccttgactgcaacattatgcagactaagccaaactactcagctaaactgctccccactttctgacctaagaaataatatacatttattgctttaagccactgaattttggggtaattttttatacagtactaaatagctaattcactgggactctatcagaaaatgtggattacagttactcacttactaccatggcctcagaaatgcatgctgatttccagaattcatccagtttttctttaaatgtagcagtttttcactttatatgtcgtgtctttaaggttggttacattacatatttgaagatgcagaatagcctgccttgaccctcaaaattagtccctgtctcctctaagaatctggctgctgttctcaaaatgctgctcagcatggtattatcctagctcgaagtttaattgataattcatagacatttactctattatagagaactagtaatttccatgtgagattttgcatccacaaatgccagttacccttgttctacctgactgtccaaaagcataagtcaataatgggaataaagtgagaaggagaaactgaagacaccaacttcttatagaactattatgtatttctgctctgaaccttcttctatcctgggtctagatgccttgggtctaggcacagggtaattttgaatagcataatcatgtactttaccccatgtaaactggcaatcaaaagtatgggagaggttttaagtctcttgacaatacctgaaagaaaaagggaattttacccttttccttttaaggtctctatttagcccattgatggggagagaaaacttgcccaggggaaatgtccttaccagtgttattttccaaaaatgttcacccaaagcctaaagcagaacttatctatgctacttgcctcaatcttaggtagtaacaactggagccttaacttcttcgaactttctcacctgtccagatttatgaaaagaagctttattttctcctcttttccccagtctcatggaaagaccaggaataatcctaatacaggaagtccctattctatcctattattcttgaattagagtaattcatagcatctcttaactgcctcgggtggaatgagaaagcaggcagaggaaatagggttaggaaaagaactgcagacttcttttgtatcacaaccaccaaaagtataaaattaaggatgcctgggtggcttagcagatgagtgtctaccttcagctcagggtgtgatcccagagacccaggattgagtcccagatcaggctccctgcatggagccggcttctccatctgcctatgtctctgcccgtctctctctctctctctaatgaataaataaataaagtcttttttaaaaaatataaaagcaatcccaaattctgcttagtaaaaatacaaaaaaatctaaaactttttggttagccagcaaaccacgtacagattctcattgtccttggttatgtggcacagcacaataaagactggcatgaaaatccatttggctactcaactggtttgaaatattaaccctacttcttgatcagtaatactcaattccaacttcctgctaggtttacctgaagagcttctcaaaaagtatcattactaggattccacctcagactaatcaaatagaaatttcttggtagtggaggagaagaacagaaggtagagttatcaatcagtaatttaaatgatattctcaaatgattatacaatgcacccaggattaagacccacaagcctatgctgacatctccatgtctcctatttcttatctagtagctcatgctgagtcttcaaggcagagtgaggtggaagggagtacattgttcaaggactctctaatcacacccaccacaatgggcaaagacaggaaatacttgaactctgttattctcattaagagtttcacccacaatgcattgagtgttctttatcaatatcactatcttcatgagtgtaaagatactgaggtgcctcataaaacttgaatgtcactaaaaatcatacaggaaattacagtataactggccttggagtaaagctatggtagaatcctttggttctatcttgaaagtgttatttcattttctttatcttctaaatactctgatttcaaagaatatattaggcaagggtgatctttgaaatgaaattataagagtaagagcttgcttatgaagaaattgaaggtcattactctgtaattacaacaaataaaatttctagccatcttataaatgtagagaagccagagcacatttccttatgatgtggaaaacaaaggcaaaagaaatacagaaaaaattaaactgcattgtaacttagagccagcccattgacaagcacttaggacaggccaggtgatcttcctccaggagcccaactgccttcatgttaatacaatgccagagacaaaagaaaaccttagcttgacattagccggacctccaggatcctgtaaaattctctttggaaacttcctttatctctactctaccaagatatatgttagctaccatcccctaaacatatggcccactgatatgcatctgaagggtcgcatgactaaggttttactagacagtagtagatgaccctcaaggtcctggaaactttgcttccaaattccttagagacttaacactataccctaatcccctcccaacttgaaagtgtataatcaaccactcctcacaatcccagtgcagctctttctgcccatgggtcccattcctcatgctttaataaaaccactttttttttttgcaccaaaaacatgtcaagatttctttcttgactgttcactcctgaatcccaaattttacatcatttatatctgttatattaactagtctatttaatttttttttctgaattgcttgtagataaattagagaatcgtgagctctacctctcattctggcatgtaaatttataaattcatttggataatctgatcagaactctcattgattctgactttaaatattctgtaaagctcagtattttggagtatctaggtttccatttcaacttgtaatctttagaaaaatcttctcaacatctcagatctatgataaccatttaaatttcatctctacatccaaattgtgggattttaaaagttgtgatctgaaatataggttgctgaacattttagacatcctttttgtgtctgtctgtgagctcacagaagcatttctagaagaaggaggaggagaagaaagaatgaagaggaggagaaggaggaattctaactccagcacctaggctacttgtgtcttaggtaccattttaaaatctccaaaacaaatggcttgattttatccttagtgggttttccaaaattatgaatgcagcctctgttattatttaataagaggtaacttctggtgttttttattttgtttttaatagtccacaatgaatgcttgagtatgggaggggcagtgcatagatggtcatagataccctcaataaagaagactgcaatataggggatgtacatggcaatggccaaaaaaaaaatatttgtctgcactgcatcctgacatttgggattactagtgtcaggacagtttcatatcctgtgtttcaaacattctctctgtagtgggtagtgaacactggagctgaactagttagagtttgaagtctagatttaccattttccagtttatacattttaagtcttgctttcttcacctttaaaatgaacatgatatcaacttcacaaggtattgttgttgtgcccaagattgcgaatccgagaaaccactaaggagccgacaccgatgcaagtgcatgagggtttattagcaagctccagcttgggtccaagtatacctgacacagcggagcagggacatggacccccaggtgggttccagctgggtttttatgggctggtctaggggatttccagaaggagtggaggaatttcttaagctctgttttcattctgatatggggctttcaagggcgttctgtggtttttcctgtaactgaagtagggtaaagttcagctcttattcacaggggcctgagatggctgtacttgtgctaatgctgaacttgaggcggaatggccttaatttgctcggcctccacaattgtaagatctaataagatgttgtacatgaaatttagtataatgttaactgggcactatgaaaacactcaatatagtttgggttttgattattaattgtcagaggatactggtgttaaccagaaagccaggcccaagatggagtcacttgcccccaggagagcaaaccaagacttaattgcagtttcaacttgccaggagtagaattttaacccaatccatctagaattttctggtcagcaccaatgaggtgatttgtcacaagggccctccatctcccaaaggaagatgaggcaatccacctagtaagacccctttccttacctgtcagggaacatgatcacgcctgaaacagttccttcttttctcttgctactagcctcttcagcatattgcttcccttgatgtttaactatcacaaactactaagacatttttgtaagcagttgttggaaaatgcatataaatgccatttgtataatctgacaccaagaaagccctaggattaatttatggacaaattatgttgctcttatctttggttcctccctaactttattattaatgcaaaggttttcaattttatagctacgtatccttggttcatctgtgtagctcttttagagtaaatgaattaatgattaactttataaatcaaccaagacattctcaccaaaaaaaattattgcacagttcatcttttttttttcttttaaaccagccaaaatcttgttcaaaacagtacatattacatgattctagacagatatccaacaacacaaacaatatttcaggaatgaatgtaatttttacaaataaatctagatgttgagattatagttttgatatacaaaatcaagaggacagtggaatattttatacctgaaactaacataacactgtatattgactttattggaattaaaattaaaaaaaatagaaaggacagcgggatgcccttgcatatagtatatgaaatataaaattgacttcagagtgtagatttatatatcactggcagcatttgccataaacaatggcataggttgcctaaaaaaagcagaaggaaaaaaaaaatccttgttgtcaccaaagattattttccatgtattaagtattcaacaataataaataatagcaatatatatgttagagatttgtatttttaaaatgatgataaatctaatttatgaaaaaaaatgaattcagtatcttctctgacagaaaagaaatgccttccagaaatggcataataacagggccacacctccatctcttggctctgccatgcttcaaattaacttcaaattgaggtaggatccatctttacagttatccacagtattgccaagctcatatcttaaaagatttaagccaaataaaagatacagagctttccctcttggtaggttttgtaagtccagagattccctctaaatggatcaacttgggtagcatacttcttcccaaaacaattattgtggctgaagagatttgatatgtgaaccggctcagccttaatcacctatttaacccatagtccaggatttggagcctcactcaaaagtcatttacggaaaaataggaagacatcgtttctcaaaagaattttggggttctcaggcaaaaaaattgggagaggatggttggtgtgcaaatataacacatatttattttaagatataggagtagaaaataccaattatggaatgttagaaaaatctcaccctactttcttccacattggccatggtgtatatataaactttatttttttagtcaaaacattactctttgaaccctgttgaatccttttctttcttacatgttctcactggggactttgtttatcctttggggataggaaaacagacgggactccatgaaaaaaagactttttacctgcacccccatcttatacatgccttatggttcagataatatatgtcctcattacaaagatcaaggagttaatgatatttttggagtctttcagtacaatagataacatctaaggagtgactgggtggaatgtcatttacgttttccagaccactcaccgtgactcctggttcccagacataagcagcttattgaggacacctaaaccctaatctttgttttaagcagcttctggatgcctgagaagacaggttacaccagaccataacccttaataaaaacactggggccccaagcaaagatgagacttcttctgctttctaagtctctcaaacattctgcatctgctctatctctctatgtcttcaataaacttggctcccactttctttcagttcacatttgatttcaatcctgtgcaaagccaaggattcttttagttggttctgcaggaaccccctctgggcccttgtaatgcacttttgggatataggtggggtctggagccaacagccaagaaggaattcttgagatgtctttgatgcaaaaagatgattttactaaagcacagggacaagacagtgggcagatagagctgcactggggttgtgatgagcaactgattatatactatgaggttggggaagtaagaaaaaaaggaagtgtccaaaaagactttcatatgctaaagcagatcttaaggtactagaggccttacaactatcaagttaagtacattttttccctctagcaaagcattaacatcaagatagttggaagtttcctggaggaatgtcacatatatcccacccagtgtgggggaagtggaggaggttgcagggtgtcagctcgtgctttgtcttcaactagccttctgctctctcatcatttggagccagccagtttgcatcacttttgtcacagatggttgtatcacctcttttctctcttcctttttcctaggcaaataaagcatcttctagcactctgttttcaaatgcctaatttaagagttgttattaacagcaccaaacttgggatacctgcgtggctcagtcagttcaatatctggcttgattttggctcaggtcatctcagggtcatgagatcaagccatgaactgcactctgctctgagtgtggagtctgcttgagattttctccctccttccatctctgcctttccccctaatttctcttttctcaaataaataaataaatcttaaaaaaaaaaagtaccaaatttttccagcatcagttttcttccattatttcaggaatgtatactgattactgttgtgtatgtcttgcacatacacagagaatttactactaacagaagtcctgctttatactgttaaatataacagtaaataaatatattgttaaatataaataacaagattcaacaaggtaaatttgaagacctaattagctctattaaacaattcatgaatcaagcagctccgtctagcaagagatacttcaaggagttatataaaatgtcacgttttataggagagtatgagcaagaaatttattagtaaagaaaaggattgttccaggagaggccactttttaggggcaaaagcaaggggtcttattgtgtggattattattatggtgtaggctccaggcagccttttcaagtgtcagcagttgctatgtaattctaccaagtgcataaggcatagatgatacttgtcattgtaaaaggatacggctgaatgtattcaacttaagttgtgtattcaacttcaatttaaagaagttaaagaattatcatatttaatatatgaatcacctaggctctgtagttttatgagattccaatatttttcacacttaaaaaacaatgcttcaacatgtggctgtgagattggataactttaattcttgtttccattatggggatatttcttgcccaccaatgatttatgcccttaccaagggagaattctcaattcttgcaaaagaggtagcccttattcttcacccttagtcttctctttcctgtcatttccccagacagaaaactattagctctttctatgaagcatttccttcccatgcactccagtttcatgattttctcttctccactctttatagaagcatttttccctcttcatggtaacacatattttatttataaatgttaaatgacacatgtattttaaattactgtaggggcatctgggtggctcagtcagttgattgactcttgattttgtctcatgttatgatcccagggtcatgagatcaagcctgacagcaagctccaagctgagcatggagccttcttaagattctctttctctgggatacctgggtggctcagcagttgagcagctgcctttggttcaagggcatgatcctggagtgccggggttgagtcccacagaagcctgcttctccctctgcctgtgtctctgcctctgtgtgtctctcatgaataaataaataaaatcttaaaaaaaaaaaaagattctctctctcccgcccctcccccctacttatgtgctctttctcttttaaataaataaataaaaaaataattgcatactatatatccttacatgactatagtagttggctttttactagtattgctcaaaaggttaaaagacactagaaatgactctcttattgcttcttgatttgttttcagaagcttttttttatatactcagcctggtcttagacttacttgcagtatactccacaaacatgagagggcagcatctacagaaattgtattagctttaaaaagcattgctgggaattatatatatatatatatatatatatatatatatatatatatatatatatatatatatatatatatatttaagatttatatatatatttaagattgaactgagcacagagcccaacgcagggatccatttcagatgatgacccgagctgaaatcaagagttgagctctctctcttttttttttttaatttatttatgatagagtgagagagagagagaggcagagacataggcagagggagaagcaggctccacgcaccgggagcccgacgtgggatttgatcccgggtctccaggatcacgccctgggccaaaggcaggcgccaaaccgctgcgccaccccgggatccccaagacttgagctcttagtggcctgagacactctggtgcactgggaattatacattttatcagactattcactctttctcacttttctccacatattctccctaccacccactcaaatgtatttgtccagtccttttttaaaaaattaattaatttatcttttaataatctctacacccaacttggggcacaaactcatggccccaagatcgagtcccatgttcttttttgtttgtttgtttgtttatgatagacatagagagagagagaggcagagtcacaggcagagggggaggcaggctccatgccgggagcccgacgcgggactcgatcccaagactccaggaacgcgacctgggccaaaggcaggtgctaaaccgctgagccacccagggacccccgagtcccatgttctactgactgaaccaaccaggtgccctgtatttgtccaatcttaactcagttataccagttacactttagcttctatattgttaagggtattaatattgatatttgtacacacaagtcttttcccttttgctcattggttatctccaatctgagtaccgacagaaaacatttactttatgattctataaaagttgctttttttccaagttcaatatcataacttctaggtcaccagaaggagactattcctggtatcatactaaatgatgtatctgttcttacacttcagcaattgcttaagatcataccttatacttctttaaaatacctcaacttttctcaagttaccgtttctgccaaccttccacttctctctatattttttttgcaggataatttactctctgaatgctctgcacttaaatctttggagcatcagttgtcatttgtggttttccaccctctttgaacattctccttgcttgctataattttcccacattagaggctttcctctcaagtggaacgtagacaccggtgatacaggtgttttctctaaacagctcccatgatggctaggagttctattactgctcatgttcatgagaatctagctttataattaccaagtagtttgtgtgctatcctttaatacaacccttttcagctaacatttcccagaagtaaattctttcctttccagtttattgtggaggccgagaaaaattaaggccatcccacctaaagtttagcattagcacaagtacagccatcttaggcccctgtgaataacagctgaactttacaggaaaaactgcagaatgtcctcaatgtccttggcagggaatcccatgtcagaaagacaacagagcccagccagtggtagaaagtcccatattagaacatgtccttttatagataatcttttcatagagatttacttggtgaagatttctccttgtctcagtgtatatatattgttatgtatatataacattgcatatatatttcttttcactgttcccatttttaatcaattctttcttaatttataaataggttaatgaatttcaaaaattgtggattccactatgtgtgtatttatattaatttttacaatgactttttactgaagtatagttgacataacatatttgttttaggtgtacaacatagtgatttgacaattctacacattatgccatgcttaccacaataaggtagttgctgtcatcatatattattacaatattattaaccatattccctgtgctatacttctcatccctgtgatgattctattttgtaactggaagtttgtacctcttaatccccttcacctattttgtccattcccccacccaattttacaatggttttagatttatagaagagcccagagttagtgcaggtgttgccatgtactccatcctggtttaccctattagcattttaaacatttgtataaaatgatatacgttttatatatatttatatattatacatttttacatagtgctatactcacactaataaaccaatgttgatgcattattattaactgaagttcatgccttattcagatttccttagtttttacctaattctctttttctgttctagtattttatccagataccatattacattaatttgtcatgtcaacctaggccactcttggctatgacgatttctcataatttatttttaattactttgatggtttgaagagttctgacaaagtattttatagaatgtccttcaattagggtttgtcttcatttttcttaaatggttagacaagagttatgtgttttggggatgaagcccacactctattgagtgtagacagtcacatcatgtcaagggtacatgtggtcaacatgacaacacttttgacgttaatcttgatcacctggtcttaatctggagttatcaattagtgatagcagagaatgataggcagaataatggccccttaaagatatctacatccttattcccagaatctgtaagattatgttatattacatagtaaatagggattatcttaatagcagaaaaaaataaggttgtcaatcagctgactgtaggataggaagattatccaagattatctgaatgggcctattataataaagatctttaaaagtgaaaaaaggagatcaaacaaaggtcagagtgatgcagtaggagatgaattcaacctgccatttctggtttgaagatgaaggatagagaccatgagccagagaatatgagcagcctttagaaactggaaagggagggaaacagattctaccatagagcttccagaaggaaataatggaatcctcccaacaccttggttttagcccagtgagatctgccagacttcagaactttaatatgataatttgtgtagttttaagacactaaatttgcggtaatttgttagaacagcaataggagactattataaggatgtttaaaattcaaattgtaatagtcgatttatctatttctccatttcagttctattagtttttgcttcatgtactctgatattctgatgtaggtacatatacgtttaggattgttgttgtttttccagaagtttttaattagattctgttgtgcccaagattgcgaatccgagaaaccaccgaggagccgacaccgatgcaagcacacgagggtttattagcaagctggagcttgggtccaagtatacccgacacagcggagcaccgacttggacctcgaaatgggttccagctgggttttttataggctggtgtaggggattttcagaaggggtggaagaatttctccaagttctgtttacattctgatgtggggctttcaagggcattgagctctgttttcattctaatatgagactttctaccatgggcgtgggctctgttgtctttctgatatgggattacctgctgaggacattgaggacattctgcagtttttcccataaagttcagctcttattcacaggggcctaagatggctgtacttgtgctaatgctaaactttaggtgggatggccttaatttttctcggcctccacaattctagttagttaatatacaatgtaatattaatttcaggtgtagaatttagcaactcaacacttatatacaaggattgttatgtcttcttagggaattaactcctttatatgtattacacttcaactgaaattaatataaatacttcggctttcttacagttactgttagtatgatatatctttctctatccctttacttctaagtatctgagtctttataatttagagtgagtttcttattgacaatttagagctgggtcttgtcttttttatctatgctgacaatcacagtcatttaatcggtgtatttaaaccattcatgattaagatgattttttttatggagtcaaattaatatctactacctttgtaactgttttctattcgttgtattttttcttttttatctcccttctcccttttctaccttttctgttttcttatttttggttttctttttttcagtgcaaaatagtgattttattaaagcatggggacaggacctgggggtagaaagagctgctgcatgctgctgcccactgttccctgctgatgcccactgctccctgctcaccttttctagtctttttttctttttttttttttaagattttatttatttattcatgagagacagagagagagagagagagagagaggcagagacacagggagaagcaggctccacacagggagctcgacgtgggactcaatcccaggtctccaggatcatgccccgggccaaaggcaggcgctaacccagggatccctcaccttttctagtcttgacagatctttttatgtgattctatgttaccatctcctttagcatatcggttgtacttctgttaaaaacctttcagtgatttacctgaagtttgcaatatatacttttaaataacctaagctcacctcaaataaccttataccacttcatacataatgtgaatattttgtaatagagtattcccaaataatttttcttataccttttcttataccttatacctgtcattcatttgtccatatgctataaacacccaaaatactgctgttattattgcttcgaatggttaacctttatatctattaataataagaaaaaagaaagtttaattttattttcgctttttttctctgaccttctttccttttcttatgcagacctatttttctgatctatgtcatttttcttctgccttttcacatttcttgcaggccaggtacaccaacaacgaattcctttggtttttgtacataaatctttatttctccttcaccttattttttattgaggtggaatccacgtcacataaagcatatgattcagtggtatttattacattcacagtgctgtgcaacgatcacttctatctaattgtaaaacatttttatcactcctgaaggagacttcccacctatgaagctgtcacttttcattacttcctttcctcaaccctcagaaaccacttatctgtttcttgtctgtatggcttgacctattccagatattttatataaatttcattgtaccacatgtgacctggctttttttactcagcacactgtttttgctgggcatataattcattccactcccctgatggattccaattcactctctaccttttcttgcttacatggtttctgacaagaagttgactgcaattctaatcttcatccctccatgggcaatatgtttttctcccgtaacttcctttgagattttccatttgtctttggtttcatgcagtttgaatataatgtgcttaggtgtaatacttttagtgtttatccttttttggtattctctgagcttctgggatctgtgcttccatatctgtcaaatagtttaggatgttctcagccattatcatttcaaatatttcttctgctttctctcttcttctggtattccaattgcacagatgttacatctttagatagtgtcccatagtttttgaatgtttatagtttgttctctttttgtcattctttctttttttttaacattttagtttgggaaatttctgttcatctcttttcagggtcactaactctctcttgaccattttgagttcacagacaaaaaaaaaatgctgtcaaatttctgtgtctgcttatgtggcttatctggtcttgcatgtttccttttttatttctagtggagaccttttcatatcattcataatcattttaaatttcctgcctgataactacaacttctgtgtcatatctgagtttcattctgatgctgaatttgcttcttcaattgttttctgtctgtgtgtgttgttttgtttttgcctttggcatgccttgtaattttttgctgaaagtcatacatgttggatgaggtaatagaaactaaagcaattaggcctttaatagaaggatttatgtaaatccaattaagagttgggctatatttaatgttttccacagcataggcactaaaggctttaacttcctctactgtctttgtttttgtcctccacttggcattggggtttcactatgtactgttttttaaagtttaattctaatttccttttttattgcttgtttgacccaaggtttatagaagcatgttctttagtttccatatatgtggggatttttgctgttatcttcctgggttgctttctaacttaagtttactgtgaacagagaagatacttcttataatgtatcttataatgaatcttttttaatttattgagatatagtttgtggctcagaagatggtcgctctttgtaaatattctgcatgaacttgaatagaatgtgctttcttaaggggaaaggagagaaaatgagtgggaaatatcagtgagggtgacagaacatgagactcctaactctgggaaatgaacaaggggtagtggaaagggaggtgggcggggggttggggtgactgggtgatgggcactgagggtggcacttgatggactaagcactgggtgttatgctatatactggcaaatcgaactccaataaaaaaaatatacgaaaaaaaaagaacgtgctttcttttgctcaatggtatgtcctatatatgtgactttgtttcacctaattttatcagatttttatttatgaattctgaaggtctgttagataatattaagcatttatcatttatgtttattgtaaatgattattgttatataaacatttagtattataacgttcttatgatgaatgatccctttattgttatagaatgaccttctctatcctggataatattctttctttgttctataatctactgtgatgctaatagagccatttcagctatcttttcattaatgtttgtataatatgtctttttccatccttttaattttaacctatttgtatttttgcatttaaagtatttttcttgtgggcagcatatatttggctatttattttcttaaccaatccaacaatctgcctttgcatttaatgtcattattgatatagttcaagtctatcatctgtttattttctgtttgttctatctatactatcttaactttttcctctttttctgttttaatttattgattatttttgatgatccattttcttgccttttctggcctattagctgtaattttattgttattttagtggttgttcacagtttatggcattcacatttaacttaaaacattttaagcttgactgctgttacattatttcatgtctagtaggagactcacagcagtatattttcatgttttcttcctggactttgtgctattgttgtcatacattacatttttttcttctgttataaattccattcttcattgttactatttttgtttaaaaagtctcttatcttttaaatttttgaaacaataaaaagatatccttctataattacccatacagatatctgttcccagtgctcttcactcctttgtatagatacaaatttccattagttaccattttctttctgcctaaagggactgtcttaaacagtttcattcatttcatttcattcatttcatttcatttcatttcatttcatttcatttcatttcatttcatttcttgtagtgtaggtctactggtgatgacaaggttttttttctgcttgtctataaataaaaacattttttaaaagattttatttatttattcatgaaagacacaaaagagaggcagagacagagggaatagcaggttcccagcagggagcctgatgcaggacttgatcccaggactccagcatcatgccctgggttgaagcaggtgctcaaccgctgagccacccaggtgtcccaaatgaaagcatctttatttcacctttgcttatgaaaaatgttcactatgtattaaattctattctgataatatatgtttattccagtactttatgatattcctccacagttttctcagtttcactgcttacaatgaaaaatattctgtcgggatccctgggtggcgcagcggtttggcgcctgcctttggcccagggcgcgatcctggagacccgggatcgaatcccacgtcgggctcccggtgcatggagcctgcttctccctctgcctatgtctctgcctctctctctctctctctctctctctctctgtgtgactatcataaataaataaaaaaaaaaaaattaaaaaaaaaaaaagaaaaaaaaaaaaagaaaaatattctgtcatctttacttttgttcttctatacataatttaattttttttactctggtttctttaaatctctgggctattattttaaaaatttacttatttattcatgaaagacacacagagagagaggcagagacacaggcagagggagaagcaggctcctcgcagggagcccgatgcagcactcgatcctggatcctgggatcatgcccttagccacccaggtgtccctaaatctctggttttaagtaatttgattttcatgtgctatgtgttttctttacattgtgctttgagttcattgaattttgctacagagtgaatgtttgtgtgttcccaaaatacatatgttgaagcctaatccccaaagtgatggtatttggtatgtccacatttgggaagtaattaagagataacaatggagcccttagaaatggaactagtgtccttgtaaaggagaccccacagaactccatcaacccttcagccatgtgaagacacagtgaaaagacagccatctacaaaccaggaaacgagctctcactggacaccaaatctgaagacaacttctcagcctccagaatcatgagaaataaatttctgtagtttatataccactgagtatatggtatttttgttagaggagcccaaacagactaagacagttttttgggtctggagtttataatgatcaaatttagaatatatttttggttcttattttctcaaatcttttttctgtccactctcttcttcttttcaaggacttcggctgcctttgtattgggccctttgaagttttcccatgactattgataggctttgtttttttcaattctttttttttgcgtgtgtgttttatagtttttgtttctatgttttatagtttctatgttttatagtttttgtttctatgtcttccaaattcactgatcacttatttctgcaatggttaatttactgctagccatattcaatataattttcatctcacacattgtcatttccatctaaagaagttaaatttgttttttttaatggatatctctagtgaattttttgagtatctgaaatatagttataacttttattttcatgtcattgtttcttaaatctaacacctgtatcagttctgtgtcaatttcaatttatcgatttttctgttcaatttgagttgggttttcctgcttcttttcaaatctgttaattttttattggatgtcagacactgtgaattttatcatgttgagctctgctctggaatgaagttagatacttgtaaataaattgatccttttgagtcttgcttttaagatttgttcatccgtattggatattggatcagtttttagtgtagtgctaattattctctgctactagggcaagatttttctgggtattctaccctatatccacaaatttaccaggtttttcagtctagctcatgaaagtacattctcttcttacccctgtttaaaccttaagtactatttcctctaatcatcttattagagggggaaaaagagcctttccttacttctactggtgaatatacttagaattccccaaagtagtaatttcccttattaatatctttggcaaagcaataaaatgtctttctttaaatacttcaatttattctctcctctttggttttcctagacctctaccatgttgacgtcatcatatttgttagaactggtttgtgcttagatatttgtctttttctttcctcaaattatccttgtatttaagatatagcttagcatgtatcaaattataacttttctccaacatttgaaaatagcactattttgtcgcttttatttagcattgctatggagaaatgggaggaggtttttctaatttttactcctttgaatactgctttaacagtgctactcaaagtgttgttcacagaccagtgagctatattaactatttcttaccagttctttatgagacaaatacagaaatagaatattacagatgttttagaacaaatcaacagagaaattttaaatatattgaatctaacaataaactaattacaacttgtaattgtatgcatgttttttattaacttcatatttctagtaatttattttagaaaattatcagtctttggggatccctgggtggctccgcggtttagcgcctgccttcagcccaggacgtgatcctggggtcactggatcaagtcccacattgggctccctgcgtggagcctgcttctccctctgcctgtgtctctgcccctctctgtgtctctcatgaataaataaaatcttaaaaaaaaaaaagaaaattatcagtctgtgatatattaaatataaagcaagaaagagcacttataacaatagcaactacagcataaaaattcttctctgcaattaagaaatactgcttaatatagtcaggaactgtgttcctgaggacttatggagcctcaacccgagaggcctcataatcagtgaggctgaggtcacggattagaactggcatgctagggtttacagagaatgggctattgtcttcacagtatagattcttcctgtaagtcacttaatattgcagagatgggaatgctccatgcatttaagattgaagtaaggatagactgacccagagaagtttgtctgggtgaaggaaaagatgtgggtgccctcagtcatgtcatagaaagaaatgtcattgtcttcataatccaaaaaaatcacaatcttttgtggacactttcctatctggagacagtcatcctgggaaatgtttggggggcaacaggtgagagtccggtattcacttcctttcttctctaagactctgaatttcttgttttgtagatctgtggatagctcactcttgtctgtgagtttctcataaacaccgagagtccactcatcaatgtctttaatatttacttcccagtagtgttttcctgaagtgaagtcttcctgattaagtatgataaggttgcagtctccttgcttatcactaagagacagatcctgtgtttccactctaaagttctcatttctctctgagtcagaattattctgatgaaagatttccatgttcacagtcacattggctgggaagaaagaaaagggaaaggaagggtcaatattatatattatataatatatatgttatatatatatatttcagaaagctgttgtgctggtgaaaccttaaagaaattaatcaagtagtgaaagaacccctgtcctctgaatgtgtgtgtactgggaaaggtggagctgtggagtgctctcaccatgggttcaatgctacttagctcattttatcttacctatgctattatcagtgtcttggcagagtatcagagtgagttgggacttgcagtgtttacttgagaatagtgttcttcccaacttctctacaaattccaactatgttcttcaattagtaataggctccatgtcagctggcctcttttaaaagagcagctgtgttactcatcattttgagcactttttacacagttggagatctcctcaactgaggggctataatttctgttcagaaccaagtgccccgaccaccacaggtgaaaaagcatggccaatatgtgaaagtggaaatataaccagagtagctaatcctagcagcaattttcagttgaggccaacaaataatgatcttcatgttctttcctttctttgcctctgtctttttaactaggagataatgttgagagggaaaaatggaataacagaaggcaggttagaaaggggtcaaaaggataaaaaaaaaaaaaaaaaaaaagagctactcaccacactggaagtgtttcttcctccagtctgaaaaagagcaatacaaattgaacctgtgatggaagcatgcccacagaatgaaaaggagggacacacttcctttcctatctcttctcagctctcttttcctcctcctttgagccctttgaactctgcagtgtccagaaactacaagacaaagggtgtacttcctgcatgtgtctcaattagaaatgatcccctcattgggcggatgctggaggagtaagtctggagaacatctagaacagggtctagtgttctaggcacctatgcttttaatacttttgtggcactcctcattgaggatgaaagctatacgatgtcctttcattttattttattattttattttatttcagggttttcccagccagtgaccacctcagagagtagagtttaagcttataaccagggcttttaaatgttccttttttattttaatgcttgtaatcatgtttttaatatttttctccagaaatttcttcatgaggaatagaagtacatctgcttctgcctggacccacttctcttatgacagaacttgtgactttatttaaagactggatattctcttagtgtcttggggcaataggcagtaagaatttatccatagggatgtctgggtggctcagtggttgagtgtctgcctttggctcagggcgtgattctagaattctagaatggagtcccacatcgggctccctgtaggaagcctacttctccctctgcctatgtctctgcctctctctgggtctcttataaataaataaataaataaataaataaataaataaataaataaaacttaaaaaaaagaatttatccataattcttgatggtctttcactgagatgcttcttcaaagaagggtagccctctatacatagaattgatgaatatataaggaggctgagatcaggaaagcaaaaaatgattaaattcttcagctgtgatggagctaaaactaaaatctgtatgtcctcatccttactatactttgttctctcctctagaatcatgggaacatttttaaacaccttctgaaagaaaactattagtagaaattgcatactgactttaacccttgggaggggcaccttgacctattttatcaaagtacttatcacactgtgagcagttggctggttcttaccttacttcttccaatggatcttaatttctacacagtcagagattatggtttatgccatcaacatctagaacaatagtgagcttataaaaatttcacaactatatatttaaggaaagacctagtatgcttttgaggtctaactctgtattgcacatgcacacacactgtcttaaacacacacagtacatggaccagagattagaatatataaaatagccaattccctctatcatcagacaaatatatcttcacaatggtagtaaaatatttagaaagattgtttttcaaactttttcaaatataaaccttgttcctgtatattgaactttcctttccttatttcaaataggtaaaataaataaaataataattaatatattttcccaaatagaaaatataatatattatctgctttttaaaactttattgagagtatagcaatgctgatataatatagagtattctttagtcttcttaaatctcatcaaaatcactctgagttcattcttcccttctccatagtggatgggttaacaattgatgttgagtcatactcaataatatagaatttataagtcaacagttatttctcctttaaccatagctgtaaaaaacaactgaatatatgagcttccaaatacaaaatactatagattgataccaaataaatctttacaacttgcaagtagatgtgtgtatgtgtgcttatatctctacttattgcactcagaatatcagagacacatagcaagatctaagttacttaccaggatacagcagggccttcttccaatctaaaacataacaaatccagttcagacaaggcaagacatccagagcctcacattctcctccctcccccttattttttttcactagtcactcttaaatctttcagtctttccctttgaggagagggagctaagaaagtgttagacatcaaaactttgaatggtgaggaaaacccagtctcttaccttcaaggtatagtgcctttcgctgttctgaaagaaagaacattcagtgagtcctagaacagatgtagaaaggggagaaaattctacacagggcatgagaggaagtaagactcaccaagctctgccttgagtttctctgaaagaagagataaaaaatccatcaaattgggttttggcttctcttgagttcatggagtagctgaatgaattcaatgtggcccttcctcagaggtcccatagttaagtaggtaagaacaattagcaaacacacattcagaatctaaaatgacaagtgctaggaaaagttacatgggaaacgtcataagttcattgaggaaggagtgcccatgcttcaatgggaatttaagatttcttaggtgtttaagaagcttattcttgaaggaagaataggaggagaagacaggggaagacatttctacaaggagacataacagcacagtttgggtacagacgcatgaaggccatggtgtggtttgaagagccccaccttagaggactgatagccactgcccacaactatccaagcttctcacatggtttcctccttttcatagggctccagctttatggaatttgaatttatgaaacaagggtattccatgtttcccttagggtcctttggcaaccttttatttcctcgcctgccttatacaacctgtacccccagcttttccatgaaccctatttgctctgcttccttgatttacctgtggccttctgtgccatttccttttcatttttcatctgatctctttcattaagttctctcttctttttctttacttccttttctttggcttgatgttctctccagccagtgtagctgattccaatgaggaggagcatcagcacagggactgtcccagccagagctgctttccatgggtccatcttggggaagaaaggctctgacacaggcatgtgaagacacagtgaggactagcctggagaccatcctgccctttccccaaagcttcctgagccctctttccctcttccctgccctcatcacactcccaactctgctttggggtttgtgcctcattcacctgggaggaagatgcatgatactttctcttgtccggagaggggattctggatggaacaggtcacattgcccagagagctgtccatgaccacaagagatgcttccacatggaagagcccatcttcatcttgggtctgagactcagagagggactgtagattcactcccaacatgtcattccactgtaccttgggttttggaaaccagccatctgaagagcatagcactcggatcccaccatcctcaggtcccatcatgtgaacatgaggcacagagcccaaccctgaggagataaggcatgtgtttaaggcctgtggtccttggggcttaggagtccctgaggctgaaggttgaagtgccctcactatactgataagtaaactgaagctcagaggtcaataaacctctcacagtaaatgttaggacaacctgtgattcaattttgaaatcttgaaaagttgatgtctttgcactaagactaagagagcttggggtcatttcaaggagaggaaaaaaacaggtacaattaaagttagaaaaagaagcttaattctataaattgtttttctctactgattgggtgaaaactaatgtctgagggtgtcagtacctgtctgaattaatactagtcaattaattttctggggtcttttaggataccaaaacatattcagaaatattgccttatttggtgtttaaagtgaatagaatatatagtcttatcctcactgcacagcttagaaaattggtattctgcaaggtaaattaatgtaagaatataaggatgatcataagaaatgccaaggtaggaatccagacatcctcatttttctttttgctttataccttgatatacatattctatgccaagttaacatacctatgacatgcagctccacaatagcctcttgggagctctgaccatccttaaaatgacactggtactggccatgatcagaggcacgaacatgttggatcagcagggccacacctcctctgttgatggagtccctcaccaactctgtcctgccatggtactccagcatttgctccccaccttgttcctgtccattctggtacacaaacacagctggagagaattgggttcggtaccaccgaatgtgcatgtcagctgcactctgctctggggacagctggcagggcagagtggcatttgcccctagcagaaccatgatgggctcaacgggtcccttcacagaaaacccagacactgcatgaaaatcaaagacagattggggaaatgagtgagggggataagacaaaaacacccatcttaatttctttcttatttgcattgtttcccaaaaaagttatatatatatatcctaactttatatatatatatatatatatatatatatatatatatatatatatatatataacctaacttctttaactatattctccagaagtaacaactactgatagtttggcatttgaaaggacaatttttccatgcatttacagatagtatttgtatgtaaattatgtaaaacctatatgaaagagatttacttagaattaaatgtggcaaagtagttcattaagcaattatcccttcttttggtaggagaggagtagaaggtacttctctccacacccatctctttctctcccaagagaaatgctgcaagctgaaaatgaagactttgcttaattatggaataagctcctttgtcaagtcacttaaggcatctgcttgaaaattactttatttaaaaaaaaaagatttttatttacttatttgagagagagaacacaagtagggtggagggtcagagggagagggagaagaagactccctctctgaacagggaacctgatgatgtggggctccatcccagaaccctggaataatgacctgagccaaaggcagacactcaatggacggagactcccagctgcccctgaaaattactttagtacagaaatcaatcataactaaaaggtgactgatgtcccctgggcaaaacttgtactggcaaaggccaaagatgtggcttttttctatggttaaagcttaaaggcccacaaatatggtgactctggagtgggaagaattcagaaaggcatggctatgaggggacccaggagtgttggaccaatggcaaggccacatgagctcaaaggaaaaatcccatggtcaatctgtcttagagagggtggactaggctaggcaaggagcatgacattggccatcaggctggatgaaggccatggtctcccttctctcccattcctgtgtaaaacccagagtactcaacagatatgtgttcttagttaacacagagctactggctgtacatgttgtatgagtcatttaatttagggaaagatatttgacattactcatagccacaatgtagtgtaaaagttattttatttctcttaaatggaatcattacataccagtttctgtaataaggaacatctaatcattttagtacagataggttagctctacctattgtttttgacacagcatatagcatcatgtttaagcttttcctgtatcagtgtaaatatttatgttgcttccaatttattattactataaacagtcccacaataaacatttaatacatatgtacatatacacatgggagaacctttttttttttaagattttatttatttattcatgagagacacagagagagagagagagacagagacagagacagaggtggagggagaagcaggctccatgcagggagccggacgtgggactcaatcctgagtctccaggatcacgccctggactgaaggcggcgctaaacctctgagccacctgggctgctccaaggagaaccttttatttaaaaaaaaattttttttattatttatgatagtcacagagagagagagagagagagagaggcagagacacaggcagagggagaagcaggctccatgcaccgggagcccgacgtgggattcgatcccaggtcagggatccccaaggagaaccttttttatgataaattgttgtagaattactgagtcaacatgtatggatatcaaacattttaatactccctgctaactgacatcagattaaagagattttaattaaaaaatctcattactgtaatctcatggttgatttctctccaaactagagtctgaaaactttatcctgagggtcctttctattttatgaaagaaggactcaaatcccagaggaaaacaaaaattatttttcaaagatcataaccagatagagcccagggtttccaaattctttgtgctcagacttgggttttcctcgcagtggggaatgttataaagtatatttaactgataatattacattgaaattaagcaggtttaaattacccgaaatcaataaataaagatttaaataaacattatagctatgagttttataagatctacccagagtaataaggggtgttgatataaagaccactcccattcttacccagaaccttccagtcttcggttagcactaacacagtcacagttttctccaatataagggccttggagaggaggtacatgacaactgatacatgatctaagttttgtcatcatctaagaagaaccagtaaaaacaagccaataaaaaaaaaggagagagaacactcacctgctgagtaccatgtagacacctcaagaaggaggagagggaggaggaagccagcaggagaacaaccaggagaacccaccatcttcttcagagcagaaagtgaaaggacaaaatgtttactctgacaaggaagtactgtgtaagacaaggtggtgagaaaaccacaagagtgaaaactttcaagaaaaaaaaaaatcccctgttcaaaaatttacttttatacacagttttggcctgttcttcacagaccactaccaacttcaacctctcccaatgcattttcctttcttctttctgaaaaccaactatttccccaacagatatagaaaactataaaccattctcttgtgacccacgggctctcttgaaattgaaaagctcgagttcattttgagaaataaaggcagacacaaaattaatccactcctattagccaatctaacttcctctttcttgcattcattcattgattcattcatacattcacatatttattttgaccacaaacactcttgtggcttaactccagaaagagaagggagttttcttaccatgtgaccaggatcccaagcctttttgtttttacggccttcatctccctcagacacatctccacatcaccacacatttctctcaccattcagattgagccaagagacttcctggaagtttctgatctcctcagactacaaggtccagctccagacacaattggtacctggttgctcttgtggtcagcatccaaagatatggctggaagggttgggaatagtaggtttctaacccattcttagactggaaaaatatccttaggaagggggttacaggcactgacatgtgaatgcctctcctagaatggatccagtgaaaaagtcacaacctgtctgcagttcttgcagctactttgaaagtggaggtaagaaaggtcatcctaggggactttggactggtggggctatagaacaatagtgtgccttggttaaaaaaaaaaaagctcagtgtagcttcctcctcctacctgcaaagggctgaaatcacattattcaggaagagagaatcctcttcctgtgtgatattcaaggatgttggtcatcccaatgttgaactcacaaagttaaccgattgagggaacaagagtaagagatataggcttcttcctaccataccctaactggcactgaaagctgtgcagggaaaaataagagttggaaaataaaggactttgtgctctgtaaagcttagggctgtatttccaaatctttagggctccccaaagtaaaatgggaataataacacggttatatgatcttagacatagaatgtgctcaaaaggcatttcttactacttcaattctttccacatccaagtcatgttttttcatgtcacacaaggcttacagataattaaggacacaaatagctgttgcatagatattagtatgaaagccactaacagaaagatgaatggataaagaagatgtggtctatgtatacaatggaatattactcagccattagaaacgacaaatacccaccatttgcttcaacgtggatggaactggagggtattatgctgagtgaaataagtcagtcggagaaggacaaacattatatggtctcattcatttggtgaatataaaaaatagtgaaagagaataaaggggaaaggagaaaaaatgagtgggaaatataagaaagggagacagaacatgagagactcctaactgggaaatgaacaaggggttgtggaaagggaggtgggcaggggtgggggtgactgggtgatgggcactgaggggggcacttgatgggatgagcactgggtgttatgctatatgttggcaaattgaattccaatttaaaaacatatgtaaaaaaaaaggaaaagaaaaaaaataaaaagaaaaattcaaaaaaaaaaaaaaaaaaaaagaaagaaagaaagccactagcaatctggccaaaggaataccaagatcttaaataaatattctctagaaacagtgaggtacatctgaccttttagaaatcaaatttatggagatataatttgcatacagtggaatgcatggttatgaaatgtacatttcaatgaagtttacaaatgtttacactcatgtaactaccacttccctcaaaatatggaacatatccgggcatctgggtggttcagtggctgagcgtctgcttttggctcaggttatgatcctgaggtcctgggatcctgtcccacttcaggctccctacagggggcctgcttctccctctgcctgtgtctctgcctctctctctgtgtctcccatgaataaataactaaaaacttaaatatatatatatggaatatgtctgtctcttgcaaatttccctcatctcctttgtctgtcaattcattccaggaaaaacaaacagtactctgatataaatcatgatagtttaaccttgcctattctaaaacttcaaaaaacaacaacaaaaaagaaattatacagtatgtctacttctatgtttggcttttttggaaaaacaatgttttttgagattcaaccatgttatgtttatcaatacatgtaaaagtttttttattgctgtataatatggcattttttgactatagaacaatatattcttctgcagttgttttcacatactcacgccctcctggcccaatcagccctccccactgaggcctctgtttcacttggcctctgacatccactttaggtctgaagtatttgggaatgggaagagaacactgaatgagaaatataaggattaaagttactacttgcttcttgtttactttgaaatttgtgaatatgcatgtgggtatattctattccaaaatgtaaatagtttaatatgcatttccagtaaagctagaaatataaatgtgaaaaattcatataaaaatcttagatagttttccaaatgatagagaattatttgaggaaagtccgttaatttgtggagaatactttaatggaattacatcatgtctataagaatgctcacacgtttaaggaggatgaggagaggaagggaaaaagcactacaagatattattgatttcaaaaagcagtttgattaaaaaaaattttttgtttcaatattactctttattgtttttttccctctctagatcccagcccaggatcacatgtttcatctagtcattattgtctctcttgatacaggaacggatttctaagttttagttgtcattagtggcattgacaattttgaagaataaagggcagctactttcagaatattcatcactttggatttgtctgatactgtcaaaaagcagttttaaaatggcatgaacagtataatcttatttgtgtaagaaatacggaaggatagacatcaaaatcacaaaaaaatgatatggtgtgatatgacttttttctgagtgatatgatgtttctgttgtttttgcttatgtcaaaaatttagatttttctcatgaaaaagtaaagactaatatgtatatgaagattttttaaaatacaaatgtaaaacacaataggaaggattcatttgcagaaaatgcaggactaaagaaataatttgtattcttgggagtggataactgacttaaaatagaaaccaactagcacagtcagatattagagtagacacatctaaaggtcaaaatattggggtaagagcactgagtgttgcatgaaagtgttgaatcactaaatcatacacctgaaactcatattacattacatgttaactaagtgggatttaaattaaaacttaaaaaatatatatttttggggctagaaaaatggagttactggattcttcaagaatatgatactttaaatcaaaaagataatatctaagaagcataagttcaaataagcacatcagatccagaacttcaacattcatctaataggtaggttttctaaactgggaagcatattaggagcagaatcagaagaaagggcactttataaagagttcaattattggaagaaaaaaatgcaatttatatgtgaatttttttaaagttttagaactacaaacaaacaaaagcctcaaagcttctacagtccgaaatacctgttatgtacaaaagaaaaaagaatcagcttccgttgtacatttgtcacgttgaattctttgctagaaaacaaatgtagtctttacatttcctagtagaaattagaatgatctaagcaacaaaatgaacatctaaatgtaggggcataggaaagaagtttttgaacaggcaaagaattagaagtttctgcctcaaaacttttcgtatctaaagagtaagtgttgcaggttttgaatgcagggcttggagcagggagaaggttttggagctacatcccaaattccatttattccactttgggtggccactgttatttgagttggagtaaggtggaaggatagatttggtagatattgtctaccaaaattagttacctaggaatggagaaggcacatgctgactatatctgttttcctttttctggcagcctttctcaatagagtagatccctccaagggagattatgtggcttttcttgtggtagtgatttacttcatgaatttaaattcaagtatcattcatatgcatgtcaaatccctgactgtttagaaaatgtgaatccaaatctctattgagattaaatacttaagcaagttgcaaaaagaatcctcgaaataagaagataattttggtatttatttataaaagaacacctgggaaagatctggcactcccaacacagtgtaggaaggggttaggtaagtgtcacactgggtcatttctactaatccatcttaattgcctgcagtggatgtatattaataaaaaattaagagaaattattggatctcataaagtcataaagatttggcatagcatagtttatataatttaaaacttctataacttcatttatatgttctataatgattctgttcatttctgactatgactataactttcttttggagttcccaactgattttgcattattcaatccatctgtatgtcattagcaccacttgaaagtccatgttgttaataaatgtatctatttgaaacggcaattctgtttctttgaattatttctctctgaatgttacttttattttaaaattaatagtaccatatctacaattgtatagaatatgtctggtttgtatttgtttacttcttgttttgctatgtctcttataaaccatatatagatattcaatcttagattcagaatttcaaaaatgtagattagaatttttaaaattttttcagtctctaactcagaatttctttcggtcattctaagcaagaaacaattattctagaattcatagaatttgaaggctctttgaaacaaaaataatttacgtagataggggacagtaatctcatccttactccttccattatttgcagcaccgaaggaagatgagagtctcagagaatcatttggggaattttatactgtttttcttttatcctggttgagatggataaaagccagatgtcagtggagaaaatttctgtctgggagaagagtcagagagtgtgaatgtgcccatgtcttctcagttcattgcctaatggaataaggggtccaactgggagatgaaaactcatcatcagaatggcagcatattgtggtaaggaagacattaaaataaaaaattgctaatgacctacacataatttataagttattgatactcttctaagtgctttaaatacattcatatgctcttcacccaaaacttagggtagatactattattcaacccattctcacatgaggaaactgaggctcagagaggttgtgtataactcactcaaaatcttaagttgtaaatagccttaccagcattttaactctggtagtcaagttctatatctatgctattaatctagacaatatacttctcagaaagaaagaaatcacttgcttttgatcctctctatactttgttaagtatgtaatcattaaatagacttattatacatgacaggtcaaagtttgctttctttaacttattttactttcagttttgagtgtgtcagggtggccaaagagaagtgtactgctgggagattcccatgccggggggtgtctttctctcagttgtttgaactaccttaaaaaaactaccccaggcttcctcctgggctccatgttttgtaaagtctgatatcctgtgggcattttggagaaagtctcacgggagacacctatgggcagccaagaacaggtaagtgggaggaatggcagagagtatttatccctggtgcctgtggccatgagtctaggaagtttcaggatgccttcatctctgtaagaagaatttaaaagatgtgagtgttgcattttatgggtgatgggcaagagagagagaagtgagagcatttgggcaaggatcctagaggttggcagagaacaggccacgttatatatgctcacattctatcaaataggaatgtgggaagagtagaattcatcgaggccaaattaatgtttgtgctaaagtcagctctttctgtgattgttcactgcctcttcactgtctctttgtctctttatcccctggacaaagtgttcttgagttggaaaaagagttcagagaaattgtggacagatttatcactgtagaacatggctgttgagatgaagactgtttccttgaaaaagggaaacaaaaggtatttttttgtgactgttaaaacttctgtaatattccctgggagagacacacaacagatgtttgagagcttctggaagccatttcctagaatcactgaactgccttaactgtgattgtttttactttatgaatcccatttttgtcttcagtccagctattttcagaccttactctgtgtcatactgttgtctactctgggaaagatggtgaattccctggactcctctctgctaagagatttcttctctatcctacttctccaggtatccatgtggggctccggtaagaatatttagtattttatattattatattctcttattcttaaaccgaatgattaaattactccagcactactcatatatgcctaggttaattctaaatcctttattttggtataatgatttatctgcccacacacgagggcaaataagtcattatatggttactttagagagaaggagcaggtggaattatttcactaatttcttctaattcactcaggtctctgcttcatggagaatgcattttctgatgcccaagacctaattaaaaactcaggtttcatgatttcccagcattattccctcctccttcatagaatttatcaccattgcaattttaaaaatcatttgtctaacaagaggctaccctattgactgggtggagatcctttttgtcttgttcactgccatcttcagcctgaatgtgtgctgcagagaagtggtgaatgaatggcagactgtctacggggttctactgggccagtaatgctgctgtgttccaaaatgcctgggcagttcattgatattcttttcactgtggctctattctacagattcattcttggttatcggcccctccgagccaattgtggccatgctgggcactgacacggtgctgccctgtcgtgtgtccccagccctgaatttggagagcatggagctgaggtggttccgctcccagttctccgaggctgtgtatgtgtataggaatggaatggagcaggctggagaacagctggtagatttcaaggggagagcagagctggtgaaagattacatcactgaaggaagagtagctgtgagaatctacagtctccggatctcagacaatggaatgtacaagtgtttttttaaaaaagacagtgactttgaagtagccactttggagctgaaggtgattggtgagtaattaccagagaatactgatcactctacaggaatgtaagtgttctgcatttgatttcaggggaggatgatgaataggacagagacgaaaaggcagatattcttggagctggtcaacatccttgacattggatttaacctgaaattctcctaatctatttatacatttattgtactgtagtttaaaattcaatgacttccataaatatctaccataaaaatagatcatttatttcccgggtatgtctctccctgcacattttgaaggaagccatcatgattaccaaaatgtaccattactctcagagaccggaatcccagttggctgctgtgatggacagaggttcagctgggaatgtcaatggtagagtcttgaatgcactgtttgaaggaggtgactgtggtggtcgtgacagagtggactgggattgcagagaacaaaatttgtcatcagaggattgaggccagaaaataaccaatgcacagtggttaagtgaagcaggagtagcttttggggaatagaaagattcttgaagagaatggccagtgtgaaaagctggaatggactgagattggtccacaggacattgacttggccactctaaggtttatcatcattggtattgtttcatttttaattataataaaattataactcattggcttgaactcaaacaattcagaaacatgaaatataaattgataatccttcatttcccttcagtattcctttttctactccaaagtaactattaataccaaattgttctatgtcctttcaattatctctctttttaatatatttatataaagatatcaataatcatgtattataatataataaacattatataatattatgatatataattgtataatatcttgatatataatatatatcaatatcataatattatatatttatgtagcagaccttaatcattgtcctaaacccatgtttaaaatgtttgcattaacttgtttaaagacaaaattgaatctttgagccctcagccaatcagactagtgtgaaattttgtcttagttcttactggagcttccagatcctctccccatgagtaataactgtgcaaaggtcctatgtggcccaaagcattcaggagttagctccagtcttcggccctctctggttggtcctaggaggctcatcgtccaaggttttgttacatctctcccgttgactccaaagattaagtcacagatattattagacttacaaaaaaaaaagattttatttgtttattcagagagaagagcccaatgcagggtgccatcttagatcatgacctgaactgaaatcaagagtcagatgcttaactgactgagccaccaagacacccctattaaagacttagatgcagcacttcaagaagcacctgaggatctctatctctttattaggttttgagaaatgtctcattattatcaaagcttccttcattgacattcttttccccacctatattacacaattgctttcactaatttgtgccaaaaaaaaaaaacccataaaagacactagagaatcccttattacagagataaaagaactaaaatcatgtcaagctgaaattaaaaatataaccaagatgcaaacaaaaatggaggccataaaaacaagggtggagcagaggttcgaataggtgatatagaagatgaaattaaggaaaataatgaagcgaaaaagaagaaggaaagaaaggtaatggattatgaaggtagacatagggaatacaatgacttagtaaaagataataatatttgtagatagatcaatggaacagaaaagaaaacccagaaatggtcaactaatcttcaacagagcagaagagaatttccaatggagaaaagatagtctctccaacaaacggtgttgggaaaattgaacagcaacatgcagaagaatgaaactggaccacattctcacatcatacacaaaactaaattaaaaatggattaaagtcctaaatgtgagacaagaaaccatcaaaattctagagaacacaggcagaaactctttgaccttggcctgaacaacttattagacatattaccacaggcaagaggaacaaaggaaaatgaactaattgggacctcatcaagataaaaagcttcctcgtagcaaaggtagcaatcaatgaaactaaaaggcagtctatggaatgggagaagatatttgcaaatgacatatctgataaaagattagcatccaaaatctacgaagaacttttcaaactcaaccccccaaaaacaaacaacccaaattttaaaaaatgggcagaagaaataaggacatgccttttcaaagaaagcatccagatagcaacagacacataaaaagatgctcagcatgactcatcatcagggaaatacaaatcaaaaccacaatgaaattccaactcacacctctcagaatggctaaaattaacaacacaaggaacaataggttttggtgagggtatggagaaaggggaattctcttacactgttggtgggaatgcaaactggtgcagctactagggagaacaatgctgagattctttaaaaagttaaaaatagaactaccctacaatccagcaattgtactactaggtatttacccaaaggatacaaaaatatagattcaaaggaatacatgcaccccaatatttatagcatcatcatcaacaataaccaaactatggagagagacaaatgtccattgactgatgaatagataaagaagatgtggtatatacatacaatggaatattacttagctatcaaaaatgatgagatcttgccatttgcagcaatgtggatgaagctagagtgtattatactaagtgaaataagtcagagaaagataaataccatatgatcttatttatatgtggaatttaagaaacaaaatagatgagcaggcaggagaaggaaatgtagagtgagagaaagggaatcaaatcatgagagactcttaaccatacagaataaactggtggttgatggaagaatgtgggtgggggggtagattagatgggtgatgaaaattaaggagggcacttacttgtgatgagcactgggtgttgtatttaagtaatgaataactgaattttactccagaaaccattactgcactctaaattaactacttaaaatttaagtttaaaaaattaaaaacaattttaaaaatggaaaaaaataaactgactttgttgagggtattgatcatgaatggatgttgtactttgtcaaatgcttttctgtatctattgaaatgatcatatggttctttatctttcttttattaatgtggcataacatgttgattgattttcaaatattgaaccacccttgcaactcaggaataaatagcacctgatcgtggtgaacaattttctttaatgtattgttggatatggtttgctagtattttactgagaattttcccatccatgtttatcagggatattgacctgtagttctcttttccagttgagtctttatctggttttggtgtcagggaaatgctagcctcattgaatgaatttggaagttttccttactattctatttttggaatattttgagaagaatagatattaacatttcttgaaatgtttggtagatttcacccatgaaaccatctggacctggacttttgttttttgggactttcttgattactgattcaatttcttcgctggttatcggtctgttcatgttctgttctatttcttcctgtttcggttttggtagtttatatgtttctaggaatttattggcaaatcgtttttcataatgttattttataatcttttgtatttctgtgatgttggttattatttctcctctctcatttatgattttatttacttgagtcctttctcttctttttgataagtctggctacaggttcactgattttaatttcttaaaggaatcagaacctgatttcattgatacattctattgtttttttagcttccatatcttttatttcttctccattcttttttttttttttttgagagtgagagagagagcatgtgagggaggaacagagagagagagagaggatctaaaggagactccatgccaagtgcagagcccaatgaggggcttgatcttgaccctgagatcatgacctgagctgaaatcaagagtcagatgcttacaccactgagccaaccaggtgcccctgctgtattctttattattgccttccctttactatctttgggctccatttcttttccttagctccttatcatatatggttaggttggttatttgagatttgtcttgcttgttagggtaggtttgtattgctatatacttccatgttaggactgcttttgctgcattccaaaggttttgaaccattgtgttttcattttcatttgtttccatgtatttttaatttattctttgatttcctggttgacccatccattgtttattagcatgttgtttaagctttgctgcattttgctcgtgaccattttgcttttttttcctttgatttgtggtctttccggatttttttcttgtggttgacttcatttcatagcattgtgctcagagaagttgcacggcgtgacttcaatctttttgtatgtgttgaagcctgatttgtgacctaatatgtgatctattctggaaaatattccatgtgcaattgataagaacatgtattttgctattttagaatgaaatgttctgattatatctattaagtccatctggtccagtgtgtcaatcaaagccattgtttccttgttaatgttttgttaagataatctgtcccctcctattattgtattataatcaattagttcctttgttcttattttatatatttagtagctcccatgttgggtgcataaatatttacaattattagatcttctgtttggattgtccaatttattatgatataatacccttctttatctcttattacagtcttggttttaaagtctagtttgtcccatataagtattgctactctagacttcatttgacatccaaatgcatggtaaatgtttctccattatgtcactttcaatctacaggattgaaagaactaatgaaattcacccattctgttttctaagccaatggctttgggaaaatgtctctctctcccatgcttctccatgactatagccccctcctcttcatagcatcatgatccctttctccttgaagtcacatgtcccaaacccttacgtagttcaatgtggctcttatctcccttcagtggtggagtttgttctgtcatccttcaggtcaatttctggggtatttaggatgatttaatacttatctagttgtgttcatgggacaaggtgagcctagggtcctcctactcatctgccatcttcttctttccaatggaagtttgttcctcttaatcttttttaccaatttctcccatccctactcccttcccttctggcaactgccagtttgttctctgtatttatgaattcattttttgtgtgttttgtttatttcttcacttgtttttagatcatacatataagtgaagtcatgtaatatctttcaattgtagaagtttagaagtattacacagtcttaactatcaacattaccatttatgtctttttagttttttagtgctcttagatgtacaattgtataccaacatcacaaaaaatatctcaaccttcctttcttctaatatcttttcaggaaatatactgaaatgtaacatatgcagagaatttactactgattttaaatgtaacacataatgaatattcacaaagtgaacacacctgagaaaccagcacccaaatcaagaaagagagtttagttagaatctaggaaaatccattttttttccttttcaatatgatttcctcaagggtaatcagtattttgatttctaatttcatagattagtttttgtctgtttttgaattcacatatgtgggctcttttatgtctggcattttttgctcaccattatgtttgtgagatttttctatgtggttaagtgtatgtagttttagttaatttctatctcacttttattgcattgatttttacatttagatctttaatatatgtaagtattattttggtattaaactttatagaatgctcaaaatatttgttcctaattattttcactcacttctatgctattagcaaatgatatagaaaatctgtactgatttacaaatgcatattttccatatactcatagatatcagggaaaattataaattatctatgtgttcataatttatctgtttatttctttgacaatataataatgtttccatttttaaaacttattctctgcccaaacttcttatttgcaatgtttttcttcatttttgcatgtgttaggcctatcttaaattaatacctctgatttgattttatctgacaagatatctataggcttattttatccatcttcattatgataagaagaatctaaatctagtaggtcttgaaggaaagagtaacaaactctcctgagcagttactgtgatctcactctagtatcttctaagtaggaagtcaaagctttcaccgttccaaacatagcttcatagaagtcatgctattttttcagtacctttcccataactgttcattgaccaatggatataaagtccaaagtttagaaacggttgattgtatatctagacttaccttctgttcagttaaactttgcctagtacagctgcttctatgctcaggaatgagcatgcttttctgttcctctttttcaacataggtatagtttttgcttgtttcaacttggagattcaatggttatattcttccacgagacacaaggtctattttgtctaataatatttgcttcctaagctttgactgctgcattttgctcatgaccagtttctttttttcccctttgatgtctttcttcctattttctcttccaatttcatccatccccccactcctcccttctggtaaccattaatatgttctgtatagttaagagtctgtttttctcatgacaagtttcactcacttctattaattttctttgttcaagagatttggcaactcccttaagcaattctgaagactgtcttttagattgctttctgttttttagaagtgtatccctcccaggcagattgggatctgatagtttaaattattaatttcattataatttttagccaaaaaaaatctctgagggttctaagatattttctacatctgagtgatcagagtaggactgagccagatctaataggatccatgtcatgagatattaagtttaaaaaagacaaaataatatatagccttaaatgccaggatagtcattattctcaaggagatattggagtcttctagcattctagtaatataatgttttaatataggtgctggtgacatggatccactagtatacccactagtagactgtgcaaagttgagaagaaatatgaaaagaaataaatgagagtggaaaagttaaaatatatatatatatatatatccctccatggaataactgcacttggctaccttcatcttttagatgttctctactcagaggaacaaagaaaacttggaaaacattacaaaatgagatgtttaaggtagtgattacaagactccattgaatcacagaaaagtagtcttccttaaggcttcaataagtggaatagatagatagatagatataggatagatataggtatattggtgttttcctaaaagaacagaacattggtaaaatttactccactcttttccttttatgaccaattgcaagtgtgtgtgggtagagcaggtgtgataagcatcactatggaatcctagtatcagcttcaaatttcttgatatccagccacaattacacatttatctcatgagagaagaaaggaaactctctcttcccaccaagaatgatgatgctttgtccatatccccacactgatgttactgtgtaagattagggactctggaccaaaagtgtccaggtttcagatgaatgactttctcctctccaggtctgggttctggtcctcatgttttcatggtgggtccagaagataaaggaataaggctgacatgcagaggcaagggatggtttcctcagcctgaggtacaatggacagatgcaaggggagagaagataccatctctctctgaggatgagacccaagatgatgatgggttgtttcaaatagaggcatccctcattgtgagagacagttcaaagacagaagtatcctgctccatgaagaaccctttctttggacaaggacaggtggaaaccatttctattccaggtcagtgttgttcatttgggggacagaataagagtaaggagggaatatttaggagctgggatgggacaggattattttgtatatgtttttaatcaggttttgggggcctctgtatcagaatccttcttccctaggacctctccttggaagatagcatttgctgggactttcctcatacttgggggttttgtggttgctgttatgtttttggcctggaaacaacaacaggagaagagaagagtatgggaagtccagaaggaaaaaaaggaagaaagcaaagccaaaggtaaaactgtgactcagagttggtgggatctgtgaatttatgagtttgttagctgtgcatatggatggaatcttttggaaaatagaaacatgattgtacttacctagagcctcaagacttctagcaagacatgaagccaaggacctttatgagaaaaatattataatagagtccaatggaaagagaaaactcactggtataaacatggagttagaaaaaatggttatagtattctcagggtgaatttcttgatctaggtatatggaagtagcattcaggatctggatgtaggtaacacagtctagaaaataaaccttggacttgttatctataaaatgttttgttactttctttcctttttagaactgcttgaaaaagagcttggtaagttttccatttttctttgttctagtaaatgaaatagagtccctactgcatgctgtgtattttgcatctcacaggttattattccttttcagtcaaaaggaagcaattgtatcaacaaggtgagttatatcaatgttatagttggaccaatcatctcatctgtctttctgttctgatcatctcctgttcaccttgctagtgagggaagaattccctactctaagtaagataaggtggttatatacaggacactcaagactggacatatgagcttgacagcagtttagtaatcacctatactcacaccctgggggaggaggacactacaagtcatgtggaaccacatgttgcacttggaaacagagtgaagcagcaggggctgagggagacaagctttttagtaacaacaagatgaggtgctactggtttctgtggaaatgtgtgactggcttgtttgagtaattttgcaggctgacagggaagtgaaactcattagtttgaggaccgggtggggggggcggggttcagctggcttgactgataggaaaattagttgagtgtgaagtttttcctgctgagtggagacatatctggtgagagcaggggagcttacaggcatttagagccgtttgaggcttaaagacatcagcacatgaaattttagggtttacagtacactctcacaaagtttatcttctcctctcccaaatgaatcagaaccttatattttatcacaagtatgtnnnnnnnnnnnnnnnnnnnnnnnnnnnnnnnnnnnnnnnnnnnnnnnnnnnnnnnnnnnnnnnnnnnnnnnnnnnnnnnnnnnnnnnnnnnnnnnnnnnnnnnnnnnnnnnnnnnnnnnnnnnnnnnnnnnnnnnnnnnnnnnnnnnnnnnnnnnnnnnnnnntttttttatttcacacctggaccaattaaaattatatgctggtgagtaattgatgttgtcttaggacttcagacacctcagaatttcatgaggcatatcccgggcaattttcagagatgtgctatattctggaaattttattttgaaggccgggaggagtccaaaaaaataagggaataagagtaaagcatcccactagttgagaagacatgtttttgatatagtttcccatatggttttttttcttttctttttagactggagaaaggaacatttcaaagtaggtgagtgaccttattattttgtcccacataatctcttctatacaaatgagaaaatcttatatttatataaactcccaataaaacctggttgggtattcatttcatggctttcagttcagtctcaatctcatgctgaaatttgaatagatttcttacttttctggtatcattcattcattcagcattaatctatagaactatttaattaaggccaaataaataaagcagatctgatttctcacttcatgggaaagtacatgtacaaattgtgatgaaggttataaaggaataagagatttccatgagaaaaaatggtggattgaaggaatttccctgaggaactgactttaatctgagacttaagttatatatatggatttattcctgtgaataacattgtgaactgtaagggcagttcagtcagaaggaagtctgttacaccaacctgagacaaagaagagcttgatgtatcccagtgtaagtggaaaaatcttagagtctttcaataattaattattagttgattatcagtttctagtgcatgttaccataggagatatgtggatggacacaagacagaacataaattgttttacctcctcctctgtggctctccctcctattttctttcattctcctttccctatatttgcatctttcctaaggccactgagatatgacctgtattcccccctacacctgcagctgctattactctggatccagacagcgctcatcccaatctcatcctatctgagaatagaaaacaagtttctttaatggaaaatgttcctcagaactgtgatgcctcagtatgccaaggacaagaggaatgtgaagctgtcttcagtgttctgggtcggaattgctttaatacaggaagacattactgggaggtacaagtcaatatggggacagtagctggacctgtaaataaatgggctgtgggtgtttgctcaaatacagtaagaagagaggggtggtttgtagaaggtccagagaagaatatctgggtggtagcatatgagaaaggagaagtcaagtttcctacctccccagagtctctgtcactgaagcagcatcctcaaaggataggagttttcttggactgggaagatggagatgtgtcattttacaacatggctgatgggtcccacatctgttcctttactggacttaccttctatgagaccctctgtccttattttagccttcggggcactggcacatctgtgaccatctgctcaggtttagattacactgaaaattgtcctgattcttctccaaatacctctgtaactcatttaaggagttgtgatacaggtgccccccaagaagctaagcctctattacttccataagaagtgtcagcacacgtgctcaggcttctagtggtatgttctccaagaaagctgtccctgtgtggagagtaggtcagcttcactaagtatgatttcaaccccttccagagaggaagaggcagaaagaggaatgggacaactgcaaaatgtctgaaggaatgtcctctcccgttatttttggggaaagacagcgtctttttgagtagcaacaatttgtcccaagaaaattccaaacaaatgcatgatctctcttctgttctagcactcaatgtgtattgaaataaacattttttgaaataaatatttttaacggtacattttaagagaaatatctctcttcttactattttcatatgaaggagggatggtgtttgaagggaagaatcatagttgagagaattcttaatacatgttactaatgttggagatacacaaatttgctcaagtcttgtgaaaattaatagttcagtttgcctttcttcaggtccatgcccatcaacctctaaacctagagtttgccatggagtgggcaggatggatgtagaactataaaccatttaatcagaatcccaggccttctgtgagggaaatcacacacacacacacacacaacacatatttttaaacaaaatctcattggttagtaagtactgaattgtgttctatatgaatatatgaatgaaaaatgaattgatggaacacctgggtagttcagtggttgaatgtctgcttttggctcagtgtatgatcctgagtctggggattgagtcctgcattgggctccctgtgaggagcctgcctttccctctgcctatgtttgcctctctccctgtgtctcttatgaataaataaataaatgatctttaaaaaaagaaaaagtaattgatgttgtttgtggtttatattttcagggaaaaacagtcaaatatgtatgaagaaatatttacagacttcatggagaaagtcattgctaacactggcatatttttttttctttctgaccatcttcttctcactattgagagtttctttgcctttaatgcaactaaggcttcactaagtttatgtcttcaaggatataaaatataagcttcttttgttaaatgagccccctcttcgtggagctagaaggaccacttagattttctacacttttaacagatcttcaaaccacaactcccattatcaatctctctgggaaaatatatctccttcgcaaaatttcattgacaaacttagaggtaaaaccagtattggaacctaggaagaatgaaaccagagcccagaatattaactttacagacagtaaagggaggagttatataacaagtaagcaaaaatgaaggcaagacagaggtaaatgaatagtggacaaatgttaatagctataatcaaatggatttagtgaatgagaagggatttctggacatgagaaccctttacatggagataaccacaaaataggaacaaatgggattggaatgatatagaacagaaaggataatgggttccattttggatattttacttttgttacatattcagaacaatcagcatgaggtttccaaatgagcttttaaatatctcacctgaagaaactaaatccatattttgttctacaatgagattccttcacctgtcattcctccacttttttttttttagaaaagtcagcataaacacttttattgtaattataaaacttgaaacacttatatagtgtggggaggtgtgagatagacagcaataatttctctcaccaaataactatacaggacagcaaagaggtgagagggggacaaagagccagaaaactgagctcagcagggaaagctgaacatcaaaaaccaggagatgctaaagctgtgatgaccagcatcattttctcaagacaacactcaaggatttgtcatgatggctgggctttcattgggtgtctacaaatagcaccttcaatttaaactttcaattaaagttcttaaaatttgggaagtgaagcttggatacctatgagattataaaagtctcctaaatatccatcagaaaaagcacagagtggataataataataataataataataataataataatgcatcaggctacaaggaaggcttcagagggtcctgctggcctggggacagatacctgtagtatccaacatctcagtgagaatgatctactttcaaaaggcatagggtttaaggggaggctgggaacagtcagcggaggcaaagcttcttcccctctccacttcagtttcaagtagagcttttaattagacccaaggacatccctcaacttggagaataatttgccctcaacagcacctcaaatttgctataactttgttatgcagcagcaaaaatgtttaatatataatagataaaatttcatccaataaaataaaatattcttgcctcctcccctccaccatcaccaatttctatcctaaagttaacccattatttgtgctgttaataccttaccagtacttaagtggaaacctagatccaaaagattgaaactgaaccttcaccccaaaacaaaaacaaaataatatgataaacttaaggttttggcatatagtttagtgtcgacacatagaaaggagaaagggaaagagcaaagctgagtgtcagaacacattgagtcagtgtcatgtttatacaaagagtgtagtggaaagtcaggaaaacctccacaggattcatgcttgtgtctagatgcatcagatccctccaggcacagcgaatggggaactcaggaagcaggccattcttgtcattccagtttcagaagctctacgtcaaagaggagagtggcatttggtgggatgatgactgggttcttggtggcatcacacatagatgtagtctggggatatagtcagtttggctctctgacccacactcacgtgggtaaccacttcttcccagcctcagatcacctcctgctgcctaacataaacctaaagagcttgtttctgttcttggaagaatcaaatttctttccatcttcaaatatcctcaggtaatgcaccatgtaggtctgactgtgcttggggaaggtgagcccaactctggggagatggtctcacctgcactcccatggtgccatggtggcagacactgatcaggcagactgacgatcaggtgacctgggggcggctccttgactctcaaatgttgttgttgttgttgttaagtaagctctatgcccactgtgggcctgaagtcaagactcagagatcaagagtcccaggcttctccaactgagccagccaggtgcccttgctcctccattcattttaatggattttgttcttctaagcttcgagactggagatcaaaagctagaggtgggcaatgaaataaaatgttaaggttgatgttatattggaatcatagttgtagaaataccagggataacatcatccatcatatccttatctctaaggatgggtaaatcaacaagcaatgaagggtctccaagtagcccacagttcctgacaaagtagtgaccatgaactcaccacttgactccattaattaaatatttactgctggactgctctggcaatcccattctgagtaagctctataaggtaataataagacattcaaaaaacaaagagaaagacttaactagaataaagaactatattagagcaggaattatgccttgctatgcatttgatctctacagtccagcacagggtattctaaagataaaatattaaataaatatcctatttatgaatctattcctctatttcataaatgtttattgatcaactaatatatgtcactcttctactttgtgatgatacacacacacaaaaatatcactgccctaaaggaacttaatgtctactaacaatgaggaaaaagttctgcagagaggttaacaaatttggtctctggtttcctctagtcctttcctttaaactgagctgcatccaatctatacatctcttctgagagtcaccatgctttgcatgactgcaaccagctccctatgcattaggagtgacagggagctggatctttgatgggccaatccagtcactcatccatcaggcatagtgactgcatcagtgattagagtgtcttgatcaagccaccaacattctccttcctcatggtttttctttgttttatgattttatttatttacagagaggcagagacataggcagagggacaagcaggttccatgcagggagcctgatgtgggactcgatcctgggaccccaggatcacgccctgggccaaaggtaggcaccaaaccgctgagccacccaggcactcccctccaaggtttttctaattgacattggaactgagaaattaaattaatcccctatttggtgagctaaagaaaaacatatttcttaatacatagtgaaaggattttactgataaacagaattttttttgagaccttcctagggaaaacctatatatttacatattgggcctacacaagcacataaaactaacatgcaaaaagttagactgatcatgaaggaagacaaaaaagaggggaggtagttaaccttcagattttatcaaataaaacatttttagttcattaaatcaaaatagaataacattaaaaatattttaagaaaaaaatattttaaggcaaagtcaacacatttactaataaatttgacttcaaaaatataaaggacatataagggtatattaatgtaccaaaagtggtaaatcatttgtcaaacctcacagaatgtacacacaaaaagtgaaccttaatatggaccctatatagagattatagttgaaaataatgcatcagtattggttcatctgttggaataaatgtaccataccaaggcaaggcgtaaataggaaattatggggagagagaggagggatatggaaatgctctggatttttcactaaatttttcaataaacccaaaacagctcctaaaaaataaaaattgttaatttaaaaaggaataaagtacagtacatggtacaacatggatgaaccttaaaaatattaagttaaaagaaaagccagacacagaaaatccatatattttatgttctatttatatgaaataactggtataagtaaattcatagagacaaaaaaatagattaatggttgccagggtcaggggagaagagaaaaatgggtagtgactgcttaatagtttggagttttcttctggagtaatatcctggaactggatgttgatgatggttgcacactattgtgaagatatatataccactgaattgtatactttaaaatgatgggttttatgttatatatatttcactactgaaaaaatttaaaactaagtcaaagaaacgtaggagaatatagtttcaaacataaacatatgagtttaaaaaataggaaaaaaattcagtgaaccaaaagagacactacaggatgtgatagatgagtgattttcgaaggacagtaatgactatcatggctacctcctagaaagcagcagtgtcattaataggaattcctaattctcacttcagaagatttcaagacttttccaagtctttcttttccatattctttcttcttctacagtttctctcctttaatttattatggctttaaaatatttttactatgtgttgtatttattgcttatgcttatttattttataattattaattttaattgtgcacttttttgctctaaaaataaaattggcatcttcatatacacaatacaaaattttctctttttttccagttttattgcaaaataattgacatatatcactatataaatttaaggtgtgctgcatgatggctcaagttgcaaatattgtgaattgattaccacaacagatttagttaacatctatcatctcatatagatacaatgaaaagaaattaattttcttcttggactagaatttctttttccttaatttttttttatttaggtcaacacacaatgttacattagtttcaggtgtacaacatagtaattcgacaagtctaaacattatatagtgctcacaagtgtagctaccatctgtcaccatataacactgttataatattattgactatattccctaagctgtatcttttattcttgtggcttattcattccataactagaagcctgtacatcctgctccccttcacccattttgcccacacccctactccatcccttctggctaccatcaatttgttctctgtatttatagtctgattctgctttttgtttgtttattcatttgttttgcttttatagtccacatataaataaaataatatggtatttgtcttggaatataatttctaaaaaaaatttccactccaagtctccactttctgaaaaaatctggcataggaattctacatttcatatgatattcaagattatatctcagtgatcagatttcctccttctattcagctttattttcttttactcttttttacctgtatttttcacttcctcatacccacttggaaaattgtcagcttcataaagaaacctatcaaacagtctaggcctaattacatttcccattggattttctaaccatatcaggttgtgattagtggcaggctatcagagagcttgggatagggtatttctctgaagggatcagtctctagatcagatttgaagccagagtaacattaaagcatcttgatttgatagctggatgatggtgtgagcccattcaagcagctggtaaaagaagaagactgggacttggaatacaagctttgtttccagaatccaaggttatttttttcccttggagatgttgcaaaatcttctgggtgtaggaaagttgtcaggagaacctacattaaggatcaaaaaatgaagatgtatagagtttcagaaaagaaaagtgtatacagaacacttgttggtcatgttataaaaggaaaagtgtccagagactagtcaaggaagattttgacccttcttagagccatttttatggagaggatgcatggaggaaaggtaatggcccagtactggtttctataacaactcattgtctgaatacattctcatatgacacagggatgactccctccctccttatatagtccttggcaatgcctgagacccatacagtcttgtccccaacctctatttctcagtaccatctccctgacatgaacccttcttggcctggcacattgagcaagctgtcaaatctctgtaggatgtatggctacatgaatgttcatgggtcacatgcttgtatccctcagaaaagatcagtcctgagtgagtggtatttagatacaatgtcatatttgctgtagagaaagaaaatccattctgataataaccaatgtggcgagtattttaaatatattccatgataccaacatccaaacaagcaaaccaaagttacagtgacataagaaatttgaagtgaaggaactttatagggcacacaaaacaacctatcacacatagaagttcttcatccacagagcaagaatcctcaataagcaagttaccatatttttaaagatcttagtgaaatattgataccaacagaatctcagtcgagtctcaactctcagcctttaaagaatggatggctatgctatttttttcttctcccttaactaggtaacttggaaatgttaactgagggatcaaattattgtcttttaatccttttgcttctattatcactgtaaattctgatatcattcagcactgatcctccttgaacgtaagccatggactctcatgtttcattaattgttgaatgttcactgaattcctctcctatgtgactgctgaaaagagaagttagggaaagtgcacagcaaggctgctcctacaaaaggtactccatacttgactatttacctaacttacctttttcacagctttttctcttgaccaggcccacaagtgcagcaagaagtaataccaaaataagcactatcttccatgaaaaattcatcatgggctctaaaatggaaaacccagaatcccattaagtcatgaaactggaaaaattccaagatcgttctttttatctaagcagctcctcagttagagaggagggtgagaagtggatctctcaagaaggaagctgatctgtccctccctactctgcaaaagctgaggaaagacacaaggtttatgctagctttaccctttgctcctgtaagaaatacacacacatacaaatacacacacatttctttcccttctcttttccaattatatcaccaccatcactggaatgacaagaatagcaaaaggataaaattatttaatccacaagcatgaagatggtattaagaaaaacaagtttctaatcctgaagacaattcacaataaagaaaaaaaaacccaaagtgatattggcttcatatcagaagaagagagtttatccttacagtgatgatagagtcaattcttagaagttagtgtatgtgcaacaataaaacctgagggctttagtcaagtcaaaggaggtcagtaggatctccaggtgtcctgatgatcagttttgtaagagatagcagatgattttatcagagagaagaaaataaaaatttaaaaatagtagagcaataaaataagtttgggtttgtcttcatatatatttcccaaagttgagagaaacacatggaatcaccaacctgagagagaaaaatttgccattttctcctcgtcaagatgggggttgctaatggtacaagttacattcacaatagagctattcgtgaccaatagagatgtctccacatggaatagcccatggctgccttcagtcataacctctgaaaatgctggtattatctttccttccatgtccttccactttacatggggctctgggaaccacccttctgaactgcatatcagctctatttctccatccttttgttcttttatggtgatctgcggagaagaacccagacctgcggagtggagatcaaggaacaaaacctagagtgtctaataagtggttatatagtcagtaacttcactgagaagaaagagggggattcaaaggcttggttgagagaacaaagcttataggggaattaaactccacttagggatgagactagctggagttgtttctaggtttgttatgctcatttatttttatttttatttttttgtgtgttcctaaagtcatcctcagagtcagaggaacaataaattttaaatccagtcttttcttttctgtatctgaaaacaaaatagttttgaccaagacatgaatcacatggataggatgaaagaaagtgagtaaaagaatattctcaaatatccagattttataaatatgtgcatccagtggcaaaaaatgatagagtccatttaacttctcaacatgtgcccctctggatatttcatgaatatgtttatgattgagacccaaaatcagtgggagaaacaaatcaattatgcaagatgttggccttatttgctaaccttgaaaagtcaactcttattcacaaatataaacgggggggattatgatgcagggagcaatttagtctttcttcttccatcctgccacttctgttgatacttattatttttgcttgtatgtgaatgcagtctagtcttcacataactattctacctagtaactatatacattgtccagaattttttttcattgtccagaattttaagaacaccctgtgaaataatgagttctgtgtaaagttcgggagtaaaattctcaaatttcactaattgtatggtcattttacagagatctggggggagtgtacaagttctacacccagagaattaaatctggcccatttaagcccattaagtactgaactttaagtatgtactacagttcctatgcatataaatttgacaagcgaatggatattccaaaaatttcaagtgccaggggaaatttccaagaactagcatgttaaagcagtaggaagagaggttgaatccaaaatatctggaatccttacctactacctttagatcgaaactggcctcctgatagacaccatctttttcaaaaaggcaccggtactgcccatcatctgacactgtagcattgtgtatctgcagagtcagtctcccttcctcagcggcatcattcaccaacactgtccttcctctatattctgacatctgctcttcagtcacatgttccccatccgcatacacataaacagcaggataacggtgtgattggatccacctcacctccatgctttgtgcattagtctcaggggacagataacaggttaattgtatgtcttctcccactctgacaaggatgggctgggaaggtccaatcacttttaaggaagctatgagatacaatagacaaaacacaataaagacacaacatggagtaaatagtgtcatcagtaagaacatctccagtgggatttagactcatgggcatcccggggagctgtgaggcaccaggtcatcttgcagagagagggaggtttcaggggaatcaggatagaccttgtccctgaaaaaaggaactattaatagaacccacacctgcctctacctattttattcagattacaacccaataaaataattttgcagttaatactcctagaataaaattaacattttatcacttcatatctgtacgaccaccttaaactacttctcaatctgtgtatacctcaatttcttaaactgtgaaataaatatattaccatcaaaatcataagattgttctgagttaaacaaaataatctatataaaacttttgggtgactatacagtgtgagtgaaggcatgcagaccatgagacgtgaaggcacagaatccaatcccattgccttgataaagagaagggatgatgatgagtttcaggtggatttttagtaatgaaatatgaagaaaccttcccctggtttgatttttataccttataagtcagacccaactaccatattttagttccctgaagtcccacgtatgtggagctctcaacatacaccaggttcaatgtgcttagattattttgagaaacattgtaagagcaagaactggggatgttgccaaaatacaaaacacaaaacaataatgaatacataaaaagtctaatactcccattgtgaaaattggagattttccctgatgtctttcctggaccccaaactatgttacgcttccagttcatcagtctctggccatgctagtttttctctgttctaaattgagagtcatccttatctatcaaatgataaaaatgctttcacataggttatgataatttctaataggtatatgggcataaatttgtatattgttacatgggagtcaatgaccaaagagaaaatgtaattagataaaatctgctaggtacttctttagaaagaaaacttacacaatattaattttcagattattcccttctattctagctaaaatttgactcccaactatttccagcattttgtttgctttatctttcaattttacataaaacaatatctccattgcaaatgtatccattaaaatctgaagatgaaagtaggattcagaaaaaattcaactagggattagtctgctgctatttctccttccatatattttacagtaaattacttagtaaaatagacaatttcctaatctccatcacccatataagtagatgcattatagatatatgaaacttctgttatttcagaattcaagtagaaaataaagtttaaggtacaggaaaaaaatcatgcaactcaatctgctaaaaattgatattctactagaatacaagctccttgagataagctctgaataatcttctttagatacttttatccatagccttccacacagtttgtgctcacatttattgttttgttttatttggggggtattatatgtatgttactgaagtgccctgaatgttactgaaatattcactgaaaattaaatcctttctggagtgtgcagtttgctgaataatataccaattctttgaaacctgataatctcatcatcatgtcatataatccactttcaaacagcatattcaattaagatggctctcatttcctcaatatgctatatttttatattatataatatattaattatatcatatcatatcatatccagagttttagagcctgacactacatcagagattaaattaaacatggaagttcctcaagaagttaaaaatagaactactctatgactcagcaattgtgctactgagtatttactccaaagatatagatgtagtgaaactctggaacatctacaccccaatgttcatagcagtaatgtccacaatagcctaaccgtggaaggagccataatgcccttcgacagatgaatggataaagaagatgtgatacacacacacacacacacacacacacactatggaatattactcaggcatcagaaaggatgaacacttaccatttgctttgacgtagatggaactggagaatataatgttgagtgaaataagttaattggagaaagacaattatcatatggtttcactcacacatgtaatataagaaatagtgaaagggactataagggaaaggagggaaactaagtggggaaaacttagaaaagaagatgaaccatgaatgaaccatgagagactcttaactctgagaaacaaactgaggtttgctgaaggggcggtgggtggcaagatgaggtagctaggtgatgggcatgaaggagggcacatgatgagatgagcactggatgttatattttggcaaactgaatttaaattaagaaaataaaaacaaaaaaattaaaaaataattattgttagaaaaagaaataatctctgaaaagcatttagcatcacaccaggcatataattaatatttttaaattagtcattatttttataataagattatttgatagagatgagtgggggatgggataggtgagtgataggtatgtaggaaggcattttttgtgatgagcactgggtgttggatataagtgatgaatcactgaattctactccagaaatcaatattgcactgtatgttaactaattaaaatttaaatttaaaaagagattatttgccatagtgggacttctacagcaagcttagtctgccagcagccacctgcagtgggaccttgtgtttgagttctaattcatggattaacacagtggtatctgtgaagctcctggtgtcctcaatcaacagcactcaaagctcctgagggcgcagccctgtatcccccacccaacagggagccagggggagctccatattttcatcatgttttactgtggtcccagaaggtcagcacaactaggaacaacacaacatcagattgtacttagcatgctgggtctccaatggacctgtcaaattggttcaaataactcagagtgactcttcacctaaagtcttcctgagggacagagccatgtgtccacctgccccaaacactggctcgacattctggtctgtaactaacaagttcttctggtcaaggtttctgtcttattataagcagatgctgcccaggcaacaggggatctgacttggaaggtacagcttaccagggtgcagctgtccatggattgtggaattacctttgaccctcctgaggcccttctctttatctttatggcctaatgaggtcgaaagtgtcacactagaactctggcagagattggggtgtgtttgccatcctgattttcctcaaaacttcctacttgggctgaagagtatgctcaagctcacctaatgtgcacataggtatatgcgcacacacacatttctgtaaccagtgagtggagggagagcaggagattagtggaaaacaagtgatacaaggtcatatgtatctgggcaggaaacaggctggttatcatgggctgggagaagaggtcacagaaaggaggaagtggtaaggaggcaaaggagaaactgaaagaggctcagatatcagttggttactttttaaaccacttatctttaccttaggtacagtaaagtaatactgcagtccaactgttaagtgaagaaagaaaaagaaaaacaggaaaatgattgattgcctcaggcagtgttccaggctacatctgggaaagttatggctccctcccagtagtgatgaggtttggatccactggggtgtgcagaaaccacagcagggccagagggttgaggtgacaggtggggaactctagttaccatgatgacactgccttcacactagaaagattttaaaagggttcccagagtcccacagtctgttctataccatcccttacacacacaggtagcaccctttcctccagccaaataaagcaatgattatgtctgtgccctttataggtgtccatctgaggcttactggggtccccgtgaacacttagtcatgaagtgcaaaggtacctgagggagcctgtggaggcctgtgttttgtcaatcccctctgatactaactgaacttgacttggtaaagtcatgcctcagtttctcttctggatcacgagttgtcatggtagctcccactggctttgtctgaggttattgcttccctttggggcaagcagggtctcctctatactagcacatccaatatctacttacctagctcattctggaatttctctggaaaaaaaaaacaagaataatatattaaggaatttgatctaagggaaaggagagaaaatatttaaaaagaaaaaaagttctaaattttattgataagctcagttcataaaaaaaattttttaagattttatttatttattcatgagagacacagaggcagagacaggcagagggagaagcaggctccctgtgggcagcccgatacaagaatcaatcccaggaccccaggatcatgacctgagccaacagcagaggctcaatcactgagccacccaggtgcccccataaagaagaaattaaacacagaaaaatattccttcccatggatcacctagtgatccagctgtttttccttttatttccaataaaagcctctcagttctattaccccaccatagtttatttctgctgatattgaacatattgatatttaatatcttgtcaaactgatacatattcttataagtgcataaaagctataaaaatatatggacataggtaattatcacctataattccaaattgaaagataaaacacatataaagcatttatataatatatattcagctgcttttaacattcacatgtgatgttttctttaaattatttaatatatccatttatataagtaagaataactaaatctctatatctaaatatagaagatataccaaaagtcttagtgcagttttaagttatttaaagccattattccttatgtgattggaaatgtttatagatagatacataggtgggtagataggtaatagatagatgtaatctttatataaatagtccgtcatgaggattttttcaaccattaaaatcatttgaaaatagcatgtttcatcaatgctataatttatagtcacataagatacttaacactccactattgtattgtgcctttttaactgttgttttattgctatttataaatgaggctataagtaagatactattatttaatagctgtctccatctctgattatcttcacatgacaggttcttaaaagtaattggcacaatgtggtacaggaaagcattttgattgaaagaatatagttttattctctttatcatgtaatgtatatgtgagtaaagaaaattaattcagaaagaagaaaaggtggaatttgaaaataactaaacaaattaataatcactatttaataaaaatatagtatatatttccagtcataaatagtttatactttttaatacatattactaaattttagatattttccttgataaaaacatattaggtgctatggaactgtcctttgagactttcctgctaatctgaatacactggtcctagagacagagctctgacctggaatggagatgactgagctcttcttctcattgaggatggggttgtggatgagacaggacacattctccacagagtcattcctgaccacaagagtggcttccacatagaacaggccattttcatattggattaaatgctcagaagcagccagcaacttctctcctgtgatatcttcccaataaacctgaggttctgggaaccagccttttgcagtgcacacaagttggattctactttcaacaggtgcctccatgtggatgtaaggggcagaccccagacctgtataggaaagacacagccctgaggcctggagaccatggaagcacaaatcacggaaaccaagatcccagtaaaatcgctcatagggagagggtaggagttcatgggtccagggaacaagtcatccaaaagtcttcttcccattcaaattggatttcatatacactttgcttgttccccattctggatctttaaactttagcatatgagcagtatttttcttcagatccagacaggaggagaataagagaaagggacataatgacattttgcttatgtcactagaactgccaacaaagatgtgttataaatttattcattgaactttcccatgctacaaactctgtgtggcattttagatgatatcttgactctgattaattagaatgtttactataaagctagaaatcatctcaatggggattactcttcacttttttctgttggtggttgtgatcttagggagcaagcagataacctgggcatgtagatgcccttgaggagccttggtttctaagtattccttacaatcaatgggaaaatgttcttgagaaatcctagttttatgtaatcatgaaattctttccttattcaaaatcgctctcaaacccaaacaaagggactatatttcccatagatgataactctatcacttgctgagggaaagagactcactcccttcatctacagccttagaaaatgtgtggtttattttcaaaggttcctgatagtgaacagctgctttcctctctccacacctcagaaatacatagattcttccatccatcttcaatcacctagaacataacaataataatcatgggtgttaagaaaaaatggtgttaggaagcagccttagtctgagtcagagatggtaatatctctagagaactatttccctgagaagataaatagatttgcctgtttttctctttagcatgtgggggaattattcttgccagggaattattcttgccatataattatttacttttcagatacgtgtttttcccctaggacaaatagttttgtaagtcatcccctttttcttaactgtttcccactttgctaatacaaaaacatcagacgaaagcccgtcattcacagtggggatgtccaattgcatctcaataaaaacataaagttcttaacctctttgttcccagcattagctttctaaccgggagcattccacaaagaaagacaattttcccatttagttactgcatattggagggtgggtagataacaatgcattccattgagatatggttgctgggcagttagctagactcactcactctatgattgacctgccctaacacaccagcctgatacagcacaaatttgtgcctcagtaaaattgctaatgaccagatgtcatggattgcaattagtggtcaagaatagtcagaatagtcaatactgtgtaagttaaattcgagaagattgtttataagtgagcttgctttgaagacttcagaatcacttgccttcaaaggaatcaggacagaggactggtcattaggaattacctggaggattgaaagggaatttttcaacttatttttcagttcattgccataagcttaccataaattaatatacttctccctccaagactctatgtcttttccaagatattcacctgtaactttaagctgcaagcttgtttcttgacaatagttattctcttggatacagcaccagtattccccattatcggatggctggatattgtttatcttcagagtcacttttccctcaagaatgccatcctttatcacctctacccggcctctgtactcctccatctgcatctcggtcacatcagctccatcccagtgtgcaaacacaggtgtgctgggctctgagcggtaccaggtcaccttcatgtgcattgcggtcctcttggggaggagctgacaggttagtagggcatcttccccaatcctggccaggataggatgtgtaggaccaatcactctccagttttctacaaaacagagtgaaaaagaggtaccagaaaatgccaattggaagattaatatgcttgctttgggatgtccaatctatcaaaatggaggcatctggaggagggagggctttattttcagtgatttagagaaatctagcacaatgctttgcacatttggctgttaaaaagacaatttcgtgtgctgaaaatagcatgcagttcaaaaatttgagtgttagtgctaaatctgtcaccagctgtgtgatttggggggacaaacccattattttcagtgaggtctgagatttggaatctcaatttcttcatctttaaggtaccaaagccaccatctctgggttgtttttattttcaaagaagttaatgtgtaaattgatttttttacattgagaactttgttcgtgttttatattttatagtaatttattttataattaatgatttcactttatattgttagtgactgatttcataatcatttttcctaaaataaatttgttcgatttttcagcttttcaggagtaaagttctagttaagaaactgggattattttttaacttaaaaagatttttgggtccggggcgacagaacttccatcctggaatcatggcccagttcatcccgtaacctcgctgagaagcctccggtgctggtgaatgctgctgtgacttactcgaagcctcgattggccacattttggcactatgccagggttgagctggttcctccaacccctgctgagatccctacagctattcagagcttgaaaaaaatagtcaagagtgctcaaactggtagcttcaaacagctcacagttaaggaagctctgctgaatggtttggtggccaccgacgtgtggatgtggttttatgtcagtgagatcataggcaggtgtggcatcattggctataatgtttgaagaccaatctttaacatctctttctatgtggcttattatttgagtgttcttggaccatgtgtgatcagactggtatttgaataaaataagataaggtataaaaaccaaaaagatttttggtctggaacaggcaagactccagttactggagctttatatgtacaatgctgtttttgcgaagatttttttgtgatggattaaagacagcattttgtctagagaatctgtgccttttaataaaatttttggtcatgtttgacctttttgtcattatctgcaaatcgaaaggatatttaataatccaggtgttatgatgtttaataatctcataagtcatatatattatattctttctcttcctaaaatgctccagggccacttgcacttgctctgccacatccaatcatcccaagaaggaacttcaacttgctcccttgctgataatatcaaactgatgttggtcaacagctcagtatagaacttacgggaggcccgcttgcattcttcatttatagaatctaaatacgaagctaaatctgaagctaatccatctgattaacttcttttacaggttaggaaattgatttatacagagggctggacagcctcctgccacattacatagcttctggcagccctcagtctggagcctgcgcttctggtcccctgtccactgttttttccacttctgctttgctgtacttttctggggactctgatatttccctctgacactgaattttcataatctttttataaggtacaattcagccagtgagatttccaagaaatggaaatttctaatttcttgtttccaagtatttttatgctgcttaattgatggtaagaagcagccatttttcttgttcccaaagtgctgtcctgcatggagacagaaaaatagatgaataacttaatgtgttctaaatactacttcatgtgcagcctcatttaattctaaagcctgtcctagcctataagacataggtatgttgttattcttattgcaaagatgaggaaactaaggcagaaggcactcaagtaacttttcaaaggtaacacagctggaagttgaggaccctctggaacacagatgctttggttcttggacactcagtccaatattgtcctatcccttttgatctggaactctgcatgtggactgtattgctggggcatcggggtatacagtaaagagaagaccggcattctacctggctgtctcatggtgagcagcacaaggaagaaagaggcaactgcacctgacagactgtatcctggaaaatccaccattctccctgcaaaaaacacaagagaaaaatatgagtacacccaaatgaggctataatggagcaagctcactttgtggttttcaacagctacataaccacaatgaggaatcaacaacatcagcgcctccacagtcaaacaaggaatggatttggttcaatttctctatggttacggatcatttctgactgcttacttagtaagcgctgtgaagtacactaagtacttacttagtgtgttgtactttaaactattttttaggcctctttaaactattttttaggcctgagggaagatttctgactgaaatgaaaagccctcctgagttaaagtgacaacaatatttatttgtttttaaaaactttctaaggtccatttattctgagcaggcagaaattatagggtaggattcagatattttttcttgccctcctcccagcccctcctgcaaagttcttcatcactaccctctcctagatgtacaggaaagagcaagaaggctctgcatcctcactcttccgccaggaagccatcgctagtgccttgggagaggccaaggtctggggttcaccttggaaagggaaagaaagagtgatggaaatggtactacagtaagatacctccaaggagaccaccctcaatggcctttcagtgtcgtcttgaaacacataggaatgagtaaaagaaatagcccaactgcagagattggcaaacccaacatgttcattacatcagcattataaaaatatttccacacagctaaaaagttttaagactaccaggacaaaaatcacatgccagctttaatttcgaaaactgagaaatgcagagtgaaagaagcctaagactcaatccatctgagtgtcgagtatcttactgtctctcaccaactagaaggacttgttcaggagctgatgattgcttctcttttcccagaagctaatgccagtaagattccagagggcaggggaaaagcaacagtcactgaaatagagtataaaccaagtgattcaggagattatttataactgtttttaaaatgcatgttttcatctaaaatagctctagggaaactgatacaagcccagtcacaacacctagatctcaaaggccgttcaaatatcattatgagggcagcccaggtggtgcagcggtttagcgccacctgcagcccaggctgtgatcgtgggaactaggatcgagtcccatgtcgggctccctgcatggaacctgcttctccctctgcctgtgtctctgcctctctctctttctctctctctctctctgtctctgtctctatgaataaataaataaaatatttttaaaaacccacaaatatcaatatgaaaataggactgagcgttaggagacagcatagacagcctgtagctcaccactggatacatatcagtcacttcccctccgaatgaaggggattgccaatgcctcctcttgtgaaaagcagaaacctttcgttccaccaggtaagagcaaataaagcctgcaaacttcatcccaagcaccactactcagtcgtgtgaactaagaaggacgcacatttgctacaaactggtttatagataaatgtgttcctttaggtctttcaagttaaaacagggggaaacctacaaatgtaacttggaaaaaaaattgctcaaattagcaaagcatttgaagaaagttgtgaaaatgcatcttaaccttcattggtgctcagagacaaattcatgagcaagcgtaaacgggggggaataactgccttcgactagggttctgaatgggaaaattgatagtcttgcccttggaggatctttagcaatttctgcagaagtttttggtggtcataactggggtaagagggcattcagtgtgctgctaaatatcctacaattcacagaaaagcccttagatcaaagaattatccagcccaaagtgtcaataatgccaaggaataacactgccatagatcataaatctatgatgaaaacttttggcagattttttgtaaataaacaactggacttacactgcaaactttaaattaaaacattttcattacaaggcttttgacatttctattttactatttgaatataggctgagaatcagaatatggtaaagttgggtattgtcaagaaatgtgatctaatatgtatatatatcattgaatgttcaaaaacccatgtttcatttaattttctgaataaagtctaatgttaagatggaatggtgagtgataagtggtagcatgtgttgaggtgaataacaattctgaattccaaggtcactgttacaattactaccaaataaacttacaaattactatatgtcatgggtcattagaggtggggttttttttccagtaaaaaacctcaaatgttaaatactcaaaatgccaagtgaccacagtaataacctggtgagaataaatttattaagttcacaaaatttgaagtttatatatctgtattaattttaaaaatagatataattgattatatgttaacacatttttatagagagaaagcaaagtaaaataagaattctggaagacaggtgactttgtgtttacttctgtgacctgagaatctccttttattttcttgaaactctcctttccctcctctcatccctaacattttctcagctgtatcatcaccacatgacacacaagtgaggcccagagacacaagcacaacaacatgcatgacaaatgaataacatgagcctacttttctgagttgtaatctagtgccctcacccctcccactgcacagcaatactataaggatcacataagctatggcagactttgaaaaacatggagtggggtacaagtatctgatgaaagttggaaggtataatggcaagtagcagagtttcctgtgggggctgactgtccacatgctccacttcctcatcttagtcgacttccccaatttcccatggtcatcagctgccagggactcatcaagccactcacgtgtctcttctctccttcaggatgaaaccagaagctgctgggtcttctcagtgggtctcaggtgtacccttcatccatgcagaaggtgtccaaaaggaggtcagggtcctgagggtgctgactggcgtgagaactgagagacagccagatggtgtggaggtagcccccagtgacccctggctttgggtgaagggagactgtgctgtgtcacctaaactagcacaaacctagtcctggaggcccaccctgaacatgagattccaaaaagaatagcgtgttcacctcctactggctgtaatcctcagaaaagtgaaactccgacaagtggactttgactgggtttcgttatgagttcttcaggcttgcagatgaaattgtgacattaacactcctcaccaggcccagaaagccagggcactaacactgggcccaatttgacaactagtctgtgccatctccaactggccctcacacagcacctagtagtggtggtctgtcctcaaccttttctccacctcccacacatcaagggtccccccacctactgtttgcttctgaatgcagtttgctagggattagagttaaaagcaagactgaaaagcaaatgccccatctctgcttttactggtgagaaaacaggctaaagaaaggaattaccctccccaacatcatggcacccagctaaggtctcatatgtgcaagtttattgctctttttatcttgattctctattcctctttgctgagtcagatattgactctgagatactaagaaaacttaataagcttatcaaccagatgtttgggcacaaaaataataatgattaaaactacaggcacactttcttttttttttttttttttttggcatgtgtctttgtttaggttagattttcccttaaatttcccttaagtcaattttcttgaatcagagtgcaagtctccctgggttccgcagagatgttctcagggattcaagagttctccagaataatttaaaatttaacgttagatgttcatttcaatataaaatataagcatttgtgatattatgatgtgatatggtttgagtttattttttttcctgaagtgtcttcacttcacaatctgaatgataagcccatatttgggcacctaacttgaagttgctattcttaatgtaagatttttttcccttcatctttcaatgtaggtgaagacccttcccactgtggagaaagaggattttgaagaggagagaaaaataattaaacattgttgagcatctcctgactctctctctcaggtagatggggcaagtgctccactttacttctgattcctagaccggctgcagtgccacatacttcctctcccacaataacatgaaggcagcaaaggaaagtcacccaacgtaagaagaggtggaccttgtaaggctcaaatgctggagggaaagtttgcaacccaaaatgctggtgtggaatgatacagcaagaggatgttgtgaaaagaacatcagcaccaatgtgggaaggacagtgaccactaggaggcaagatgttaccaaggcatatagtgggagtcagtggtggaaatatgaggacagccttccacagcaaccctgcatcatccctaccttagaaataaccctaggcagagggatgtttttaaattattaattgttatgaatgccactgactttcctcagcaattactagcttaattcctctgccaaaaggcattatagcgcttgacataaaaattaggatcagtaataggaaaatacagaaaattttttacacttaactttgtggtgtgaaactattctacccattgcacatattccatatcatttcaattatataggatgctggaattctcccagaaatctttagtacctacctttgcattttatttatggtcagtcacagtagtagcaactgcccacttaaggaagctcatttaaatttttgtacatctcttctcaaaaagcccttacatatactttctcaaggtcttccagtttggaaataagaactctgtcctgaattatgctatgaattacaggtgtccggttttttgtagggacatgttgacacgtgggagaaaaaggcaggagatgctgcggagaccaggcaggccgaacaaggatctgagagaagacagaacagaagggaagaagaatcatgtatctactagatacatggtcactagagggcagcagagacacgctcaccatttggccttcactggcttttccccaagacttgattcactatttcctcctccaaatactgctatcatgcatgacacattcatgactccctcagacagtatgacaaaaggaatcttgagcttaggatatctgagattttaattctagttttgctatgaatttaggtaaactttactttgaataagtttatttgtagggctttaatttccttagctttaaaataaggataaggctaatatatgcactattcatattaaaatgttcctaaaaggtagtgtgagaatataatcatgacacaaaatttattttggtaaacctaaattttaggttatttggtaaacctatacctaaataggtaaatctatttaggtataggtttcagtaatgggagtgacattgtggagagaagggtgactaaaatagagtagataggaaatggcaagaaaagactaatgcaagaggagtcaggagccctgctaataatttggagaaattcaggtgatggccaaccattatacatatataacatcctctttatccattcatttgtcaatgaacatctgggctcttttcatgttttggctattgtgacattgctgctataaatattgaagtgcatgtgcccctccaaatcactatgtttgtatcctttggatacatacctaatagtgcaattgctgggtcatggggtagttctatttttaactttttgaggaacctccatactgtttcctagaatggctgcaccaagtctacattcctaccaacagtgtaagagggttccccgttctccgaatcctcacccacatctttcatttcctgagttgttcattttagtcattctgactgatgtgagatggtatctcattgtggttttgacttgtatttccctgatgttgagtgatgtggagcattttttcatgtgtctgttgactattggttggccttctttggaaaaatgttcatgtcttctgcccacttcctgattcaattttttttgggtttagggtattgagtttgataagttctttatagatattggatactaaccctttatctgatatgtcatttgtaagtatcttctcccattccataggctgcattttagttttgttgattgttacctttgcaatataagagctttttatccttatgaagtcccaatagttcatttttgcttttatttctcatgcctttggtgacgtgtctagcaagaagttgctgtggctgaggtagaagtgggtgctgctagcattcttctctaggatactgatggattcctgtctcacatttatgtcttcatatattttgagtttatttttgtctggtgtaagaaagtggcccagtttcatccttttgtatgtggctctccaattttcccaacaccatttgttgaagagattgtcttttttccagtggatattctttcctgctttgtcaaagattagttgaccatagaattgagagtccctttctggattctctattctgttctagtgatctatgtgtctgtttttgtgccagtacaatactatattgatgattacaactttgtactacagcttgaagtccagaattgtgatgcttccagcgttggtttctttttcaacattcctgtggctattcagggtcttttctggttccatacaaattttaggattgtttgttccagctctgtggaaaatgctgatgggtattttgatagggattgcattgaatgtgtagactgctttgggtagcaaagacattttaataatatttgttcttccaattcatgagcatgaaatgtttttccattgctttgtgtcttcctcaatttctttcctaagtgttctatagtcttcagaatacagatcctttacctcttttgttaggtttgttcctaggtattttatggttttcagtgtaattataaatgcgatcgattccttgatttccctttcctctgcttcattgttggtgtatagaaatgcaactgactactgtgcattaatattatatcctgcgactttgctgaatttcatctgttttagcaatttttttttttggcagagtcttttgggttttctttatagagtatcacatcattgcaaagagtgaaagtttgatttctttgctgagttggatgacttttgttgttgttgtctgattgctgaggctaggacttccagtgttattgaacaattgtagtgagagtggacatccctgttttgttccttactttaggagacaagctctcagtttttcccaatcaaggatgatattcgctatgggtctttcatgtatgtcttatgtcttaaggtctgttccctctatccctacacggtggagagtttttatcaaaaaataatgctgtattttgtcaaatactttttctgcatctactgagaggattatatggttcttgtcctttcttttgttaacgtggtgtatcacattgattgatttgcagatgttgaaccactcctgcagcccaggaataaatcccacttggtcgtgaataatccttttaatgtactgttggatttgaatagctagtgtcttggtgagaatttttgcatccatgttcatcagggatattggtcagtacttcttattggtggggtctttgtctggttttgggatcaaggtatgggcttggtatctggcctcatgcaatgggcttggaagttttccttccatttccattttttggaacagtttcagaggaatggtattaattcttctttaaatgtttggtagaatccgtctgggaagccatccagccttggacccttgtttattgggagatgtttgattactggttcaatttcttttctggttatgtgtctctccagcttttctatttcttcttgtttcagttttggtagtttatatgtttctaggaatttattcactccttccagaattgtatttcttcagggttgtttgtgatctctcttatttcgttcacaactttatttattaacttcctttctttttgataagtctggctaagggtttatcaatctcattaattctttcaaaaaacccactcctagttttgttgatctgttgatctctttgttgatctgatatagaaattaaatttctatatcgatttctgctctaatctttattatttctcttctcatactgaattgagactatatttgctgttctttttctagttcctttagatgcaaggttaggttatgtactggagacttttcttgcttcttgaggaaggcctgtattgctatatacttccctcttaggcccacctttgctgcatcccaaaggttttgaactgctgtgttttcatttttatttgagaagtcagttaaattttttaaaaaggcaatagaacttctgcagagtggtacttgaaatacccaaacatctaggcatggggaactgagctatatcctggttctgacagacctacagtctgaaaggaagaggtctttgtactatcagatccacactgtctcagaatccaaaacctatgtgacaatcccattcctctcaaattaaaaaaaaaaaaaatagtgtatttttaaaattaaatttttacttattttacttttaaatttacttttatgaaaaaactataaaagtttaaaaacaatcactaatatcaaccatgattttttgaaaatggcaaaattaaaataaatgaattccactgtgggtgcctgtaggagtcaaatcctgagaagagatataagcaccaatgaagctcgcactagttgactagcaaaccagcattgatgcctcacttggggaattagaaaaattgcaaatgctgttaatgcctttccattcttcctaggacccgagagagtgcactcacagagatagttaggcatgtcttgcactggaaagaggagaatcttctgaatgctaagagaaagagtgttaagagaagcacatcatcctaccgaaccccttgcatttgcacctgcttgccctgccaaacttctaggttcttgccctgccaaacttctatactcattttccactctctacaccacatccaagagggttactgtagttcctcatgtggccagtagatgacaggcttgtccactgagttttaagtaggcaccatgccttcagactgagttgtatcctaaaacgtcccagattttaactttcaacctcttcttttcataaattgtggagaatggggcaagtataggaaaattactgcggtccagtatgcttcggtctcctcaggaccttagcagaataggtgactgaaccacttggagatgaggatgggaatcatgaagaaacatctctgtaagcaaagattagcaatggagggaaatccaagaatagttggagaaattagacagctctccatagtaagagatattttcctccagtgttcaggtacactttttttctggaaccagttctagcttctgacttctgttgcagcttctgctgctccagttaccagtagctgcaaagcctggctttaaagtcctctatttgaagacctctctgtttcacctcccttccctcattggttacttttaacaggtgcactgtgctgcattgtgtggctgtactccatttgttcaaccagtcacttttaaagagcatctggattttgttttcagtcttttcttattgtacataattttgcacgaatagctccagatgggccttgggcaactttcactgtggtagcctgagaagcaataaaacaaattaaggaagaagcatggcagaaacctttaagaaagtattggagccccctttgagccctggcatgtaccctagcacattggagccaaacttaggtctaatttttttgttgttgttgtcaaaatgcatttaattttcaaaagtcagcatacaattaactttaaatcatgttgaaatacaaaaaaaagccattttttaaaatggatttatggactgaatttctgcaccagtattgctctaacttgccaaagccattcaccttaagatttgctgagcatgtgggtagtgccacttttcttctcagattttcaagtgtgagagatccctctagaacttggatactatccaaagaacaggcctctcagggaaatgcaccacaaggtaccaaatccttcacaaaagaaagaaagaatgtatatctgagtctcctacctcttctccagtgtctcttgcactgtggtactggacctctggtgacacccatccttaaaatttcagatttgagttctgaatagcctgggtagagatgggagccatcagcaaacctatcacctcccctccatcctaatcttgccaccagccacagcacattcatcctgaaaccttatcttcacaccttcattagatgggagccagcataaagcagatactctgactctgcagtttgattaagtacctgcttatcactttgggtttccttttggtctccagacacacgtacaaagctctgcataagtggtttctagctgctggccgtgaccatccattgctttgctgtctcatctatggcaaaatatagtgctgtagatggatatgttgacttattttcccacacatgacatcaatttcacagaaaactgacagaaattctacccaactgcaacaagaaaggagtgccacagtgtcatcatccagtgcctgattatttaatgatgtgctggttgtttagtgagtacacttgtgcatgatccttgtgtggcatgatacagtagaaatcaatggaacatgcctccactattcatgtggggtcaaccaacaatgattcctgatgctactgaagctcctactcaagactatatcctccaaatgatggataatacatgccaaagggttaatgtggtaacccttctctcacttttgcatggaagactccctgctcactgtatcccccacctctttccccagaatctcagggatagactcagagcccaagtgaggatcaagctatgtaagggatggaggtaccttttgcccatatcttgcttgctgaggtcaagagggccctttagggaaacttacagctttgtactagggtaagaggctacagcagctcatctccctggcactgggcatcaaaacattgcagacaggatagcaccagaagaacaggtgctatgaacacttacagagtaaagataatcaatgtttcttgcaatccacatatattgaaaacctcaattatccagccagataggagcaaagcaaagtggtaggatttcttgattccaaaagtaacattgatagccagtaggagtgactttcagcagagaaataaaattcattaaagaatttaaagactagaaacatcaccctaagaacattcaaacactgatttttaaaactagttcatttattctttcttttttcttctttctttcgttttactttcttttgttatattgtgtgatagagattgagataaatcaaaagaaatgcaaatattaaatgtcacatggaagttaaactcattgcttattggacttaattatgaacatatgaggaaactacccacccctaaacttacttccactttgatcatacaccaaatggtggtgatgagacttggcttgggctatgatctcactacaggagagtgaagaaaaagtggtcaaagcaaggagaaacattagtaaaccctttatttgtataaatgtggaaatagacattttagggagacttttgataacactgacaatcaagatagtgagacaagtagctatttgaaagtaatgacagagccaatccattcagagagagcacaggagaagtttagagctggagacagacttgggtgtcacagtacttgcaactcctccactaagggcagcaagggacttcttataccactggcctcagatgttactaattttcttttattagtgcttgcaaggggaaataatttggatggttgaaatcactgaaggatggcaggatggggatttacagcttgaacaaaagtcatatccctccagccgacatgaccatcatagctctgtagcccctgagcttagattctgagcaccgttccctgcacataatgattgcctgagaggggatgcttctggaactgagaactgcccagtgagtatctcttaatatccgagtatagaaacaaatactggagaaaaagtttccgttaggattagatggtgacatagaaaatgacatttactgtttgttgaagcaataaatagattttgggaaagccctgaagtaaatcaggcatttctgctctagaaatatgagagtaacatggtcatttctgagacctcttccagttccccttcagtcaaaacacttctaacttgtttaagatcagtctttcccccctgtttagctgaaattttctgtttgttccataccctacttcatgcctccacccctccccctctctttcctgttccttctgatactaaggcaatttaaggatgattctctcttccataggcctaagaactttacttcacagtctgcactatccatttttggccattttaattctctgctggccagttgaggtcagggagagtagcctgtagacaatccccagatgtgacccacgtgttgatctatgcacagttggtgccatccccaggctgccatgcataagtccatgacaagagtcagctgctggatctgagccctgcctggaaagtgagctataaacttttcttttctgtagaaaaattttccattccatgatgacaaacaaatttgtatggttgagttttaattatagttacaaaaattcatcctgtgtgaattgtgtcatccacagtattttctatctgctatttatttataggtagtgaatgaaagagatggaggttttagaaaaaggaggttatgaaataaagaggtcaccaacctctagagggaatattcactttttatagcaagttgttctgaatttaggctggctgcttccctttttcttcccactctgaattgatgggtattgttttcactgactagtttctaggcatcatgtatatcccccctggcttccgaaatgctcatctggacaagacttttaattttaaaaaatgaagcaggtataaaaaagaatgtatgaagtgaaagaaagaagggatgtagagaggaaggaaagtggaaaggaaagaaggaaggaaggaagaaaggaagggaagaaggagggaaggaagaaaggatggaaggaagaaaaggaaggaaggaagaaggaaaggaggggaaggagggaggaagggaggaaaagtaaaaggagtcaaaaggagaacaaaagggaatggggaacaaaataaaacaattctcatgtttaataatttccaaaaaattcttacaatggggcctattttatacacaatataaaattataccagttccttgtagatacccagttctatggtcaaaaataatatcattcatatctgctcaccaggtgaatgtgtcctttaccttttgttgcctgatcatttgccatcttccacatcctagctatctgatcaaggatggattgtgcagtatgaccctcttataatagagataccacaagcacaaagcctcaccaaatttgttggagatcatgattatacagatttattggcccagatgatggcccagtgccagcaatgaagctaaggccactgggtttgtctcactattcaggttataaaggctggttaattaaaccaaattaattggaaattttgcagattgaaatgatagttctaggacccactagtggaactgtgtgggtctcagacataggaaacgaagcacctagtgcatgccagccacattggaaagtgaacttcatataagaaccttgggatttagcagctgctctcagcagaggagggccaggccctgataactccttcaaggaagaggtaaaggagctcttgctccaaaggagatttaccttgccctcactcagtatccacattgctcaccctgaaggaggcccccacaggctactgaaatgcaagtacactctttggtcatggttattactcttattgtgtagtgcaggataataagattgctagtagatcccttgggccacagactgtcttaggagatgtgctagaacaaattcagccagggacacaactgcaccacaggatgactgagcaccaggcactcatgggctcggttagaaagatctcggccagtatgccactggtcatgaattctggccaagagttgacctccctctacattaaatggttcaacagaattgatgctcaaatgaatcactttgtctttataccaatctcaaattagatcccacacagaaaggctctcccaatgtgaccagatcagatccatctggctggttggtttgtgctctaatgttcttactatgattttaatgagtaatgtctggatcatgaagctagtatccatagatgtctctgcaattagtctattagtggttcacaatctatatgcattattagtggagtccccacaaagcttggttatggacactatgtactcgtttgcaaggtgcactcctcatgatctgatggagctcactgagactgctcacctagtggtataccctatacttgtagttccaacctgagacatgcctctagcacacatactaagaattaaacaccagccagacactcatattcttcattgatctcttcatggaaaggccactatccctaggttggccttcaccaccccaaatacaccaggtccacattagcctgagagcttactgttagagatgattttacctcagatggtgacaccacaacccaagagaacaacaaagaagacaacatgacccaacctcatgggacattgggattttttcccctaaggttgtccagattgtctccaggaaggaaaggactgtattgattttcaacctggatgctgattggcaaacatacctccaaatgattgacaaggaggaccctagagagcactatttgttgttgttgtttttccaaaagagctaaacatttgcctcagaaagctaacctttagcaaaatgcttataaaccataagtctcctaccatctgtctggcaggactagagatcatttcaccctgatggcaatgaagccaaacaatgtattttaaaccacattagttatgtaagtacttcttcataacacccctagcttgatctactcaatttcatgatcagtgacctctccatgctgttttcactgctcaatgtactagttacagctttgcttttcacctaacacctccacaacatactccactcctctttttgtttccaccaccacctcctctatacctgaaattgtcactgcgtttctctctacatcttatccataagccccttccaacacaatccaagtgggccacagccaacttgacaaatatattcatacaaacccccaagatagcagcccaggccttgaaagtaaaacaatgctagggctatcacaacaaggggactgacttacagccatgtgtcattatgctgcagctcttcctagtgatgagccttttgtgttaattcccttcaacaccatgagtctcatttagactagacaaacacctaacctagactccaaacatggcacctggagctctgcttaacaagtattaacttgatggattccatgacagtccattttctctctgttgttcagattggttgatttctgttgttcagtctccaaattcactgatactttcttatcttcacctagctgtttaaaccattcagtgagattttcatttttaatcattaaattcaaaattttccatttggtctctgtatcttctaattctttgcttgactttctagttttaccaatttttaaaattttaaaatttttaaaaattactaatccaaagatttttgtgatgatagctttaaaatctttgtaaaatgattttgacacacatgtcatcttagcattgctgtctgttgattgtcttttcctatttttgttaagatatgtctggttcttgacatgatgaatgctttttttttttaacatgtcttggacatttcgattattttaaaatactctggatcttatttaaatctccttttacccagactccccagatattaggccaggaggagaagggataccatctcattactggcagataggtgtgaaattccaggttctccatttggctccaatgactcctgagatggtaggagtgactttgtgacatcatggttggtgtaaaaattcagactctccgggatccctgggtggctcagtggtttagcgcctgcctttggcccagggcatgatcctggagtcctgagatggagttccacgtcaggctcgtggcatggagcctgcttctccctcctcctgtgtctctgcctctctctctttctctctctctctgtgtatcataaataaataaataaataaataaataaataaataaataaatcttaaaaaaaaaattcagactccccatgaggcctctgcttatactacccagactggcagatgaggagcatcttgtaagggtagtggtaaaagtatgagatttccacttggcttcttgtgacaataacctggcagagaaggcaagggctgcctcgttaccactgggttgggtagaagtccaggccccctatagagacttcactaatgccacagtgtggaggtggcctattactgatagagcagtggtgaaagtcctggatcctgagtaggcttcctctggaacagtcctaatgggtttagagggtgcctttctatggccagggtgggtggtagtctaggctccccactcagcctttgctacctgaaatgggagtggagggaggggacacagatttttctgtagtagagtagtatgattatgcctacatgttctgccttgctaggctgccctttcctgtgtttttgaggtagaaaaagatcatttccttaggatatttttgtctgtgcctactggtgtttcttagtttccagtttctccaacacttcttcctgaatacattaggcaaaaaaggaaaatccaaggaactcaccatatgtcattcctcagtcccagggactggagtgaatctgccttcttttctccacctttcagagtctccttttgcttgtctttacctgtacttaatttaaaaatgggaagaattgttatctactccatcttgtcctaaaaccaaaaatccctcaccataaaattttgatatcttaaaacatagatcaaaattctgtgcacttatacctagataattatgatatgtttatttaatttgaattgtttagtaacaaaaataaagctaaaataaaatagcaggtgtgagattaattatgtaatagcaaactatgaaaatatgcatattttttcaaaaagatcacaggaaattatatatatatttatttatatttatatatatttataacacaacttatatattatatatatacattttccatggatgccatgtcacatacacacatgtgtataaaaaataaactcaaaactatctattatcaagactcagggatcttcttacactgactattcagatctcattattatcctagactatgcttggctctcagattcactcagtagaatgacaggaatcaaagcatgctaaggggacagcatcagatgtttctcttcagtgggaaatttattgaaaaagtccataatacagtccaggtgctagtctctgcccaacccaccccgaagttacagtttaggtgcaaggagacgaatttacacctatgagagtggagtctgccctggctgagcatcttcatctgccttggagccagtacttctaataacacctccatggacataactttcagtccccctgcaaggacatggcatgcccaatacaagggtctctgcattcagtgatgctcaaattgtgagctcccaccatttgctataattaaccacattttcctcccaggcaagaccataggcaagtttgtctataaattcagctgacattcattctttatcagatttccagaaaatagctacaaaactagcctgagattaaatttgtcatggagaagtttttaacatatacccacaagaatcaatgtgatttacagttaactttttcttttttagacatcatttcatttttcaaattatttaaaagaagcacattccatattttgtatgcttattttttaaaaagacatggtaaaaattagtataaacagattttaaatgtttttattttttatttttatttttatttttaataaatttattttttattggtgttcaatttgccaacttacagaataacacccagtgctcatcccgttaagtgcccccctcagtgcccgtcacccattcacccccacccccccgccatcctctccttccaccacccctagttcgtttcccagagttagcagtctttacgttctgtctccctttctgatatctcacacacttcttctcccttcccttatattccctttcactattatttatatttatattccccaaatgaatgagaacatataatgtttgtccttctccgattgacttacttaactcagcataataccctccagttccatccacgttgaagcaaatggtgggtatttgtcatttctaatggctgagtaatattccattgtacacataaaccacatcttctttatccattcatctttcgatggacaccaaggctccttccacagtttggctattgtggacattgctgctagaaacatcggggtgcaggtgtcccggcgtttcattgcatctgtatctttggggtaaatccccaacagtgcagttgctgggtcgtagggcaggtctatttttaactctttgaggaacctccacacagttttccagagtggctgcaccagttcacattcccaaccaacagtgcaagagggttcccctttctccacatcctccccaacatttgtggtttcctgccttgttaattgtccccattctcactggtgtgaagtggtatctcattgtggttttgatttgtatttccctgatggccagtgatgcagagcattttctcatgtgcatgttggccatgtcaatgtcttcctctgtgagatttctgttcatgtcttttgcccatttcatgattgggttgtttgtttctttggtgttgagtttaataagttctttatagatcttggaaactagccctttatctgatacctcatttgcaaatatcttctcccattctgtaggttgtcttttagttttgttgactgtatcctttgctgtgtaaaagcttcttatcttgatgaagtcccaatagttcatttttgcttttgtttcttttgacttcgtggatgtatcttgcaagagttactgtggctgagttcaaaaagggtgttgccagtgttctcctctaggattttgatggaatcttgtctcacattaagatcttacatccattttgagtttatctttgtgtatggtgaaagagagtggtctagtttcattcttctgcatgtggatgcccaattttcccagcaccatctattgaagagactgtctttcttccaatggatagtctttcctcctttatcgaatattagttgaccataaagttcagagtccacttttgggttctctattctgttccattgatctatgtgtctgtttttgtgccggtaccacactgtcttgatgaccacagctttgtagtacaacctgaaatctggcattgtgatgcccccagctatggttttcttttttaaaattcccctggctattcggagtcttttctgattccacacaaatcttaaaataattttgttctaactctctgaagaaagtccatggtattttgatagggattgcattaaacgtgtatattgccctgggtaacattgacattttcacaatattaatgctgccaatccatgagcatggaatatttttccatctctttgtgtcttcctcaatttctttcagaagtgttctatagtttttagggtatagatcctttacctatttggttaggtttattcctaggaatcttatgcttttgggtgcaattgtaaatgggattgactccttaatttctctttcttcagtctcattgttagtgtatagaatgccactgatttctgggcattgattttgtatcctgctacgctaccaaattgctgtatgagttctagcaatcttggggtggaggcttttgggttttctatgtagagtatcatgtcatcggcgaagagggagagtttgacttcttctttgccaatttgaatgcctttaatgtctttttgttgtctgattgctgaggctaggacttctagtactatgtggaatagcagtggtgagagtggacatccctgtcttgttcctgatcttaggggaaaggctcccagtgcttctccattgagaatgatatttgctgtgggcttttcgtagatggcttttaagatgtcgaggaatgttccctctatccctgcgctctgaagagttttgatcaggaatggatgctgtattttgtcaaatgctttctctgcatctaatgaggggatcatatggttcttggtttttctcttgctgatatgatgaatcacattgattgttttacgagtgttgaaccagccttgtgtcccggggataaatcctacttggtcatggtgaataattttcttaatgtactgttggatcctattggctggtatcttgttgagaattttggcatccatgttcatcaggaatattggtctgtaattctcctttttggtggggtctttatctggttttggaattaaggtaatgctggcctcatagaacgagtttggaagtactccatctctttctatctttccaaacagctttagtagaataggtacggtttcttctttattttttattttttatttttttaaagatttatttatttattcatgatagacatagagagagagaaagaggcagagacacaggaggagggagaagcaggctccatgcaccgggagcctgacgtgggattcgatcccgggtctccaggatcgcgccctgggccaaaggcaggcgccaaaccgctgcgccacccagggatccccggtttcttctttaaacgtttgatagaattcccctgggaagccatctggccctggacttttgtgtcttgggaggtttttgatgactgcttcaatttcctccctggttattggcctgttcaggttttctatttcttcctgttccagttttggtagtttgtggctttccaggaatgcgtccatttcttctagattgcctaatttattggcgtatagctgttcataatatgtttttaaaatcgtttgtatttccttggtgtcggtagtgatctctcctttctcattcatgattttattaatttgagtcttctctctcttnnnnnnnnnnnnnnnnnnnnnnnnnnnnnnnnnnnnnnnnnnnnnnnnnnnnnnnnnnnnnnnnnnnnnnnnnnnnnnnnnnnnnnnnnnnnnnnnnnnnnnnnnnnnnnnnnnnnnnnnnnnnnnnnnnnnnnnnnnnnnnnnnnnnnnnnnnnnnnnnnnnnnnnnnnnnnnnnnnnnnnnnnnnnnnnnnnnnnnnnnnnnnnnnnnnnnnnnnnnnnnnnnnnnnnnnngtatgatatttgctgttttttctctatctcctttatgtgtaaggttagcttttgtatttgagttctttccagtttttgaatggatgcttgaattgcgatatatttcccccttaggactgcttttgctgcatcccaaagattttgaacggttgtatcttcattctcattagtttccatgaatctttttaattcttccttaatttcctggttgaccctttcatcttttagcaggatggtccttaacctccacgtgtttgaggtccttccaaacttcttgttgtgatttagttgtaatttcaaggcattatggtctgagaatatgcaggggacgatcccaatcttttggtatcggttcagacccgatttgtgacccagtatgtggtctattctggagaaagttccatgtgcacttgagaagaatgtattcagttgagtttggatgtaaagttctgtagatacctgtgaaatccatctggtccagtgtatcatttaaagctctcgtttctttggagatgtgcttagaagacctatcgagtatagaaagagctagattgaagtcaccaagtataagtgtattattatctaaatatttcttcagtttggttattaattgattgatatatttgccagctcccacattcggagcatatatattgaggattgttaagtcctcttgttggatagatcctttaagtatgatatagtgtccctcttcatctctcactacagtcttcggggtaaattttagtttatctgatataaggatggctacccctgctttcttttgaggaccatttgaatggtaaatggttctccaaccttttattttcaggctgtaggtgtccttctgtctaaaatgagtctcttgtagacagcaaatagatgggtcctgcttttttatccagtctgaaaccctgcgccttttgatggggtcattaagcccgttcacgttcagagttactatcgaaagatatgagtttagtgtcaccatgatatctattcagtccttgtttttgtgcattgttccactgaacttcttcttaaaggggacttttaagagtcccccttaaaatttcttgcagagctggtttggaggtcacatattctttcagttcctgcctgtcttgtaagttctttatctctccttccattttgaatgagagtcttgctggataaagtattcttggttgcatgttcttctcatttaggaccctgaatatatcctgccagccctttctggcctgccaggtctctgtggagaggtctgctgttaccctaatattcctccccataaaagtcagggatttcttgtctcttgctgctttaaggaatttatctttggaattatctttatctttggaatttgcaagcttcactattaaatgtcgaggtgttgaacggtttttattgattttagggggggatctctcgatttcctcgatctgaatgcctgtttccctttccagattaggaaagttttcagctaggatttgttcaaatacatattctggccctctggccctttcggcgccctcgggaaccccaattaaaagtaggtttttcttcctcaggctgtcgtttatttcccttaatctgtcttcatcgtcttttaattgtctgtctcttttttcctcagtttccctctttgccatcaacttgtcttctaggtcactcactggttcttccacctcgttaaccctcgtcgttaggacttctagtttggattgcatctcattcaattgatttttaatttctgcctgattggatctaaattctgcagtcatgaagtctcttgagtcctttatgcttttttctagagccaccagtagctgtataatagtgcttctgaattggctttctgacattgaattgtaatccagattttgtaactctgtggaagagaggactgtttctgattctttcttttgaggtgaggttttccttctagtcattttgcttagtgcagagtggccaaaagcaagttgtattgggaaaaggagaaaaaggagagatagaaggaaagaaaagagaaaaagaaaaaagaaagaaagaagaaaaaaggaaaaagagaagaaaacgagaaagaaaaagaaagaaagggaaaaaagggagggggaagcaaagaaatcaaaaagcaaaaacaaacaaacacgggggagtatcttctgattctgtatatttaagtcccttgacttcccctggaacttgtcggtctagctggtcttctgggggaggggcctgttgtgctgattttcaggtgtgagcacttgggggagctgctctgcccctgcctggtgcagggctcagtgggggttgttcaccccatgaggccacaggaggaacaaccgcagtggcggggccagctctggagccctggagtcagctcccgcagtaactactgagctccccgtctgcagggcctggaggctccggggcagggccgctgctctgctcagctcggggcaggagcgtcctcgctgtcctgggccctcccggcctctgcctgtcccggggggaggccggatcctgggctgtgtccgggcgccctgtgctcccggggcctgcactgttggattcgcgctcccgggctgcgcaaccctctccgcggagccgccgcccgagcccccccgagctgctcctggaaccatgcagccccctacgcggagcctcttcctctgcccgagctccccgagctgctcccgggccgtgcagccccctccgcggagcctcgtcctctgcccgagcccgtccgagcggctccgggtcccccgtgagcgctgcagccgttagggagctcggcgcactctcccggggcgcaggtgtctgttagtgtccccgggagcccgagggcatccccgccctcctgggtcctgctccacctccccgtgggcccatttccgccagggaaggttggtgcagctcctgcttctccgggagggggctctcctgtcctggggacactcgccccggcctcagccgggctcctcgcggggcccctcccccttggaggcttttgtttctttattcctttttccccgcgtcttcctaccttgatagaagcgcgaactcttctcactgtagcattccagctggtctctctttaaatctcaggccgaattcgtagattttcaggatgatttgaaggtgatctaggtaatttggtggggacgggtgacttggggaccctactcttccgccatcgtgcccctcctccccttaaatgtttttaaattgtatttaagcaatctaattagattaaacacactcgggaagtgtacatgaggaataaactaaagcatcccaaatctttgacctttcaaaaactgcctgaatactcaatgccaacatttatgaagaattacatgctattgaccacaagagggaagccttgtaccatttttaccagggattagaaaagcgggggaaagagaaacttttttcctgagaaacttttaaaatattcatccgtaagtacagtgtacaggagaaaacaatagtcatcccctttcgagactgcattggtggttgaagtggctttagtattttgaatacacttgttcttggctccacatgttactggctacacaattagagacttgatatattttttttgcacatttaatttttatctttaattaatccatttttaggagacatatcactgtggaatgtgtactttggatccaaccaaatcctgggttcaataccactgtgtttacttcctaagtgggacttttctttagaacccaggtttctcagagtaaattggaaataaaattattatctagtgaataaaatagtaaggtttaacatgatagctatttttagtagtattttcaattaataaggaaatacttatttcagtaaaatcatgaagaatcctctggcctggatctctcctttcttttaccttaaaaatttcaaagttcaaaagtaatctcagaaatacaaaatataagttcttcactatcatccctcttagtttttctaaaagcttattcagcattaaccacctctcatgtattaccctatttaactcttaaaatgatatgttcttgagatgccattcatccactctagctctcccatcctattatgttcactaacatttcccattgttctccatgctggacccgtggcacattcagcgcaaacagaagccacctccttcgcatgacatctatttttgtataaaaaaatttccttcattgggcagcccgggtggctcagtggtttagtaccgcctttggcctggggtatgatcctggagacccgggatcgagtccacgtcaggctccctgcatggagcctgcttctccctctgcctgtgtctctgcctctctctctctctctctatgtgtctctatgaataaataaataaaatcttttaaaaaaatttccttcattcattcacaatatttagacttgaaacttttgttccaagttggtttttggtgggttttttttttttttgtcatttttgttgttttttggtgttttgttttgttttgttttgttttgtcatttttctatcaccttcccctaaaccagtccatcaaggggcctaatgattcactcttcatatttcttaacatctcatcttcacactctctgccctcttaaattctctgtgagtgttttgcatgtttagaacccagctccttggctacaattgctgaccaaattcattaataaaacatcttcaagaattaattgttaaccaaaaattatataaatgtgattgaatgaaaatggagacttttccagctctccttaccccaaacacacacatctacattctataaaatcattcagacctagatgagattctacattttcaatgtcatgcaatagagcataatatttaagaataccatttcttgactctctcttacatggacagtggagtcaggtcacttcctattcccaggagaatagctgaaaagaggattcacaggtgagggcggcacattttcaggacaaaatggaaacaaccttgcgttgcaaaacaatgcaaaacagcatttcattgcaaatagaatgccctgtatttctgggatttgtgctggatttgtaacagcacagatgatatgtggagttgtaggtgactctgaaaacaagctgccagaatgtgtaaaatacaggagctggtactaagtgagtgagtcaaacgatttattggcaatatgggggcagcttttggaggcaaccagtcttaggcttctgtagtgatttttcaacctaatctgtcccttcacaatctctcagttattgaattcagcttgtgccttttagaacccacaaaaaaacttgggaattataaaacaacctgactatagatgttcaaatcataacaacagaacctgtggttggctttcagggaaatattctgaaatgtggattccaaattactaatttccccccgccccaacacacacatatacacacatgtacacttgtggccttaggttctgtgtgaaagttatctcatttccaagccataacctattacccctaaataccctctggttctaggtttggtactgtgggaggaacaagagagaggtatacatatttgcatttaataatttcaaaaattcccattagcttttatgtgtcatctgtatcacaggaaataaaagtaagagtattacatttcccaggctctcttgcccaggatctggatgtggccaacaggctgtcagtgaaagttagtattatgagatttggaaggtgacaagtaggttgaagccatctgatgcagtggacacaagggcttcacggacaggactcttgggaacagccttgtattgccaagactttcctttccctggagctgtagaggagctgtgatgtccgcagcagcttcccataggttcctgatcttggagttaggagtctgcactgacctttgctctttcaggcttcctaaacactttaaagttataattccctctaatacagaagaattgtaacaaacaattctatttagagtgtcttacaaggccttctattttcagactgaactatgactagtacagtagctcctcccaccatttgatgtcacttttcatacctcactgaggtgccttcagaaatcccctcagacataggaagctagaatatgggaaaagaacaggagaccatgggtagtgtccagatagaaacttctctcctagcatggagaaagggaactgaaagtattttctaaagtctcccaaatttggtaatctcatgagaagaaccaatcagtattttaaattaagccatatcataagttgctgagcaacaccttaggttgaagttgctgttatgacaagtaaaacatttttctgtaaagtgtctctgagtttaccatatactcattgagctgcttataagaaccagtcagtatgatagctagcaaagggcaggcatacagacattatacttgttttttcctctgagagaggagatgacaagcctaaatcataggaccagactctcagcggagattgatactataaagctctcatctggcccattcctttgcatccagaaagtgtattccttaacaatcttagggcaaaactgtgctgtgagtctcttccacatgatctagaagtcaatgtgagagggtgttcaaagtccttagatccgatcaaataatcggtaatgtgtagggaaaaaacctcatgatttgtgacggtggctgtggagcaggataatatctcagcacaacagtatagaaaatccaccaggagcatatgtgtcatgactgatattaaacagcaaactcaccatctgaggagctgcctcactgtcagggctctctcccttcattggaagtattcagattccaagcctttctacatgtggtttaattttcctttatattgtactgtatggtcagaaacatgaaggtcagaatgatttaactttcagttttttcagtggtgaatatcaaaacaaattcttgggatcagaacttcaataatttatgacatgaagagagctttcagaatgttattacctgagggacgttacgggaaagctctcctgcaggttattatctctatttctcccagtagaataagctctgccatatttattccaccctattcattgatctaagttcctcaaatgaggagtgtccccagcagtctaccgcaatgtttgatcatatttaagatggtagagattacagtccactgtttcttatagccactatctatggtgtgtctaccatccctctctagctaggggaatgttgacactcagagtttctcttctgatattctctcaatatcgtacagtgccagggatgcctagctgagttgggctgagttggccatctgggagtctagagtactgaaggagaatcctgaagcaaaaagctcctgaagttacttaagtgaagctctgtcacccactactgccaagaatcaggcattctccatagcatgacaacctaccttctttctcagatgctttgttgtcccttaaacaaactccccagctgtcacagcacagaagaataatctttcactaactgccatgtagggtgtttccattgattttattctcactaatgtgcttcaagtacatccctttctagaacttggattaggaagaaacagtctatgggtgaatgtgattcttgaacatttgtttattttgctatttttatttgattatatgtatgaggtgttttttctttttcttttcttttcttttcttttcttttctttttctttctttttttttttttttttttttttttttttattaagagctttacttgtttacctgaccctttgacaagagctcttcccttagcaacagatgtatcatctcaaaagtttttctgattggcttcagctcaacttatttaaatttcaatcagtcaaactctatcataccatacattctctctttttttttaaatccgtgtcagttataccctactctttagctctactgacctcccaacaaatcacagaagaaaatgaccataagtggagtcccagtgctaggatttttcatcatggctttcctgatgggtcctcaggaatcatgggctgtcaaaggtaagtgctgagagaaacaaaacttgggatagaaattctgagagcattggagagataaattgtaaatatttgcaagactgtctttgaagtgaaggaaaagtgtggcaggcatcgtgtggtctaaatctgaaagtattaaaaaattgtagtttggaggagttctgatcttataaattgaagtcagtcacatttagttgagaggaacaaaaaatggtatggattagtaccattgactttgagataaggctgacttgaagtgaaaatcttttctgagaggtattaacaagctatcctctgggctttaatttctttttctggaaaattagtagattttgaaatctcacatcattttgtggggattaaatgagaaaaaatatgagaagttcttgcaactgtttcttagacaaatatatgatattttttttggcaagtgaatcctgtcagaatattttaagcacagatattgcattgaagatcaccagaaaaggaagttaccaaaagcaacaatctacccaaggaagagcaagggcaggtatgcttataccaattgctcttaatttacttcctcttaggagaaggatggcgccttcaccacttcagtggatctatgatctatgatcacagctacttagtgattttctcaaaagagtagaacaatgaaaaaagatatggaaattcttttattattctctgccatctgcaaagcaaatgtttactgctatgaagatgtattgtgaaaaagtaacctttacccagactaaaccccagaaaggatggcagtacgctggaaataagtaatataatcatccagttccaagacccatgatagaaactgtatgtttctattgccttgaaagggccacaaatggagatgcatatgtgataaaatagaggctcttcccttgggatggaagaggaagctagaggtgtctctgttccttaagtataaagcagttttgaacctaaaatgcttgttataagcctgttgatgtactaagaaattacttacctcatctaattctttttattactatttttttttttttttttgagagagtatgtgattgcacaaaccgggtggggagagacaaagagagaaagagggaaagaatcttaggcagtctccatactcagcgcagatcccaatttggggctcgatctcagtaccctgagattatgacctgagccgaaaccaacagtcagataacttaactgactaagccacacgggcgcctctcatttaattctaaggacaaattcaagttagaagcaaaaccataagagaatataataggaaaactgcaaagaagtagataaaataatccatttaaaccactagataagtaaatacctgaataagaattaaagatttaattagatccagagttcagaacctagactcttatttatttatttttaaagattttatttatctattcttgagagacagggagagagaacagagatataggtagacggagaagcatgctccctctggggagcctgatgtgggactcaatcccaagactccaggatcatgacctgagctgaaggcagatgctcagtcactgagccacccaagtgtccttttaaacagtgtttccctcttcttaataatccagtgctctgagagaggccctagaactcttgtttaattgtatttaatgcctgggaaaatacagtgagtgattctattttaggaattgctgctagatttccaaaaagggaatcatttctcagctactagcatggaacctaacagcagcttcacaagaatctaggattttcagccttcatttccttcaatgcaccctacctctgcccttcatttctcccctcctagttctgttcaacatggatgtcctgcacctgagcctcatcttccagctcatttctgctctctatcattcctccattccacatggccaatcccttccactgcccacacccacatgtttgtctcacatcctgggttctacttcttctcctgctcctggtttccaccctaactctcttccctgccttttcagaggagcacgtaatcatccaggctgagttctatctgacccctgacccatcaggcgagttcatgtttgacttcgatggtgatgagattttccacgtggatatggaaaagaaggagacggtgtggcgccttgaagaatttggacgttttgccagctttgaggcccagggtgccttggccaacatagctgtggacaaagctaaccttgacacaatgataaagcgctccaaccacaccccgaacaccaatggtacgtgctgcactcctagacatggggatcataactttgaaatagatgcttcagcttatgtgttacattattgtgactgactttccctcccaggggcctagtgtggccataaacaagtccctacttctcatgccacaggcccaagaatttcatatgagtttgttcctttcctgatgtgctcatatctcatccttaccatccacagtcacttatagagccattgccccaaatctatgctggggagggtgggcaggaatgaaattatctccagtgcctaaaatatcctgtatatcttacaccacagcactggttccagttcatggaggagagtatcagagataggtatctgagactgtagtacagatcctcagggcagagtttcaactgcttattctgtttcagtgggagggagaaggactagcccaagcagggaaggctaatttctgtcctgtgtcctcagtacctccagaggtgactgtgctctcaaacacccctgtggaactgggagagcccaacatcctcatctgtttcatcgacaagttctccccaccagtgatcaatgtcacgtggcttcgaaatggaaaccctgtcaccacaggagtgtcagagacaatctttttgcccagagaagaccaccttttccgcaaattccactatctccccttcctgccctcagccgaggacgtttatgactgcaaggtggagcactggggtttggatgaacctcttctcaagcactggggtatggaccatccttccatctcctttcttttatgattttccccggtgatgcatatgtctggtgctttgggatgttccctaactcatccataacaattgctatgactcctattccttgtcttctcccattattcagtttcacccaccttttaatatgcatttccttcatacatcattctgtcttcctcttatttaattgattgataattatttttttgactgaataccctacctttgattctaattgctacgccatacacagtcattacctctgtactgtactctgttttattttccccagagtttgaaccaccaacccccctcccagagacaacagagaatgtggtgtgtgccctgggcctgatcgtgggtctggtgggcatcattactgggaccattttcatcatcaagggcatgcgcaaggtcaaagctggtgaacgccgagggcctctttgaggcactttcaggtgggtttgatgtagaggaaggcatatatatagaaagaattatccaaaagaaggaaacagagtggggagaaggatatgtgatatctttaaaggaaaatgataggaaagtcatgactcttaatttatctttgcgagaacagaatcagacattgacaccatctggtatcccaaaactttaagaccccatattctctccgatacatgtgcacctataccacaatctcagtcttagaaattatctccactacccaatactattgtttcacataatactaatgaatcaatgatctaggaaagctttgagtactttctggtatatattttctgaaacagtacctcagctcagaaatatttccagagcttggctctttgggggttaggataaattcactgcataaataaaaatctccttaaggccaatgtctgttttttcttctccaatctgaaaagtggtgttgaaacttctaagaaagcgtaagctctggaagctctggtctgctcatttatgttcacttggagagtgggagatgcaattcatgctagaaagtttctatttactagatagaggtcaagtgaatatttagagacacttccaaagtcaaaggatttttctttttcttttttttctaaaggggttccaaagtcaaaggtttaagggagaagacgaatgaatctgaaaaaagagcttaaaataataatcttaactctttagtaactatgcgtgtcctgctacaggcaatggagtttcctagagagaagatcagtgaagaaatttatgcttcaatagctttataaacctggcaatactccaactgttcacctcactgaggacaaccatttttttgcattttccagacttttagatattctaagaaaaatgatgtcttcctgatctgatatctagttattctctctttgctgacccttcttggatccgttttcctccattttctaccatcattttaatatcaccatgcaatgcctctggaatagaccccataggatcttttctctactacggaaccttgtgaatgttcgaaacagatatctcttctacacttagtgctttggtttcttcaaattgtgattgtgatttttttttaacacaataaactatttgatggatctgagatgaagtttttatgtctaagccagttcttcacagggacaaaggaatatatgtgatcctttcattctgaaatttgtgaatgttgaatgtatgtgataagttctataagcagtcagaaatatctaggtttggggcatgggtggctcagtcatttaagtgtttgactcttgattttgactcaagtcatgatctcagcgtcctgggctccgcatgcaggacagtgtctgtttgagattctctcactccctctgcccctccccctgttcatgctttctaaacaataagtaaataaataaataatcttaaaataaaaaggaatatccaggttcattatgaccatgtctcattcacagcatctgcaagtaatccagttgctatggtccagtccctctatggaaaactctagagtagagtttgtttgttgagagatctctgcttaggaatgatttcagaatctagttttggttcctgatttccaagtcagtgatacatgtggatctttagtagaatgaatgttaaagcatagggtttagccgcagctaataggcaagactgatgatggggagcagatgagagtggagtggaaaacagaggaggatttacatgttacaggatttacatatcaatgacactccagatttaacggaaaataggataggacactgtggatcagcattacccattttattaacatggtctttgatgcctgtgtcattactagataaatggtctgacttattcctgaaacaatcttgtattggatatgtatccccgtgcagaaaaatcaagtaaaaagtggaaagttgggggaaaacatgacattaaaatagagtgaaaaaatgtttgagatacagtgagctcttgcttacttctctgtgaaactattacttgaaatttatttctaactagttaccagagcctaccccaaaccataaagatcaattatcctgatagtttgatagagtagcaaataccagatgttgaattgacgtcaacttgggcttcatcttactctatatttactagctgtgtattcactgataccttgcttaactcaacttacttgatttgtttcatgaaaatactgatggcaatttttacacactgagttattataatattaaaggacaaatgcagaacacctgggtggctccgtggttgaacatctgcctttggctgggggcatgatcctggggtcctggaatagagtcccacatcaggatccctgcagggaggctgcttctccctctgcctctctctgcctctctctctagcagtcagaaataaataaaataattttttaaaaaaggaattaaaggacaaatgcaagaaaagtaattatgtctcatgcttagtgattgcaaaaaattataaattccattattttttctcaaaatgtttataacctgatgataaaaatcccagaaatgcacaaatcaaaagatcactttgaagggtagcagaataactcatctcaaaatatgccactctggcataaggcttattttgaggtgataaggcgtttgaggtaataaaattgctgtagattgcttgttagctgaagaaggggtcaatgccatagcaaatacctcctgctgctcctggatcaatacctctgatattatagaaagtcagtacaagaaattaacaagccttttggctaaaacacattgatacctactggtctggttcatggaggtcctgacaaaaagcatacttccctcccttggtattctcgtcctgatagtcatcatgaagctgtgttccctcaagggtctcaaacacatgctcagagccatcagcagtatatcagatggtctcactgcatttggagaaacagaaatgacatgaacagtgaggtgcaaacacctttcacaaaccttactttataacctatgagtttcacagggaaacaagaaccacttaaccctgatagtgcctagagtgatactaatatcaaatttttggtccacctcttatgtgtacaaggataaccaaaaggggataatttttgggtaattttactaggaggccattaaactgagatggctctaacagcttggtaacaacttacataagcaaagtgaaacgtaaactagagtcaatccctgtaagcactcgtatgccagcaaattcaccaatagccaaatgggcttttccaggtaaggcaactgaagagaatatagccaatcagggaattggtaaagcaatttctgtgctttgcctctgcacctgttctaccaaagcctattcctccagctcttgtcacagaactcttcaccattttcaggttggcacagccagacttgaatcatgttctcaagtaaacacttagaaattgtcttatgccttagtttatctaacaccttaaaggacttactaaaaactagcaagtttctgtattctgtggcttaaagaatcaaggcacatctttagaaatttgaaaatagtcataggtgtttcttttatgtaactcccattttttaccataaataggtggcaatagagaatacactaaaactcagacatatgtggcataaaaaagaaaacatctacaacctcccatataaaaagacattttttgaatactttacctttaatgagcagttttaggttcacagaaaaattgggcacaaaatacaagagttcctgaatatccccatctttccccctccctgctccatacagtttctcccattattgacacttggcagcagggtggtacatttgatcttaccacactgatgaatcaacattgatacattattatttacagatgtctatagtttagaatagggttcgttctttgtatgatataaatctctatagtttgccttttccagaatgtcatatagttgaaatcatacagtgagagctttttagtctaacatgattctttcatgtagcaatatgcatttaaggtcaccatgtcttttcaaagcttaatagcttttttcaaattgctgaataatacttcattgtatggacgttccacagtttatcaatccacctgtcaaaggacatcttggttgtttccaagtttcacaaagatgctataaacattcctgtgccagtttttgtggggacatatattttcaactcattgagtaaataccaaggaaaacattgctggactgtaatataggagcatgtttagctttgtaagaaatcaccacagtgtttcttccaaaataattgtaacattttgcattaccatcagcaaggaatgagatgccctattgtactgcattctggcttgctagcatttggtgttgtgagggttcttgattttacccagaagtccaccttaaaaaatttttttaatttgaaataattatagattcaccagaacttgcaaagacagtatagatagaccctatgtacgtcttatctagtttctccaaatgattatatattaaaaattataataccatatcaaaaccaggaaacatattggtaaatgtgcctgtttcctcccatgagtacatctgtgtgaccaccaccatagtcaggcacagaactattccattaccagagagttctccctcatgctgccctttgtattcacaatcacttctcttcagaccccatcacctaacaactgctaatttgctctccatctctataatttgttattttgagaatgtcaaatagatggaatcattgagtatgtggctttctgagcttggcctctttcaattagcataatgccctttagatctatctaagttgttgaatgtacccacaatttttcctttttattgctgagaggcttccatgatatggacacacttgttgcagggccttttggttgttcctagtttagggcaacgacatttaaagctgctatgcaaattagtgtacagttttgtgtgaacatgagttttcatttttctgacataaaggccatgaaatgtgactcctgggacaggaggtaagtgtatgtttagtttttaagagattgccccaaactatcttccatttcacatccccatcagtgcaggagacatccagcttctctgcattctcatcatcatttgaccttgtcattatttcatattttaagtgcttcaataggtgtatagcgatgtatcagcatggtcttaatttgcattttcctaatagctagtgatgttaaacatcattcaatgagcttattttccatatgaatattctttctgataaatgtctctttgtgtctttctcccattttgtaattagagtaggtgtgtgtgtgtgtgtatctttactgtggagacttgggagttctttattgattctagacatatttgttatgtttgttaaatttgctctttgttatattttggatgtttagatattttgtctttgtctatatctaaccttttcagtctctcaaaaggatttttttattctcaaaattattttttaataattttatttatttgagagggagagcgagtgagtgagtgagtgagtgagagagagaacattaggtggaagagaggcagagggagaagcagaagcatagggagaagcaggtttcctgctcagcagggagcctaatgcagggcttgatccctggactccaggatcacaatttgagctaaaggtagacacttaaccaactgagccacccaagtaccccaataggatatttttcagaataaaagtatttaatttttataaggcccaattcattgatgtttctcctttatggatcatgcctttgatgttctgtctaagtagtcttcaccagcccaaaaatttcctgctgttttcttctgaaaattttacactcccatgtcaagctccttgcatggagcctgcttctccctctgcctgtgtctctgcctctctctctctccctctctgtgtctctcatgaataaataaataaaataaaatctttaaaaaaaaataatgataattttttcctttccttttgttttcttttccctttgattttgcttgtttgctttgtttttgtctatggatatctattttgtctatggatatgaaatgtgttccaacaccattgtttgaaaagattatgcatactccattgatttgcactgcacccttgtcaatagtgagttggtgtgggtctatttctggactgcctatactcttccatcagtctatgtgcctgtccctccataatacccattagtcttgatatcataagtatgtatataaaggttttaaatctggctggcacaattattcaattattcaactttatttttctttatcaaatttagcttcatctcattcctaatttcattgctttttcatatatattttaagatatttaagatatttaagataactattagaatttagaataattatctacaaccattaaaaatttagccgagatacggatattaatattaattgcattaaatggggatatcaatttgagtgagaattgacatctttactctgttcagtttttcaactgatgaatatggtaaatatcttcatttatttagaccttcgatttctttcatcagcatttcagatagaagtcctgtgcacactctgttggaattcttctttagtttttctgtgcttttccttacttttttttttttttgagtgattttaatagtattgtatttttaatttttgttttacatcttccttactatatatagaaaaacaatagtttttttctgctgatctttaatcctgccttcttattagtttttttttaggttttatttgtgtagtgagggagcaattccttgggatattttatggaaactaccatcacatcaaattagtgtaaatatagttttatttcttcctttctgatgtgcctttgttctgaatacctcctattcatcttgttgatgatggggggtcccccaccctaaagaagatgagatggtttatgagattgacatggacagatgagattaacagctgttacatgtactcacagcctgagagagaaggacactaaattctatataggggcccatgaagtttgcattcgggaacacagggaatcatcagggctgagaggcaagctttgtaggaacaagaagatgaggtgcctccgggttcccacaactggatgttattggtttttttgaatagttctatgggcaggcaagggaactgaagcccttaggttgaggaacaggtggactgtagcttttcagactcagaagtagctgagtgaagtctttccttccaggttgaggaaagatacctggtctaagtgtgggcactcatggttatgctttcggcggccctttaaaggctttgccacagtaattagtcccttctgtcttattgatggcaaggattgaaggagtgctcaaatgaggtgttttgagacaacaaacactttagtaaatgctccaggggattgatgctcctcaaagtaggctaaaaatcctcactgaaggaagtcagaagaaaggttttaataggataatactgaggatgattttaaatgggcaaaggaaagccttacctaatcaatctatttgcacacccaaattgagaaagctgctcattaaactaaacaacccgagtgaaatactgacaaaattgagctcaaaaatatcaactcctgtgctcgcttcggcagcacatatactaaaaaaaaaaaaaaaaaaaaatcaactccttcatacttcctacttctctaccttcttcttatcctgtaaatgagataccagggattgaggcattaaaatcaaaatcctccttctcctcaccatgctaaggcaatgaaagttctgaggtcaagagctggctagagtagaagctgatattaagaggctgataggaattcttgaaggccttctccattaagaacaaattaggacaatgtacccagagaggaagaagcaaattgaaggcaaagtgatcagatggatagatcaaccgatgatgtcttttaagtgaccacccaattccctgagagattgaaaacaacagttaccctaaaaaagaaaacatcattgctaaacatgaaatataggcccagaaggaattcaaagtccttcaggttctctaggaactcttatctagaccattctctgttcctaagcctgaagaaaaaagaggtggcatgtaggggatggggtggtgtgggggttctgtggaagcttcttaaaattcaactggctagaaaaacactcttgctccaaatctaacccagtttccagaagattacttgtcaaggatacatacaaatctttactatctgtgtttatatatatgttataaatatgagattgctctatcactggatattgataaaattagtttgtaaaatagctttttacagttggtgtgatgacaggtatttataagaattaggctttttaaaatttacaagtcaccaaacaacagatgttgacaaggatgcagagaaaggggaactctctcacattgttgatgggaatgcaagctggtacagccactctggaaaacagtgtggaggttcctcaaaaagttaaaaaaaatagagctaccctatggctcagcaatgtacttctaggtatttaccccaaagatacaaatgtagtgatccatagggatacctgcaccccaatgtttgtagcaatgtccacaatagtcaaactatgggaatagcccagatgtccatcaacagatgcatggatagagaagatgtaatatacatatacaatggaatattactcggccatcagaaaatgaaatattgccaattgcaacaatgtgaatggaactagagtattttgctaagtaaaataagtcagagaaagacaattacttttttaataaatttatattttatttgtgttcaatttgtcaacatatagaataacacccagtgctcatcccgtcaagtgcccacctcagtgcccctcacccagtcacccccaccccccacccacctccccttccaccacccctagttcgtttcccagagttaggagtctttacgttctgtctccctttctgatatttcctacccatttcttctcccttcccttatattccctttcactatcgtttatattctccaaatgaatgagaacatataatatttgtccttctccaattcactcatttcactcagcataataccctccagttccatccacattgaagcaaatggtgggtatttgtcgtttctaatggctgagtaatattccattgtatacatagaccacagcttctttatctgttcatctttcgatggacaccaaggctccttccacagtttggctattgtggacatcgctgctataaacatcggggtgcaggtgtcccagcatttcattgcatctgtatctttggggtaaatccacaacactgcaattgctgggtcatagggcaggtcttctttgatctgagtcctactttaactcatataaccatctctatttttttgttaattgttttctatgcttatctttttccattcctctatttcagtcttcccatattattaagtttgaagtgagcttgttgtagacagcacacaattggatcatttttctccagtctggtgtttgtctgttaactgatgtttttagatcatttacatttaatgcaattattaatatatgagcacttatgttggacattgtatcatttgttttgagtgtacacagctcctgaatctttaggtgcatgacttttgccaaattttggaatattcagtcaagtttccatcaaaaagtttttcagtatcacttccttttcatctccttcttggtcttgaatagcacaaatattttatctttatttgtagttccacaaattctcctacatgaagtaataataaatattatgagcaagtttacaaaaataaaattgtatgtagtggataaattactcaaaatgtgcaatgtatcaaagctcacaaacagtatataaaattaagagttccacatcgaatgaagaaaataagtccattatgcaaaacttttccacaacaaaaccccaagtttagctctccagtaaattcttaaaagtatttaagaaagaagccatcctaatttatacgaacttccaaaaaagtgaaaagagagaaaacacttgcaaatacttcctatgagaccaggataatctttttttcaaaacctgatgctgtaacaaaaagaaatatacagactcatcactttcataaagacagatgccaaaatcttatgaaaaaattatcagattgaatccagtgacattcagaaagcatgatacatcatggctaagaggaacttattacaggattgcaagattcttttaacgtttgagaattaattaatgcaatttaccatattaagttaaagaaggagacaagaaatataatcatcttgatagaaaaataaaatatcattggacagaattcaacacctgtacttaatttttcaatatctagattttaaaaattttatgaaaagggaattttcttgatttaacaaagaatagctaccctactacacacatcagactcattttattacccccaatttcctacctttggcaatcacccatctgttttctgtatctgtgaacaaggctttttgtatttttgggtttgggttttttgggggtttttttgttttgttttgtttttttgggggggttcaacatataggtgagatcactttaatttgtctttcttgttgtgatctatttcacttagcataacgtcctcaaggtccattcatgttgtcacaaatagcaaaacttcattctttcttatggctgaataatactttttaaaaaagattttgtttatttactcatgagagagagagagagaggcagagacataggcagagggaaaagcaggctccctggagcctgatgtgggactcgatcccaggactccaggatcatgccctgagtcgaaggcagacatctaatcgctgagccacccaggcatcccaggaataatatttgttgatgtatgtataccatacttgctttactcattcatctcttgatggacatttagattatttccatatcttcaccattgtaaataatgctacaatgaataaggggatgcaaatatcttttcaagttagtgttttaattttctttatttaatcacccagaaatggattgctggatcaaatgataggtctatttttcatctttttggagaatttccacactgtttccatagtgactgcaccaatttaattcatgccaacagtgcacaagggtttgttttctccacatccctaccaacaacccttgttatttttgtctttttgataatagccatcctaacaggtataaagtgatatatcattgtggatttgatttcttttttccctgatgattagtgatgttgagcatctttgcatgtgcctgttagccatctgtatgtcttctttgggaaaatgtctattcagatcttctgctcaaattcaattggattggggtttttttattgctactagttgaatgaattctatacatattttggatattaacccctcaccagatatatgatttgcaaatattttctcccattttgtaggttgcctttcattttgttgatggtttcttttactgtgcaaaagctttttaatttgatgtcattccacttttcatttttacttttatggcctttgactttcgtgtccattccaaaaaaaatcatcaccaagatagatgtcaaggagcagactgcctatgttttctctcacaagtcgtatgatttcaggttttacatgcaaggctttaatctattttggattagtttttgtgtataatgtaagataatgacccattttcatttatttgcatgttgctgtccagttttcctaataccatttattaaagagactattcctagcccattgtatattcttgaaatgctctactttaaacctcaagtgttcataatctacttctggagtctgctatactgctgtatttaaccaataaggaatcaatcccaaagagtgtcaagcaaaattgatatataacaggtttaagcattttatcaaacttaacacttattgtctttgaaaattttctgggaaatatatttttccttataaaattaagtattaacatgttaacttctaagaacaaatagtccttttgcttagttgctgttttttttcattataattgggtttataactgcattttaatactccgtgttaaaaacaaaccctcaaaacctttattgatgcacccctcaacctatcatccttcatgatgaaataattaaaaatactaacactctaatagttccagatactatagtttccttacctaaaattgttctcttctacccgctctcacatttctttctttctttctgaagattatttgctcccatctttccaatgcatcaaatgaggcaggccccacaaagcatgaagcatagtttgtctgagactaccactgtcattctgtggtcctctcaatgtgtggaggaagtaggtctactgagaacacttgaagaaggtttagttctcccttataaaaatgtatgaggagaaactgttcccttttcctgtctttggaagttatgaagaaaatgaagcctaaagctactgcagccatcctactaccatttcaggaatactgacttgtggtgtatgataaagagaagagatacaaagtcccaggatcactagcaacaccattggcctgatgaactcaccagcttggaggttaactacccagggtctatctgctacgtgagacaaggagttaaagtcaaataaagccaattaaattgatttttctcactagcaatagaaagcatcgccactgaaatattcctgccatacttttaaattctacattataatgtcacaccatagatctcagataaaatgagacaactcatttctgcatcttaaagaacacaacaaaagtaaagttgcaaccctgggatcaaacagcatctgattaaaccatataaatattgaacacatgactgttagcttattaaattcccacaggaggataacctgtttcacacattaatgcataatagaactataatatttgtaaaataaactttgaattggtctgttgtctcttatagtggagaaattgtgctgaaatagctattaacttgaattgaacttctgaatctattgtctactctttagatttgatttacttttcaaaatgacttgtcgacagattatgatagcagaactcatcatctccttaaccaatttaggtgtattctctgaaacctttccaacttttttatattattgaagtctatggaatctagaactatatactgatttacaattatagttccacagtgtccaagctccaaaaatacttggtttacttttctaatttgtttccattatgtactttttgtcacattttcttcatcactacagtttggttttaatttttacatattgactttttaaattttttaagttattatataaaatgtttttaggatcctcaaactaaaactattaactaagacatgtttagaagatccagctctcatctctgttcccttcaacctactcattcattttgcccaagaggcaatggtttttaaaaaatccttccattgtcatatatagaaaagtaagtagattagatagatgagagataattatagctggatgttatagataaagtgatatagctatatattcctattctcttactctatcttttaaacaaatcgttgtgtgatgtacaaactctcctgtacctgtgcaaatgccttttggagattattccatttcaggatggttatttttccatccagctgcatggtatttcattgtttgcatggacatcagagtattcataatttcccctttctttcccagttttcctctgatttctgctaatttcccctttctttcccagttttcctctgatttctgctaagataatatctatctgggatgttcctgtagatggtaaatttatgtacaatatgaaaggtctcagaaatgcatcttttcccctagagttgtggttttgtcctgatggtctgagacctatttatggggaaggatgcatctcaagtcaaagtgtcagcatgccatggatgtttatctgagagacagaaaaagatggaagtgtagatagagctccccatcaatataatgagaggggtttactcagttttagatactttcctataaaactcaagaagggggaattgtgagcctcccgcattaggcatggagcctacgtaaaaaataaaatgaaattaaaatttaaaaactgaggcaaaagacagtgattataaaaattctgagggcatcatttccttacaagttacttgtatgacattgcatggatattttttgttccctttcctcatcccatggtgcaaagggacgtttgtgtttgtgtttgagaacacagagatataggataccactgtcacataggtcatcaagggcttcctcctagctccagaaaacatgcctaagtacagaatgcatagagcccatgattaaacagagaatgaagcaaggatatctttcagatgcatatctgaacaaaatttaggaatatcaataaaaaccattatttttttgtgatgaatcctcccattctccctcttttttttttttttttttacttctcttccttgaaaacacatgaagcagatgattttcaatccacatttatttgagaaaagtttataaagaaacatgagcagaaggtgagttcccatgcaagggaaacataagggctgcataggaagaggaaggagagaatgcagataaggtactgcagtcagcactgggggttccaggtcaaggacagggcagagggagccattggggaacacaagctgtgcagggtcactgaagccagggcaaaccagatcctgagaaagcgctgtatttgtagaagaataagagccaagctggaaacctttggactctgagaagaagctggaaaggaaggttttttcttgagggtcaccatctccacttcagctcaggagtcctgcagaagacagagcagagtattgttccagacccacctctataagcagcttcttctcctctctctcaaggcctcatgtcaaagcgctgcagtaattacatatttttaggtctccttgggccagagctattttacagcgcaggcctttcactaagtggagagaggtagcgtcagtataaactgccagatcagaagtcagatccaaagtctttcccactgggatgcttgggtggctcagtggttgagcatctgccttcagctcagggtataaccctggagtcccaggatcgagtcccacatcgggctccctacaaggagcctgcttctccctctgcctgtgtctctgtctctctctctctgtgtctctcatgaataaatacataaaatctttttaaaaaacaacaacaacaacaaagtctttcccattatttctgtcttttcacctttactatctgctccaggataaccaaatctatctgtaaaggggatgaaggagcattacctgttggctgaagtccagagtgtcctggaaaagagaagggaagacatagacttaacagatatggaggtaaatctggccccatagacaagattccagccccagacctgcctccttagatttctctaacagcccaacccatattgcatgatgccaggggagagtggaaagtgaaagatatgacccatgaagtctctgtcacacaaatccagtttcattagctttagcgtctcttcctgcatttggcccaggatctcaacccaagatcctcatgcttgttaatctccttcttagctctacagaacacatgacctcttaggctgtgacacagtaaccatggactgctgacttctggatttctagggaatctgaggtcaaattgggaaagaatggctttatacagggccatcggtacacagagagcttttgatcaaagctgtatttctctccacatagtctctggggagtctcagttaccaacaggtgccttacccttctgatttctgaagtagatgaacagccccactgcaaggaagagcagacccaggacaaagcccccgattccactcagcatcttgctctgtgcagaatcagactgtgcccctgaaagaagaagcagttttagtgctttttacaccaaactgatggacactgggattgagaatgtcactttagtgatttttacaccaaactgatggacactcagtttgagaactttgagaatgaggaaggaaggctgccttggaagaagtagaataattagcaatttctggaaaagaaatctaaaatcacattgagtagatacgaagtctatgcattgacctttttaaatatcacaattctgacaaatccactacttcaacatctatggatgaggagcctgggactccgtgaagtacaagtagcttgtgcagggtgacagagctaataaaaggaatccaagattggattcccctcaagtcagaaaggtccctacaatgtaaaggattctcagatgacaatgaagaactcagagcaacagtgccagaagcacaagcccagccaaaggcagtggactggtgcccagtgtcaagatggaactctgacctgtgaaccatggaaaatctgaaaacatggataacctcctttctgcctgccacatctaactgcctccccaaagactgcaggatctgtagaaataatcacaggatatcttaaattatcagaggacatcactcagctacccccagggacctgtgctaaacagaagagaatacggaggaaaagaaaatatggtataaggagagagaaccctgacactcagaaataagcaaatcccctctttggtagttgaggaacttatgtcaggaagcttctcactccattccacggtgacagggcttgtcaaacttgggtgctccacttggcaggtgtagacctctccgctctgaggaactatctccagcatcaccaggatctggaaggtccagtctccattacggattaggcctgtggacacaaccccagcttcctcttcctggccattccggagccacctgacttcaatgtggcctggatagaaaccattcacagagcagaccaggaggttgtgatgctgcaaggtctgagtcttcgtaggatacacagtcactgtaggctcgactagaagagaagtggtagagggactcagtgaggaagacagacaaagcaagtctccctggttggctgccttgctgcctccagtctctggtcacaggctgcatttcaagcaggcttccctcaaaactgaccatgtggcccaataagggccagtgtcatgagcctttttttttttttttaaagattttatttatttacttgagagagagagcaagcaatagtgagagagagagagagagagcacaagtaggggagagaaggagaagcagactcttcactgagccggaagcctgatgcgggggcttgatccccggatcccaggatcataaggtgagccaaggaagacactcaattgactgagccactcaggcgcccccagtatcgtgactcttgaatttaatcctgactgcatgagtccattagatttaagtgatgttgcagaaatttgtggggtttgtttttcatagagtgaaacagtttcttgttgaattgaggtgtttacaaattttgcaaggcatataatgtatttaagtaaaagcatgatttctagagaagcctgactaaattcacgtccagactctattactttactgattcatcctgggagaatttttacattcttctgtgccccagctttttaacctatcaaggaggatagtaatactaacttagctctcaaggttacatgatactaatgcacccgaggtatataaaacaataactggaatttagctttcaatatatgttaccttattatcctttttaattggggagaaaatatgatttgaagaagtgttgctaaagtggggaacaccctaagatagatgggggaagagagtaggacatcctgggaaagccacactcacaccttagaacaccatggaaatggatctaccctgggaagcaggaaagacagaggtgcttctctaggtctgggagctgagtcccaaggacagtatgagtcctgaaagggaaaggagcaaaggaactcatttatttaaaaaagttcttataattgcatttgcctgattactccttcttctttgcaatatgaaaatatccattattataattgtcatcatttcattaatttattaattataaacggacatttgaattcaggggagtgtctgagactcattaaaaggtatccttagagcctaagataatccctgacactacagcctccataaatacaatttccgtttttgtaaaaggagaaatacgaggaaaaccttttacaaaccatagaattatagatctaagattgatgacaaatcattgccaactattttgtagcaaatttcattcaataaaaatgtttacattcctagcatgaaaagtaataaacagaatcaaaatataaaccacaaactagggaaaatgttgaatcaaatatcaggaaagctttaataatcttatgcatggagacacaaaatcactgaggaaaaaatgagaactctacagataatagacaggagataatgtttacagtagcaacaacaattagccaataaatatgtgaaataaatgttcgagaactatataaatcaaacaaatataaattaaaaataaaaaagataaatgtttggcaatatggataaaaaggttctaacaaagaggaatgcgaggtgaattgttatgactatgtaaagaaatcacatgcaactccttaaatactttcatcatcataaaaataggaacatcagtatgttaagtaagaaagttataattaaaaaatctgatttgcggacgcctgagtggccagtggttgagcctctgcctctgcctcagggctgatcctggggtcccgggatggaggtgttccccccacccacccacccccaggctccctgcggagctctgcctgtgtctctacctctctctctgtgtgtctgtcatgaataaataaataaaatattttttaaaacaaacaaaaaacaccagctttcacaatcatttcatgtaagaatacatacactaggaaatacaaatcaagtagctgagacccagaggaagcctcagaaagatcagagaggcctccgaggttcccttaccccctcaaaacttagtggacactttttctcagtgaaatggtcccccccccccccccttttgacccgttactgatttgtctcgtggttacgggatcagaaaggtgttattccccatttatagatgaaagaactgcatcaattacaccattaactctcttgcgccctgtcacctacctctattctgagataccaataggctaacatagcaatggagtccaaagtccaacagagtatttgagagtgtgcttttaactgagtatttgaaatttattcccaataaccagataatagagcaacaattctgttgttcctcagtattttcctaatgccttatacagtgttttcatgaaacacgtgtagttcaacattgaaagacagtgtgcagagcatggggatagggagatgaggtataaaaaaaagaaacaaaaagaaactacttctcctcaaggcagcaacatcaactgtgggtctgtggcattccctcaataaataccaaataggaagtgatatgtgcaataatgggattgccattctccatagtaacaggaatagcattatggaatccacaaaagagagagggtttgggaatcagtagattccatatcatcactcttctgttgcctgttgggaggctctaagcttaatcttaactnnnnnnnnnnnnnnnnnnnnnnnnnnnnnnnnnnnnnnnnnnnnnnnnnnnnnnnnnnnnnnnnnnnnnnnnnnnnnnnnnnnnnnnnnnnnnnnnnnnnnnnnnnnnnnnnnnnnnnnnnnnnnnnnnnnnnnnnncgaactcctcccggttatggatgtgtctttccacgaaccgcacccgctccgtcccgttggtgaaatggcactcgggcttaaactggtacacgaaatgtgctgtggggacggggggatccggtcaccagaggctcctggaagacaccgacggcggcaccccgcggcggttccacccgcaccccaaccaccagcacccacggttcgtgtttcctccgctggcgggggaggggaggcggcccggggggacgagaccccgctcaggggggcctttggcggccactcggctcccggctcgggtgacccgacgcccgccagcgcgagcagccgcggccttcacccctccccgccgcctcccggacgcctccccgggacagacagcccctggctcctcgccctcgcccctggctcctccccctcacccctcgcccctcgcccctggctcctcgctcctcgccctcgcctcccgcagccctttacctgtcctcaaacacgtccctgctgcttccccctggtttgggctgagccgcccctgtgaatccagagaagggaagacacacgtcccctccgctcggggagctcaaaatggagggaaagtgacggaccaaacccaaagtggcaagactttgtacagaggtgaggaatgttagagggatgaagttctagaactgagaatagttgggtggtctgaattacctgggtgccagagaagtagttcaagggtgacgtgagatgtgacatgaaggatgaagtagatgcgccgagagagagagagagagagagagagagagagagagagagagagaagagtttggggacaaagggaggcaccattcaggtcaaggtaaatgtgactgtgcaagagcctgaaagaactgatgaatttcctcaagaacccagaggaaacagttgatggaaacacagacagtgagaggaaggagagggcagtttcgactggagtcatcaaatggagcccacaagaaaagcccgtgggtggtgacagcttttgacttttatactaaattcaatgggatgtgactgaagttttaacgagattaaaaccatgatcgcaatacagttctcaatcctttacctacgtttccaaattcagaaatctcagaaaaccagatctttctaagaattttgatgcagaacccgttggcaaatctaatctgatgaggtaagggtcggtcagagctcttactggtcagtcacgtgtgcttctgtagtttcaatatatgtaaacacacacacatcataattcatgtatatatatatgcaaacatgtatgtatatattttgatatttatgttttacgtttaattaaattaagacaagtgttttattcaagtataattaacatgaaaatttttaaaatatggaaaaaataactgtttaaaagggagacaaataaaagagagcatctcacattattaatagagtagattgtagaattagtacaaaagtttgacatattttactaaaaaaatatttgtggcagtcacaatttatgactgagatggggctgatcaagaaatcatgaaatactgaaaaacgttgcataaggcaaaaaataaaaaacaaaaatcttggcttgcattgattgaattggctcaacaagaaattggtgaatttacacaattttatactttattacttctgtatttaaacaaactaaaataaaccacaaaggcctgaattggaaggtgaatgtgtgtataaagtgtgagtcaagaatttttagaagccccacagtatataaatcagtgtttttgatctcagcattaacatttagagttaacattttagagtttttgtctgattctttgtttgaaatcataccctgtatattttccaaccacaatggtacacaaccaaagaaaataaaacaaaactggaaaatctataacgttaatattaaatatttatttgtaaatattaaacaacacattactatactagcaatgggccaaaaaaaatcaaatggcaaatcaaaatatgtcttaaagcaaaagaaaaagaaaacataagtgaaatttatgctataaatgcttgtattaagaaagaaatctcagctttcttctccagccacacaagatgctgaaaggaaaggaggctaaggggaagaaggtggcccgagcctctgatgttgtgaagaagtaggaggccaacaaggttgtcaatatcctgtttgagaaaaggcccaagaattttggcatctgacaggacatccaacccaaaaggcaccttaccctctttgtcaaatgcccctgctacatttggtggcagtggcaaagggctattctctataaacgtctaaaagtgcctctcacgattaactagttcacccaagccttggaaggccaaacagctactcacctgcttaaactggcccgtggatacagaccggaggcaaagcaagagaagaagcagagattgctggcccgggctgagaagaaagttgccagcaaacggatatccccactaagaggctccctgtccctcaagctagggttaatactgtcaccaccttggtggaaaacaagaagactagctggtagtgactgcacatgatgtggattccattgagctggttgtcttcctgcctgccctgtatcataagataggggttttctactgcatcatcaaggggaaggccagactggggcatttggtccacgagaggacctgccccactgtcacctttatacaggttaactcagaagacaaagaagctctggttaagctggtggaagcaattaggaccagttacaatgacagacatgatgagacccactgtccctggggaggcaacatcctgggttcaaagtcagtggctggcattgccaagctggaaaaggcaaaggctaaagaactgaccaccaaactggactatgggtgtagtgttgaattttctgtacataaaagcaataaaaagtactctttcagccagtgtcaaggaaaaaaaagttcaaacaaacaacatcacaccacaaggaactagaaaaagaagaaacatgggggaaatttaggagaggaagaaagtaacaaagaaaaatcagagataaataagagaccagaggggatccctgggtggcgcagcggtttggcgcctgcctttggcccagggcgcaatcctggagacccgggatcgaatcccacatcaggctcccggtgcatggagcctgcttctccctctgcctgtgtctctgcctctctctctctctctgtgactatcataaataaataataaaaaaaaaattaaaaaaagaaaggctaagctttgtaaaaaaataaataaataaataagagaccagaataacattgaaagtaatgactagttttcccaaaaaataaacaaagtttccaatgctttatctacattaactaagaaaaaaaaaaagagagaagcctcaaaacctgaaatgaaaaatggaagagaaaataatacaatagataatcatagcagttgacagtttggacaagataatgttgggaagcctgttctgtacattgtaggatgtctatcagcatcactagcctctacccactcaatgtcagatgaaacctcagcttaaaaaaccaaacaggggctccagacattgctatattctctggggagggggtaccaaaacaattcctgcataagaaccactgttatattaactgaaatatatgcggtgaaaaaactgatgctaattatggaacagctgagtattacattgaaaaatttgccaatatcatatctgataaaaagcttatcccaaggaaatgtattttgctataaaatagctcagtgctgggatcagattcctaaaaaccattcataaggcctaataagagagtatcaaaaagctgctaagaagtctaacataaagatgattgttcttggctgtgctcatgcatcaggctcacccagaacaaagtgaatggtgattgaaaactaaaatccaggcactcctaaaagctgtaactattttacctgtgcattattttcaaacaaggcaatacagataatcagatacagattttctaactggctcaatcactactttgcatcagtgacttacattcctgatggccacgctggactgtgagaaacctggaatgtcattatttctggataattgtgccacatatggctcctctgaacttcttgtaaaaactaaagcttttggccctgaatttcccccagtatgatgtctgtgttgaaatattgtgaccaaggcatttttatctcttcaagagcaggtataaacaattttcaaattccattctttttttttaaaactccatcttttttttttaatttttatttatttatgatagtcacacagagagaaagagagaggcagagacacaggcagagggagaagcaggctccatgcactgggagcccaacgtgggatttgatcctggatctccaggatcgcgccctgggccaaaggcaggcgctaaaccgctgcgccacccagggatcccccattcttattgcagtttacagagaagcctacaaatccatggctttctgagagcaatcagttactagtgcctattatgtatatgtgctgccgaagcgagcacgctagtgcttattatgaagctaagaattaattaaacaactttaacaaatgtttggcacagcctttaggttacgttcatttgtgcatgaactagcagatgaagattttgaaaactgtcatgtcattaatgaaaaaaaatcacatcaaaacttcaatataagctagagttaatgagataaaaatctaaataacatcaaaaaacactgagcactgacaatgaggccatgttgggcattccctgagtgctggaaacttggtagtggtgacaaacagcactccccagcttcctccctacaatccagcctctctagtcttccttttctttttttcttcaagtttatttatttatttatttatttatttatttatttatttattatttatttatttaagagagagaaagtgcatgcatgagcagggggacaggcagaggcagagggagaaagaagaaagagaatatagagcagaatgccctgagcatggagcccagtgtctgacaagaggctcaatctcatgacctgagccgaaatccagtcagatgcttaatggactgagtcacccaggtgcccctctagccttcctctgtcttttaaactcagcaaacatcttcccacactttggcctctgtcctgttctctcttccctcaaattcttcacatggtggacttttcttcatcagtcatgtctcaactaaatgtcactttctcagggggagctccctagccacttgcaatgtagtcaggtgaatccagttctctctatttcacaaacctggtgtgtttttctcagagcactgattgctctctgaaattttttcttctttaaatgttttttgggctttctactctgtcagtacactaccacttatgatggtagtgattttatcttattcaaatagagttcactgagcctagaacagaacccattacaaaataggtgctcagaaaaatatctgtgatttaaacaaataaactcagtgttctgagaatcagtcactgtaaggatcctgggaagtaaaaagaggctttaagcttcaacactcctttatttttatgatatattatttcccttctacttcctgggtgaaaatcaaacaaacttcctctctctcctactgttctaaaaaatatcacggataaagaaaagttggctttaagaaaaaaaaaaaaaaagaaaatttcaggcagcctgagtggctcagcagtttagcattgccttcagcccagggtgtgatcctggagacccaggatcaagtcccacatcaggctccctgcatggagcctgtttctccctctgcctgtgtctctgcctctctctctctctgtgtgtctctcatgaataaataaataaaatctttaaaaaaaatacacaacatttttttaaaaaaggaaaatttcattaggtttcagctcatcctgtttgtgataatgctgaaggtctgtgcgaacactgggcattctcagtaatggtgatgacagagttaggaaagaatagtgacaaactggaagtggaagcaaccaaatacggctatttaaggaaaaagaaaacatgatgaatgaatctatgcaatttgagaccaagacctcagtaaggtagtaagttcagtttttgctcttggctttcagtcctataaaatgtaaataaccttcactctttctgtaccttgctcagggtttgcagttcgaatacatgaaattcctgatatttgactaattttggctttcaaaaacataatttcatataatttctccaatactagttgaaccccttcctgtgggctcagggcaaaatgggaatatgcaggagaaagtgactctatagaaaggttcgaaatagattcataatgaaaattaacctgtgccaagttcttggaagagatattaagttctttaagacaccaaagaacacccaatatgtgcttcttatttactgtattatttcaagtactaaagatcactgctgtagctccagggtgagatatagagataaaaattaaccccaacttttttcagagaacctccagtataggataaaggccttataaactttggggctcaggagaaaggaaaggagatcatgggagaaacctcttgatacattctcacatattagaaagagacaccaacataactgatccaatgaagacataaaacagggtcttctcagagagaactttctaattctttttcattcaccataaaattttcagagaagctttcctactttctagcataactcaacataataaagggaactacttgatgggaattaatttggagtcattatttctaagtcttctcaagaccctgatggaatgagatgcaagcctgaaaagcttttattggaggagagttgagaagaaatggcctatatatatgaaagaccccttaagcaactcttgtagagggcaagccggtgaactccttttgttctcaatagaattgggggtctatatataataaaaattggtggttattgaagaaaatatcacaattttctaagggacatagcctggacacagtggcaaaactaatttctttcttccctccaacccataatatcttaccacccaaagtgtgcacttacgtggggtgtccctggcccaagccaagggagggttcagcaccatcagtatcagcatcagagctgtcatccaggagcctccaagaaaacacagacacaccatgctggaaaacagaaaggacagggtgcaggggagcagtcaggtgtcactcagtgaagactgggaccctactttggccacatcctaaataacactaaccaaagaattcatttcattgtccctggattgggtaatcttggtgataagaaccaatcagcaacagcaatatattgcatcatcagttgctggtcagagattcagtatgaagagcctcttctgaaactttgattttgttcattgaaaggattgttttaacttaatactttaaagatttgatccaggtgtatatgaaacattttattggacccctattgtgagccagttctgtgctgggcagtgatgtgcacgaaagttcgagccttctaagagtattcatgtctctcttgaagacagaattgttttgatccatgtaatgtgtttttaggagctgaggacatggagagtgattgcaagtcaagaaccctttgctctggaccttgctgcaccatcacttagtgttgtagatttgaggaaaatatttaaccttaaccttgaaatgaaggcactgcaatctttctggtacttcgatatggaaagtgatgtgattctctggacagcccaaggagcagcatctcctggtaactgatgatataaaagaattatggctattgattggagagtatagtattacctccttatatgtagggaagtctctggtaaagctaaaggaattgaaattcagtcattaaattaacctgagttaaaaggtccttcaagtttatttcctgatacaattgatgggggaacagaggactggctgaggacaaagcaggagcccagggcagcacattgacaagcccttgaaacaggcagagagacattcctctacggactcaactgcctcgatgttcatactttgctaaggagaaaagggaatcttagccagacccccaggatcctgtaagtctactttaacataaaattcctttagagagttcctttatctctaaaccccaaagatacatgttggcaatcatcccccaagcacatggcccacccatacacatctgaagggtctcatgactcaggttttattagacggtaataagtgaccttttcccaacaataactagcccccagcaaggtccaagcaaggtcctggaaaccttgcttccaaaatcccttagacacttaacctatccctaaccacctcccaactcccaggtatataataagccaccttcacgggccaggacagcagctcttcctgcccacgggtcctgtcccccggctttaataaaaccacaattttgcaccaaagacgtctcaagaattctttcttggtcattggttccagacctcacctatattccaaaaattcattactatcattgagtttggaggcatctccagaatatgcataaggaaagggcttagaacatgatctatgtggaatagagggtcttgaaagttccttcatatagcacttaacctaacaaagtgataaggccaactgcccaaatctacacttacagggagctaagagattgataaaggactcaaagtcagcttctagcgtaacagctctgctttcggataattaatatatatgtggcaaatatgttcaatccatactcctggatcccattctgttttcctcattttactggatatatgtttttagtgtgcatcttctcttgctttgttttaaggagacatataagaagctggtgctaatgaatacattatagaatgttcaggaaatagaacacaatggaaatattatgaattatatcctttgatataaccatataattttaaacatatatttccacttttagaaaattattatacattatattaatataaatgtaatatctcagattcagaatggactttttaaaagattttatttatttatttatttatttatttatttatttatttataagaacacaagcagaggaggaaagggcagaggaagaggaagaaacaagtccctgctgagcagagaatccaatgcagggctagatctcagaaccctgagatcatgacctgaaccaatgtttagccaactgagtcacccaggtgcccccagaatggactttaaaggacaactatctatctaaacttctgcattaattcacattctaccacagtctgataaacagtcctttatggactagtgacaaactatggataccatgttgcaataacatgactaatatttactaagcaaattttgagcattttgctttgcacccagattataaaagggctatttatacatcatatttatatttaattctcacatcacctcagtgatttgagtaccctttgcatccttatggatggaaagaataaaatgataaatgacattaaaaagctttggcaagggcagcccggatggctcagcggtttagtacgacgttcagcccaggatgtgatcctggagacccgggatcaagtcccatgtcagactccctgcatgaagcctgctcctccctctgcctgtgtctctgcctctctctctgtctgtgtctctcatgaataattaaataaaaaaatctttaaaaaataaaaaagctttggcaaggacacaaggcaagtaaatggtgtattccagattgagccaagttatatgtgagtctaaatcccacacgtccaaccattacaccttaccatctcacatttaatttatgatgagaatagtgaccattatgttaaaactattattgtcactttaattcatggttatggatgtctatgtgactactctttttaatgaatacagaactttatataaattgaggcaattcctctgtggtaattgtagttcctcccaaagattcctctcatcactatcataaacatcttgtgaaaatgacaaaccatgcatttatcttatgcaatggctcccaaagctcctgcaaatgtccttcttattaaaaataacagtggctccaaattactaaataaaatctattgttctcaatcataatttcaaatttctcagcatgatttattacaaatttaaataagtcaagaatagatagaaattttatctcatatagtttggaaaaatgtatttctgctaatgaggaaacttcaaagtatcttgtacaagtgggataaaagtcattgttgtccctggatttcagaagaaagtatgttcctagaccccagttttaattcagttctattgtaagttgtacaattgcaaccaggagaatgccatatttaattttagaaattaaaataataatttactccaaattaactgctgtaccagtgacaatctgggagagtcaagcttaaattcaccataaattataggataaaaggaatggcaaagaaaagtaattgtgtgtcaagaacatacatattgaatatattgaaatatcaaagagaatactatcaaaacttgcccatataagtttgacaatttacaaatcatacaaatttatttttgaaaaaagtaggccagcaactatgacctaaattctgtagttgcatacatttatgagtaacaaaatgtgttgctttaaatattatatatttcatacttttcttcaacattatttcagtataaggaaaattcaggtaaaagaatataacaacttttaccaaaccaccaatcctacaggtgtctaagctgaacttcttcccgtgaagcaaaaggagcagttctcaacttctgctgtgtataaggagtgtcaagtaagactttatttcctgaagaagagatggttaaatcggtttctagaagagtggttatcaatacacaagttctacagtttctgttcttgatacatgaagtgataggtttgttttcattgataataaatcaaaacacttttgggaactaacaaaagacatcagaagcacaagcttttgttgaacacaggcaggtggaaatttgcagcatcacaaaatgtcttgagtcctaccagttatcacagaatgggactcatttgtggtaagcctgaaaagttgcaatatatctgggaaatcagcaatccacagaatgttagcacagaatgtccatcatttatccaagtagtctcaaaatattctctgcagttctcagacagctatgaccatgaatatggaactgagaagtgagaagcaggtcagaagtccctttatctaagaaaaaatagtaacaataagaagtggataaatgcggccaatttcttctaccatggaagacatgtatctttggcagaagactgtcccatttacaggtcatattagcacttagcagacttgataggaccctctccagtgagatctcatcaatgatgtcttctattggggaactttggatgaagccagtctttatactgtggcattacctaagtcaatagacagggcttctccaacttctgaatgtcattttttgactcaatttttctgtgttttgtaatacttaacatgcactcttttttagaaccagaatgtttgctattgactagtcacagaaagaacaactagaattctcataggcctgtcattaatatcatatgtaggaagaattttagtttactttctttttgttctaggccatgttttaattgtactcataggcctgtcattaatatcatatgtaggaagaattttagtttactttctttttgttctaggccatgttttaattgtactatggcaaaatacttatctcttatctggtacaaatactggccatattatttttcaaaattctgctttgttgtttcattagtcaactgcccattgattcttgttgtgtgcctggaatgttgtctgttttgttcaaaactaataaaatcttttagctatttgactaatagttcagcagcctatctccttataaacaagcaagtttccaccctgagaaagtaaatttattagtaattataatttcttcctacatggtatgcctgtaaaaaaaaaccccaactctttcaatactggagagcaattttgagaacattaaaacataagactctcactaattatcgctggcatctatattttggtcatatgttcattccatagtttatacaagcaagaaaaggagcataacttggtgctattacacttccacctaaagatgctaaagctgatttgggtgcaatgacaacctctcagtttttagagttcagaatttagtacctgaccttaaagaaaaagttttcagatgaattatgtcagttgttaaaataggatccaaggggaatttaatttaaaaaatatatatattaaccaaggaatttaattttaaaaaatatattaatatatatattaattcaaatttaatttaatttaatttaaaatatatatatatattaaccaaggaaaaatgtttcctaataaccacaacagaagataacataaagacacttagaaagtttaagcttcttcagaagtgaggatccttattgcttttacaatttttaagctatgaaaaccacaaaaggattaataaggatcaatcctataggcaatcgattctgacatgcagcaaaatacatagctgttggtttattttccatatagaacagcagttaaacacaaaattattttaactgtcaacatatcctttagtgctattgctggtttaattgcaatatcattaatattaaccatggtctttttaatctgaagttttatagccatgtgacttcaaactatcagaaacaagctccttgtggacaattccctggagtgtttacatagataggtttctttctttctttttttttttttttaagattctatttatttattcatgagacccagaatgagagagagagaatgagagagagagagagagagagagaggcagagacacacaggcagagggagaaggaggctccatgcagggagccccacgtgggacttgacccagggtctccaggatcaggccctggactgaaggcggcgctaaactgctgagccacccgggctgccccatagataggtttctaaaggtgaatctggtttctctattagttaaaaacagaatcactaccatgataaagatttaagtaagtgagttgtaaaattctagatgtgtttaagaaagttcaagtaggccattaaatgttggcagaaatttgtggcatgctgtgatctttggcacacctctgacagatcacacttaaaatgtcacctatgaagtctaaatataaaacttcttgggaaagtgaagagatataatcaaactctccatagcttttcctaaacaagaagtgctgagagttgtgaccatgattttaatttcattcaatcaactataaaaatcaggaaaattggcaaaatttaggctgatttcataagggcacaaattgatagtcctctctgtattgggcctccagatttgaagtttacagccagggagaaactcagaacccttccagaatgcaatccaatatagattccaaagagttcagtgaaaatattcttaaaatgataaacttcaaatatcttagtgaccctgtaacctttgggcagagatacattgagttccatagaaggcagattgctgcacagattgctgtgctagtggtatctgcagacaacagagtaaacttcagcttttcaaacaccctgatcagaaagatgaaaaatatccttggtaagtatgacaatatccttaactgtgtctgattattacccccagacccaccaaaaaatgatctctaaaattgacagcagggtagtaatgaaagtttctctagattaagaagcctcatgcaaaaggaataaaaattcctcaaaagaagcgtctctggatcccagctgctatggaaagtctgaggttgagagttgtcttttattatcatctccaattcatttccccatctcaaacatggggagcattgcagatcatatattttgataatgtttatattataataatgctcaaaagcaacagggtcacagtgtcctgattttcaaaatagcacatgtggcaaacatgaaagaaacagctattaacttgcaaggcaattttgtttccactactcttcacagcatcaccccccaaaacaggtgccatcagtcagctcagtggcttaaaaagcctatacatagatatcctatagccacatgaaatcaccatttgttagagggtgccaattccaccgtggtaatcatggtagccatcagctgataataagtcaataatccctctagtaaaagctgaatgaacctgtgccacagccagccagccagactagcaccaggtcctgaagatgttgaagaatgcttcatgagcactgatgatgatgcttacctcttctgaaaatagcttccagaaccaatgaaacactgatttttatgtttaagaaactcaaaatctaccaagcaatataaataaaaaagaaaacatattagacatactctagtaaaaccataggatacctaacacaaagaaattttaaagcatcagaagtgggaggaatgcagtttatcttcaaaaagaagaaattagactaattgctgacttttcatcagcaaaaatggaaaccaaaaatagtacagtgatgttttcatgatgtttaataaaaataactgcccacctatgaattttatacttggtgactctatttttcaagaatgaggaaagcattttcagatgaacaaaaatcaagatcatttgccctcacatattttaatgaagaaaattataaaaatatgtacttcatgcagaaggaaggtaatcccagatacaaagtctggaatgaaatgaagaacaaagacagttagtaaatatatgagccatgctaacatatctcaatttataaaatcaaactaattatcctgtggagttttaaaataatatgtaatttaaataagaatatgtaaattgagagagagtataaagtgttaaatcacttcaacatctttgtattggttttcttcttttttttcaaaacagaaataattattatccatatcagctatcatgtcttccagagcagagaagaggctgattttatttatttagatgaaaaatactaacaccaaatcacacttaacaatgtaggcctaggctcagtctctctcttgctttcaatagtgagtaactaatggaatataatatgtggattcctgggatcaatcctgttcaaatcatgaagcaagaatgtacaaactagtaccagtagcagtaagtattgcactggtaattctagccaatgagagatatttggaacaaaagagtaagcaaatcccaaactcttaaactttcctttcctccttagagtaaccttttgaaaagtataataaaaattcaattaatttaatattaataaactgtatccaagtcatattgtaataagaaatattccaaatattatgaagaaattctactactgtattaaacaaaaatgtatttaattccaaataaggaaatcaaaacaggaactctctggcactctttctgggtatcaatatatatttaattttttttttaacatcttcgtttgtaatggtgctctggagtcacacactggactcttttttttcctgaagatttaatttaataccaagaatccattttaaaggtgattgaatatcatatctttatttatgataaagaatgttatctgtggtatggctggtaagagaatgggtgcaaggctcatcatcagtgaaaaattcaaagttattagaaatcaagcagggaagaaactctcaaatgtatggagaatgaagacaaactctcaaataacttctagaggcacagctcaggtgagacatgtacagaacatatatctgttcacagctgtgccatcaatactctgttcactgctgccaccctgtttcagactgtcaccaaattgagaactggcattcaaaagtggcaccaacctgacattttctcaattatgtataaagtactaaacatatataaaaaattttaaatgcataaaaataaaacagtatttttaaataaaaggccttggagaactgggaatatttttgtggatattggagcagataaaagaaggtaagtgtggaaaagggaggtaggaaagaaatatttccttgcgtataaatgttggagagagggggtgggagctgggggagaagctgagcatggtgttctatgataaagaacgttcatggggggatccctgggtggcgcagcggtttagcacctgcctttggcccagggcgtgatcctggagacccgggatcgaatcccacgtcgggctcccggtgcatggagcctgcttctccctctgcctgtgtttctgcctctctctctctctctctctctcactgtgtgcctatcataaaaaaaaaaaaaaaaaaggaacgttcatggttcatgggaagtagcatgcgtgaatcatagaagtaccataatatatggagaataaaccaaaatggtgccctaggccagttatcaaagtctagtcaaaaaataaagtaataattcagtagcaatattgaataaagttagtgaataatgtaaaaatgagaaagtattgaaataagattactgattactacaggactctcttcttttttctttagagagagagatggggcagagaaagagagagaattttaaacaggctccatgcccagtgcggagcctgactcagagcttgatcttacaactctaagatcatggtctgagccaaagtcaagggattgggcatagagattagcatgataacaataggaatggatctataggaatggacaatacgaataccatgcattttggggcagcttggtgactcagtggttgggcatctgcctttggctcaggtcgtgatcccagagtcctgggatcaagtcccacgtttggcttcccttagggagcctgcttctccctctgcctaattctctgcctctttctgtgtctctcatgaataaataaataagatctttaaaaaatgttttaaaaggataccgtgctttttttttattcccaggcatgcattagaaactagtatttggggtgcctgcaaggctcagctggttaagcatctgcctttggctcaggtcatgatctcagggtcctgggatggagctccaagttaagctccctgctcagcgggcagtctgttggtctttgtttctctgcccctccctctatttatgtgctctctctctctctctcaagtaaataaataaaatctttagaaactggtaattgatgaataaggaaagaacctgagtttttttccctaaagaatgtattttgctttccttttggaaataacacccaaaggatcagactttgtattggtgtaggtgttagcttgtgggtaagacacattggagaaagggaaagatagagagagagaagtatgctgaaaaatctccatcctttctcagataattgtttttctctgtatccaatggggataaagagtaaggcaacatcacttatttctagcagatccacctgactagaaggtcttctttaaagtctgaggtatagagaatccagaagtgggccctcaactttatggtcaactaatattcgacaaaggaggaaagactatccactggaaaaaagtctcttcaataaatggtgctgggaaaattggacatccacatacaaaagaatgaaactataccattctcttgcaccatacacaaagataaactcaaaatggatgaaagatcttaatgtgagacaagattccatcaaaatcctagagaagaacacaagcaacaccctttttgaacttggccacagcaacttcttgcaagatccatccatgaaggcaagggaaacaaaagcaaaaatgaactattgggacttcatcaagataagaagcttttgcacagcaaaggatacagtcaacaaaactaaaagacaatctacagaatgggagaagatatttgcaaatgacatatcagttaaaggactagtatccaagatctataaagaacttattaaactcagcagcaaagaaacaaacaatccaatcatgaaatgggcaaaagacatgaacagaaatctcacagaggaagacatagacatggccaacatgcacatgagaaaatgctccgcatcactggccatcagggaaatacaaatcaaaaccacaatgagatcccacctcacaccagtgagaatggggaaattaacaaggcaggaaacaacaaatgttggagaggatgtggagaaaggggaaccctcttgcactgttggtgggaatgtgaactggtgcagccactctggaaaactgtgtggaggttccccaaagagttaaaaatagatctgccttatgacccagcaattgcactgttggggatttaccccaaagatacagatccagtgaaacgccagaacacctgaaccccgatatttacagcagcaatgtccacagtagccaacctgcggaagagcctcagtgtccatcgaaagatgaatggataaagaagatgtggtctatgtatacaatggaatattactcagccattagaaacgacaaatacccaccatttgcttcgacgtggatagaactggagggtattatgctgagtgaaatgagtgaatcggagaaggacaaacattatatggtctcattcatttggggaatataaaaaatagtgaaagggaataaaggggaaaggagaaaaaatgagtgggaaatatcagaaagggagacagagcatgagagactcctaactctgggaaacgaacaaggggtggtagaaagggaggtgggcggggggtgggggtgactgggtgactggcactgagggggcacttgatgggatgagcactgggtgttattctatatgttgccaaattgaacaccaataaaaaataaattaaaaaaaataaagtctgaggtagaagtcaagggagggcagaatgactaagttagatgactattaaggataagacaagctgaacatttccttggatggaattatttaggacataattaggtggttagctaggaaaagatattgtggagtaaagcaaaatgtggagtgaggattggaggaactaggcatttagaatggcagagacacgatgcctgtttttttgtgcctatgtaggaagtccctgctatgattaaaaagcacaattaaaaagctctgatgttggcatctccctgctattcctgttgtaaaagagatgggggatgggaaggtactcagttggctgagggtctcattcttgatttcagctcaggtcatgatcttagggtcctggggtagagccccacatgggctccctactcagcagagtctgctggaggagtctctccctttccctctgcctctccctctgctcacaattctctctctaaaataaataaatttcaaaaataaaatgtataattcagtgtgttttgaaaaaagatggggactatgaaagaaatccataaccccaactacagttgcacagatagacaaagggggaagcaaatagggaattatttattttctaccaggcacttagttatggccttccagacacctgatttcattaattatccccataattaatttgcaataggtgtatcatatcaccttataccatcagtttactgctacatcaccagcacatttaagaatgctaccactcatagtactcaataaatagtgactactagaaggtcaggaaattaaatgttttacatttttcatactttttagtgaaatagaccacaatataaaaaagcgcataaagcaaaaatgtacaactcatttgattattataatgcaaacatccatggaacctccctagatcaagaaacagaacattgggccaacacccagaagcccatcatatgcctcttcacatccccactgagataactcactatccaaactggtacagcaatcacttcctggctttttgatatgccttcaccctgcgttatttatctctaaacatgtttagtagcagtatacaaattaacttctgtgtgctcattgttttcaactgagcagccaggaaaggatagtcttgtcaataaatgctgctgagccagttggaaatctttattaaaaaaatatatgaggggagtcggcgcgcggccaataaaaaaaaaatgaaatttcacacctctttcacaccatacacaaattaattccaattaagatatatttgtatatacaaaaagcaatgcaataaaaccttcagaagataatattagaggctctctttataaccttgaagttggaaataatgcctaacataggatccaaagctcactagccataaagaaaacaattagccagcagtcacaagtataacatttaaatgaagacagtaggaaattattgcacactactagagagtgtcatgggatacactaggaaaactcctgatgtagatcttcaacgagcagatgacaccgatgccagaagcctctcactagctgggtttcaatatttttggttaagaaaaagagaaataagtcgacaggggagcacaccctcagatactttggaaatcactgaagggaaaggggtggttaaatctgtgaaacaaggggatccctgggtggcggtttagcgcctgcctttggcccagggcgcgatcctagagacccgggatagagtcccatgtcgggctcccggtgcatggagcctgcttctctctctgcctgtgtctctgcctctctctctctctctctctctctctctgtgactatcttaaataaataaaaattaaaaaaaaaaatctgtgaaacaagatgacttttaggaaggtgatgaactgaaaagcaaagagggaaggagagagtggcatgtcagtggcaacctctctaattatcacttccaaagtcaaagaaggaaattcttcctcattatccaccttaatttctccttgatgcaatggtatcaactaaacaataaatgttacccaatcacctacaaatgtcaagcgttatgctaattactgtgtgaacaatgcaagcatggaatacaattggtgaaattcaaagagcaaatatttattgaccacttcctatgttcaaaggactgtgagaagggttaggaataccagataaagatctcaataaggtcaatatctaccagaatagaaacacacatagaacagaaactccatgagttggagactttatattctttgtgtaccatttcctcctcagtcttacagaaagtcctggttcaaagcaggtaatcataagtagttgccaaattaataagtaatatattaaggataaatataggcatttataaatcacaataaagatacaaatgggtgggcagccctgatggcgcagcggtttagcgctgcctgcagcccggggtgtgatcctggagacccgggatggagtcccacgtcgggcgtcctgcgtggagcctgcttctccctctgcctgtgtctctgcctctctctcgctctctgaatgaataaataaataaatctttaaaaaaaaaaaaaagatacaaatgggtataatttaaaagtaacaaaattttattttattattattttaagattttatttatttattcataagagacacagagagagaggcagagacataggcagaaggagcagcaggctccccatgggggactcaatcccaggatcctggaatcacaacctaagccaaaggcagactcaaccactgagccactaaggtgcccccaaaattttaacatagtagagagataggatatattcacagattttggaatatttagaggaaacttgaaaatttgcagaagtgagacttgaggcagaaaaggaagaggttgtgattcagaagaacagcaggggaaaaggaacaatcatgagccacaggagcaaaagcagtaccaagtggggtgacttaatgtaaggagcaactctgattggctggagtgaacattcagattaaagaacagtatgccataagagaagataggcagagaggacctgctgtagaagaggccttggaggctgggcagagcatttacttcttttgaaaggtgatgaaatgactcatactgaaatatattacatttataaatgcaaagcaacagaatcaactgttggtaacccacgtgtcttgtaggcataggaagaccatcaaaactaggaagattaacagtgagactagggggctggcattactgaaagtcttgtgtcttcacaaacgtgtacaaggtactcctatcagatgagtagggaaagaaaatgtaaagctttttagaactgtctcttttctttcaggagtagcatccagagactcagtccttgaacttcaagctgcttctctactctgtacccccaattttttcttttaggtcagttttctgtacaaagcactacttaaagttcctactactaatcaatttttttcctacaactgttgggtggaataacatgacttgtcttcaccaaataatgctacttcaatagctctagcactagtccagtttcaagatcttgtgagaaagtggagtaggggcaggtgagttacacaaggagaggaaggtccaacacctgaagtttgtggtaagaaacaggacattggcagtatggattgtcagagactctccatatttggttttcaagcacaatttagatgggtgtacagtgctattaatcaggatacttgttctttttcaggcatagttggaaagcccctggccagagttaaatggaaaggaaattgctgtggtgctagtgtgtctttgctggtaaaaaaaaaaaaaaaaaacaaaactctgtagtaaaaagaagattaaaaggagagagtaaggagggagtgaggatggggggagaaagagattaagggccatcacttcatttgctgatcatcaagagaaagtgcaggggtgatgatggaaaaggcaatcaatagttttgggccttgattaggcattttaaaattatcgcatttaatctttaaaaactctgcaaataaaaatttataccatttgcagaaatgttagtaggaatgtgggaattacagcttgatttcaaaaagaaaaaatgttctttttgggaaatataaatttagtacaactgtattagtactgcaatcatgcaaagcatttttcaaggtgctggcattacaaggatgaatgggatctgtcgaacttgtttcctaggagttcagaacctacataatcttgctattttatactgcaacaagaactgcaataaatttgtttatgacatacagtgagtaaatgggtagggctatgagtttttaatagtgggcaaaattgtttaagtgttttacaaacctataagaaccttaaaaattaaagactaagctctctctgtacatgaaataataagggaaagagactatatctcagattgattaaagaagcagaaggggcaaagaaaatataatgaaataatatgcagaacaacaaaagataaaagatgcaggcagggagaagagtcctgcctggtattagagaaaagtcttccttaaggaatgagagcagatatacagagtgggaccaccccaacaaagcaaaggaattgtgcaactgcagatagaaaaggaaacaaaccgaaaagtcgttttggcaattccagtgtagttacaaggctagaaagtgacagaatggagtttctggatttgtagaacactaaaattctcatagtcatgctagcaaataacatttgcttaagagaggaattcatcttctctctttttaaagcagcacctacagactcagccctcaaacctagaatctgagtcatcagctagctagtccaggttcaggttaatgccttcttgggaaggtattccaactcttgcactgaggcattttaagaaaggaaagtcatcctggaaatccccatccctttattgaccaataaggatagaaagtgaaacagcatcacttgtctccagcagacgtatctgcttcacaggtctgatctgattctaggttctagagagaaaatcaataggaagcaggatgactgatatgtggtgagaggattggctgaccacctagtttcaaggaaagaaatgatatgtcatgttggagagccaagaaactacattttataattgtgaagcagagtagagagtgaggatctaactatttagtgttgggtggtggaggggagggtacctgatatttttcatgcatctgttaaaagtccctgttcagtttaaaatagaaggaaatgggtatgacattgagcattccctgctagtgatatgtgagtacctgtggtggacaagtagaaaattgtgaaaaaaatccatgatcacctgctgattttcatatgacaatttgagggaaagtcacaatatcatatactaatatttgttccagcaaggcaggacttccagatatgttatttctcaattaactatcataacagacttgcatttatattaactgctcagtctccagaatagtccttttttttttcttagaatagttctttatattcaatatatggtgggtcaattaattaataaatggggatactaagaattagtgaatttaagagacataggatcataattattaggatccaatcccagttctgcctacgtctaaaacccatgaattaaaaagattatctgaggtcaaagtgtatctggaataaaacttgcatcttcattctatgaattttacacacttcaatttaatatttcttcttccagtatccctccaatacaaagcaatatttcgctttgtcagacttactctggaattcagttaggaaatatatattgcaaattagaaaagaattgtgttcattgtcatgagattagaattctggcaattgatctatatcttcatccatgatctactcttttaagcttccatttcttcatcactaaaattaaaagacggaattacatttaattccccgtgttaacacctacctggttcctggactacgatacctattaataaatatttaatttctatttcacttacattcatcatttcagtaacaaaataatcacataaaggggaaaggaaaatggcttaaaaactgacttgaaaaaaaaaactgacttcaacagaaaataaggataaattctttttttaaaaagatttatttactcaatcaagaggcaagatggtggaagagtagggtccccaagtcatctgtccccaccaaattacctagaaaaccttcaaatcatcctgaaaatctacgaattcggcctgagatttaaagagagaccagctggaatgctacagtgagaagagttcgcgcttctatcaaggtaggaagacgggggggggggggggggggggggggggaagaaataaaggaacaaaggcctccaagagggaggggccccgcgaggagccgggctgaggccggggcgagtgtccccaggacaggagagccccgtcccggagacgcaggagctgcaccgaccttcccgggggaaaggggctcgcagggaggtggagcaggacccaggagggcggggatgccctcgggctcccggggacactaacagacacctgcgccccgggacagtgcgcggagctccctaagggctgcagcgcgcacggcgggacccggagcagctcgggggggctcgggggcggctccgcggagggggctgcggggcgggagcagctcgggggggctcgggggcggctccgcggagggggctgcggggcgggagcagctcgggggggctcgggggcggctccgcggagggggctgcgggacgggagcagctcggggggctcgggggtggctccgcggagggggctgcagggcgggagcagctccgggggctcgggggcggctccgcggagggggctgcggggcgggaggagctcggaggggctcgggcggggactccgcagagggggctgcagggcgggagcagctcgggggggctcgggcggcggctccaccaatccaccagcgcaggctccggagcacagggcgccgggacacagcccaggatccggcctcccccgggacaggcggaggccaggagggcccaggacagcaaggacgctcctgccccgagctgagcagatcagcggccccgccccggagcctccaggccctgcagacggagagctctgtggttactgcgggggctgactccagggctccagagctggccccgccactgcggttgttgctcctggggcctcacggggtaaacaacccctactgagtcctgcaccgggcagcaagcagctccgccaagtgctaacacctgaaaatcagcacagcaggcccctcacccagaagaccagctagatggacaagttccaggggaagtcaagggacttaaagtatatagaatcagaagatactctcccgtggtttttttgtttgtttgtttgttttgctttttgatttgtttgcttcctccacccttttttttcctttctttctttttctttctctttttcttctttttttcctttttttcttccttctttcttttttctttttctcttttctttccttctttctctcctctctttttctccttttcccaatacaacttgtttttggccactctgcactgagcaaaatgactagaaggaaaacctcacctcaaaagaaacaatcagaaacagtcctctctcccacagagttacaaaatctggattacaattcaatgtcagaaagccaagtcagaagcactattatacagcaactggtggctctagaaaaaagcataaaggactcaagagacttcatgactgcagaatttagatccaatcaggcagaaattaaaaatcaattgaatgagatgcaatccaaactagaagtcctaacgacgagggttaacgaggtggaagaaccagtgagtgacatagaagacaagttgatggcaaagagggaaactgaggaaaaaagagacaaacaattaaaagaccatgaagacagattaagggaaataaacgacagcctgaggaagaaaaacctacttttaattgggattcccgagggcaccgaaagggccagagggccagaatatgtattcgaacaactcctagctgaaaactttcctaatctgagaagggaaacaggcattcagatgcaggaaatcgagagatccccccctaaaatcaataaaaaccgttcaacacctcgacatttaatagtgaagcttgcaaattccaaagataaagagaagatccttaaagcagcaagagactagaaatccctgacttttatggggaggagtattaggataacagcagacctcaccacagagacatggcaggccagaaagggctggcaggatatattcagggtcctaaatgagaagaacatgcaaccaagaatactttatccagcaaggctttcattcaaaatggaaggagagataaagagcttccaagacaggcaggaactgaaagaatatgtgacctccaaaccagctctgcaagaaattttaagggggactcttaaaagtcccctttaagaagaagttcagtggaacaatgcacaaaaacaaggactgaatagatatcatggtgacactaaactcatatctttcgatagtaactctgaacgtgaacgggcttaatgaccccatcaaaagacgcagggtttcagactggataaaaaagcaggacccatctatttgctgtctacaagagactcattttagacagaaggacacctacagcctgaaaataaaaggttggagaaccatttaccattcgaatggtcctcaaaagaaagcaggggtagccatccttatatcagataaactaaaatttaccccaaagactgtagtgagagatgaagagggacactatctcatacttaaaggatctatccaacaagaggacttaacaatcctcaatatatatgccccgaatgtgggagctgccaaatatttatatcaattaataaccaaactgaagaaatacttagataataatgcacttatacttggtgacttcagtctagctctttctatactcgataggccttctaagcacaacatctccaaagaaacgagaactttaaatgatacactggaccagatggatttcacagatatctacagaactttacatccaaactcaactgaatacattcttctcaagtgcacatggaactttctccagaatagaccacatactgggtcacaaatcgggtctgaaccggtaccaaaagattgggatcgtccccagcatattctcagaccataatgccttgaaattacaactaaatcacaacaagaagtttggaacgacctcaaacacgtggaggtgaaggaccatcctgctaaaagatgaaagggtcaaccaggaaattaaggaagaattaaaaagattcatggaaaataatgagaatgaagatacaaccattcaaaatctttgggatgcagcaaaagcagtcctaagggggaaatacatcgcaatacaagcatccattcaaaaactggaaagaactcaaatacaaaagctaaccttacatataaaggagctagagaaaaaacagcaaatagatcctacatccagcagaagaagagagttaataaagattcgagcagaactcaatgatattgagaccagaagaactgtggaacagatcaacagaaccaggagttggttctttgaaagaattaataagatagataaaccattagccagccatattaaaaagaagagagagaagactcaaattagtaaaatcatgaatgagaaaggagagatcactaccaacaccaaggaaatacaaacgattttaaaaacatattatgaactgctatacgccaataaattaggcaatctagaagaaatggacgcattcctggaaagccacaaactaccaaaactggaacaggaagaaatagaaaacctgaacaggccaataaccagggaggaaattgaagcagtcatcaaaaacctcccaagacacaaaagtccagggccagatggcttcccaggggaattctatcaaacgtttaaagaagaaaccatacctattctcctaaagctgtttggaaagatagaaagagatggagtacttccaaattcgttctataaggccagcatcaccttaattctaaaaccagacaaagaccccaccaaaaaggagaattacagaccaatatccctgatgaacatggatgcaaaaaatctcaacaagatactagccaataggatccaacaatacattaagaaaattattcaccatgaccaagtaggatttatccccgggacacaaggctggttcaacactcgtaaaacaatcaatgtgattcatcatatcagcaagagaaaaaacaagaaccatatgatcctctcattagatgcagagaaagcatttgacaaaatacagcatccattcctgatcaaaactcttcagagtgtagggatagagggaacattcctcgacatcttaaaagccatctacgaaaagcccacagcaaatatcattctcaatggggaagcactgggagcctttcccctaaaatcaggaacaagacagggatgtccactctcaccactgctattcaacatagtactggagtcctagcctcagcaatcagacaacaaaaagacattaaaggcattcaaattggcaaagaagaagtcaaactctccctcttcgccgatgacatgatactctacatagaaaacccaaaagcctccaccccaagattgctagaattcatacagcaatttggtagcgttgcaggatataaaatcaatgcccagaaatcagtggtatttctatacactaacaatgagactgaagaaagagaaattaaggagtcaatcccatttacaattgcacccaaaagcataagatacctaggaataaacctaaccaaagatgtaaaggatatataccctaaaaactatagaacacttctgaaagaaattgaggaagacacaaagagatggaaaaattccatgctcatggattggcagaattaatattgtgaaaatgtcaatgttacccagggcaatatacacgtttaatgcaatccctatcaaaataccatggactttcttcagagagttagaacaaactattttaagatttgtgtggaatagaaaagaccctgaatagccaggggaattttaaaaaagaaaaccatatctgggggcatcacaatgccagatttcaggttgtactacaaagctgtggtcatcaagatagtgtggtactggcacagaaacagacacagagattaatggaacagaatagagaacccagaagtggaccctcaactttatggtcaactaatattcgataaaggaggaaagactatccattggaagaaagacagtctcttcaataaatggtgctgggaaaattggacatccatatgcagaagaatgaaactagaccactctcttgcaccatacacaaagataaactcaaaatggatgaaagatcttaatgtgagacaagattccatcaaaatcctagagaacacaggcaataccctttttgaactcggccacagtaacttcttgcaagatacatccatgaaggcaaaagaaacaaaagcaaaaatgaactattgggacttcatcaagataagaagcttttgcacagcaaaggatacagtcaacaaaactaaaagacaatctacagaatgggagaagatatttgcaaataatgtatcagataaagggctagtttccaaaatctataaagaacttattaaactcaacaccaaagaaacaaacaatccaatcatgaaatgggcaagagacatgaacagaaatctcacagaggaagacatagacatggccaacatgcacatgagaaaatgttctgcatcacttgccatcaggtaaatacacatgaaaaccacagtgagagataccacgtcacactagtgaaaatggggaaaataaacaagacaggaaacaacaatgttggagaggatgtggagaaaggggaaccctcttgcactttggtgggaatgtgaactggtgcagccactctggaaaactgtgtggaggttcctcaaagagttaaaaatagacctgccctacgacccagcaactgcactgttggggatttatcccaaagatacagatgcaatgaaacgccgggacacctacaccccaatgtttatagcagcaatgtccacaatagccaaactgtggaaggagcctcggtgtccatcgaaagatgaatggataaagaagatgtggtttatgtacacaatggaatattactcagccattagaaatgacaaatacccaccatttgcttcaacgtggatggaactggagggtattatgctgagtgaaatgagtgaatcggagaaggacaaacagtatatggtctcattcatttggggaatataaataatagtgaaagggaatataagggaagggtgaagaaatgtgtgggaaatatcagaaagggagacagaacatgaagactcctctgggaaatgaactaggggtggtggaaggggaagagggtggggggtggaggtgaatgggtgtcgggcactgaggggggcacttgatgggatgagcactgggtgttattctgtatgttgttggtaaattgaacaccaataaaaaataaatttatttaaaaagataaaataaaacaatgacattttttaaaagttttatttatttatttatttatttatttatttatttatttatgatagacacaaagagagagagagagagaggcagagacacaggagaagggagaagcaggctccatcccaggagcctgatgtggactggatccgggttcccaggacccctccctgggccaaaggcaggcgctaaaccactgagccacccagggatcccaggataaattcttttttgagaacagatttatattttaccttttaaatttttttatttatttactttttaaattctagtataattaatgtacaattttgtatttgtttcaggtatacaatacagtgatttaacatttctatacattcattactcagtgctcatcacaataagtgtacctttagtatccttacctattttactcatccccatgctgacttcccctctagcaaccaccaatttgctctctatatttaagagtctgttttgtatatctgccccttcttttctttgttcacttgttttgtttcttatattacacatatgagtgaagtcttatggtatttgtctttctctgactgccttattcaaaaatgattaaatatttaaatgtgggacatgaaaccataaaattcctagaagaatcacagatggtaatctctgacatcagtcataggaacatttttctagctatgtctcttagatatggcaagggaaacaagagcaaaattaaactattggactataccaaaataaaaggctcttacacagcaaaagaaaccttcaacaaaacaaaaagacaacccaccaaatggaagaggatatttgcaaatgacatatcttataaaaggttagtacccaaaatatataaagaacttatacaactcaacaccaaaaaaccctcaaataatccaattaaaaactagacagaaaacaggaacaggcacttctccaaagaacacatacagatgaccaacaggcacatgaaatgatgctcaacatcaactcatcatcagagaaatacaaatcaaaactacaatgagatatcacctcaaatctgtcagaatacctaaaatcaacaatgcaacagttgctggtgaggatgtggagaaaaaggagctctcacatactgttgatggaaatgcaactggtgccatcaccatggaaaatagtatggaggctcctcaaaaactcaaaaatagaactaccatatggtgcaatagcactactgggtatttaccaaagaatacaaacacactaactcaaaaggatatttacaccccgatgttcattgcagcattatttacaatagccaaattatggaagcagcccaagtgtccattgatagatgagtggataaagaagaattatatatatacacagtatatacaatggaatatatatgtatatatattccaatatatataatggaatattattcagcataaagaagattgaaatcttcccatttgcaacaacatagatggagctagagggtataatgctaatagaaataagtcagtcagaggaagatttcactcatatgtggaattaaaaaaaaaaacaaataaaggagaaaaagagaagaaaaccaagaaatagacttttaactgtaaagaaaacataatgtttattacaggggaggtgggtgggagtatgggttaatacattaaggggattaagagtacatttatcatgatgaacactgggcaatgtatagaaatgttgaatccactatattgtacactagaaactaatataacacatatattaactatactgggaaaacaaaaacttaacaaaaaaataaaagttaaagatgagcagagaacaaaaacagacatttttctaaagaggacatgcagatggccagcaggcacatgaaaatgtgctcaatatcactagtcatcagggaaatgcaaatcaaaccacaatgagatatcacttcatacctgtcagaactgttaaaatcaaaaacacaagaaacagtgttggcaaggatgtggagagaaaaaataacccttgtgcactgttggtgggaatgcaaactggtacaaccattgtggaaaacagtatggaaattcttcaaaaagttaaaaaatagaatttccatatgatgcagcaattccacaagtgggtatttacccaaataaagaaaaaaaatttaattatctcagaagaaaataatttctcaatatggccaaacaatactaataaaaatattagtcctttttggattcttcttaaagtattaagagattaagagattaagattaagagatcttaatggcaggaataggatgttattgttaaactattcttggggtaactgtgctcattgtaattcaggagttagtgagtacactgctagcactctttgccttctaacatagaactgtgggacaggatcttcactcttttggtggaaaaaatatattttctaaattagacaaaaatctatgttagcataattttcatcactatgtattaactaactttccaatccattccctgatttactgatagctaccccctttgtaacatcatataaatacttctctgaaaacctggcatgggtacttgggtttctataacaggtggagatctgtatactattctaggcttgccagttccaaggctatggaggaaatccttgtttacatatgaaccacaagatcattctttttaaaaaaaaaaaaaatctatttatttattcatgaaagacacacagagagagacataggcagagggagaagcaggatccatgcaaggagcccgatgtgggactcgatccgggggtctccaggatcacaccttgggctgcaggcggcgctaaaccgctgtgccaccggggctgtcccacaagatcattcttaatggagacaggaatatccttaagtgggatttattgaagtttcctataggtaaccgtagattattggactatctgtcaagaaaggagaaaagtggagcaggatcgagtgctggaggtggatgccccgtgggctggcagcccgtgatgctaggcaccctgccgccccagcgcttaccgcacccaggccatgtcactctggcggttagggtccaactgagtggagaaggcaagatgatggaagagtaggggtcctcctttcacctggtccctcaaacttagctagataactttcaagccaccctgaacccctatgaattcaatctgaggtataaagaaaacagctggaacactgcagagagaaaagtgatgcttcctacaaggaaagagtgtggagaagagaaatggagggatatatcgggagataaagggcgggggaagggagccttcctaagcctctgcacaaaagcggtatagcactagggcttagtagggctttcctttagaaatctgctcctgagagagtcttccctgcctgaaaagtgcagagtcgtgacatagggcagaatcacaggaggggcagtgacatctcaatattcccagagacagagtaagaataggggcaccaaggagaaagctcaacttgtgccataaaccacaaacccctatcagatcatcagacggatagcatcctaggtcctggtaaaggactgggagtctgggagtggcgaagcggtgcatgctcgagctggtgaacgctctttgccccaggacctggcagcaggcaggagtgggctatcctctgtttgctctggcagaagtagagccagtgagcacgtaagacagtgaaagctctcccgctgtgaggcgcccttcaaattgtacaaatcagtacccccatgcctgcccccaggaggatctgagccagcgctgctaagagactgcagttccttacacgctggaagcgaagcgcttggctcccgggctagagatctggccacagctactttcttttctcctttccccctggagaggcctggcctcccggaacaaaggcctcacagggcagccagctcacactgagcccagctacctggccaggggagggacatcagggcccaggcccaggcagctgagaatcaacacagcaggcccctccccaagaagaccaacggaagagcagagaaagagcaagtttactaaccaagcagccctggaaagctccaggattgaggaaaaatagtgtatagaactctagggtttttttccttataattcgtttatctttcaggttaaagatttccaatagtctttcttttttcctaccctaactacaatatttcatcaactcttcatttttaagttttttttttccttttggacattcatatttttataattacatgtcatagatatattcttcatttttggcttcctttcaatgtattccatttcatgtttgtagatatgtactttttggagggttttggttttggttttggtttggtttataattttggaatttagtaccttctaacatagaccaaaatatactcagaaacacatggagcattgagttggtccactctatgagattatactccctcttccttcccattccacctctctcttttgtcttcttgtttttgtttttgttgttgctattgtttctctatacaagttttacttgtttatgtttttattttattattttagttaaaaaaattctttattggcgttcaatttgccaacatttagcattacacccagtgctcatccgaccaagtgcccccctcagtcatcccaaccccccgcccacctccctttccactaccccttgttcatttcctagagttaggagtctctcatgttttgtcaccctcactgatattttcactcattttctctcctttccctttatttcctttcactaatttttatattccccgaattaatgagaccatatgatgtttgtccttttctgattgacttatttcattcagcataataccctccagttccatccacatcgaagcaaatggtgggtatttgtcgtttctaatggttgagtaatattacattgtatacataaactacatcttctttatccattcatctctcggtggacactgaggctccttccacagtttggctattgtggacattgctgctataaacattggggtgcaggtgtcccagcatttcactgcatctgtatctttggagtaaatccccagcagtgcaattgctgggctgtagggcagatctatttttaactctttggggaacctccacaccgttttccagagtggctgcaccagttcacattcccaccaacagtgcaagagggttcccctttctccacatcctctccaacatttgtggtttcctgtctattaatgttcactattctcactggtgtgaggtgggatctcattgtggttttgatttgtattttcctgatggccagttatgcggagcattttctcatgtgcatgttggccatgtctatgtcttcctctgtgagatttctgttcatgtcttttgcccatttcatgattggattgtttgtttctttgctgtttagtttaaaaagttctctatagatcttggatactagtcctttaactgatatgtcatttgcaaatatcttctcccattctgtaggttgtcttttagttttgttgactgtttctttggctgtgcagaagcttcttatcttgatgaagtctcaataattcatttttgcttttgtttctcttgccttcatggatgtatcttgcaagaagttgctgtggccaagttcaaaaagggtgttgcttgtgttcttctctaggattttgatggaatcttgtctcacatttagatctttcatccatattgagtttatctttgtgtatggtgtaagagaatggtctaatttcattcttctgcatgtggatgtccagttttcccagcaccatttattgaagagactgtcttttttccagtggatagtctttcctgttttgtcgaatattagttgaccataaagttcagagtccacttctggattctctattctgttccattgatctatgtgtctgtttttgtgccggtaccacactgtcttgatgaccacagctttgtagtacaacctgaaatctggcattgtgatgcccccagctatggttttcttttttaaaattcccctggctattcggggtcttttctgattccacacagatcttaagatgatttcttccaactctctgaagaaaatccatggtattttcatagggattgcattaaatgtgtaaatttccctgggcaacattgacattttcacaatattaattcttccaatgcatgagcatggaatatttttccatctctttgtgtcttcctcaattcctttcagaagtgttctgtagtttttaaggtatagatccttagcctctttggttagatttattcctaggtatcttatgcttttgggtgaaattgtaaatgggattgacttcttaatttctctttcttcagactcattgttagtgtatagaaatgccactgatttctgggcgctgattttgtatcctgccacactgccgaattgctgtatgagttctagcaatcttggggtggagtctttagggttttctatgtacagtatcatgtcatctgcgaagagggagagtttgacttgaatttggaatttagcaccttctaacatacagaacgaaatatactcagaaccaagaggatcactgtcttagtctactctgtgagattatattctccttcccccactacttgctctcccccttttttaattttattatttttactgtttttttttttaatttgtttcttactttcttgctcttttttcttttttttttttcttttattttctggtttatgacctctttggaattatctagggtatattttactagggcatggttgatattttttactctactcactcatatagccattctgcactgcacaaaatgaatagaagaaagaattcaccacaaaagaaagaaccaaaagtaatagtctctgccacagatccagatggacatgaatttaagtaaaatgttggagaaagaattcaggattacaattataaagttactagttgggcttgaaaaaagcaggaaagactctacagaatctcttagtgcagaattgagatctcatcaggccaaaattaaaactactttaactgagatgcagtctaaattggatgctctaactgctatggttaatgaggcagaagagagagtgactgacatagaagacaagttgatggaaaggaaggaagctgaggaaaaaagaaaaacaattagagaccgcaaggagaaaatctgggagataagtgatagtttgagaaagcatattattcctgttaatgagattccagagagtatggagtgagagagagagaggaccagaaaatatatttgaatacattagagctgagaacttccctaatctggggaagaaaacaggcatttatattcaagagatagagaggatgcccccccttcaatcaacaaaagtgatcaacacccagacataaaatagtgaagcatgcagatttcagagataaagaaaaaaacctgaaagcagcttgagacaagagattcctaacatattggggggaaaatatacattaacagcaaacctatccacagagctctatcagtccagaaaggactgggataatatattcagagtactaaatgagaaacacatacagcccaggatactttatccagcaaggctgtcattcaaaatagaaggaagataaagagtatccaggatagacaaaaactgtaagaatatgtgatcaccaaatcagctctgaaagaaatattaagggggaccttgtaagacaagaggcagcccaaagaaacaatctgcagaaagtgggactgtataggtaatactacgacacaaattcatatctttcaatagttactctgaacgtgaatggtctaaatgctccagtatgaagacacagggtatcagactggatagaaaagcaagacctacccatatgctatctacaaggacaccttcagagtgaaaatgaagaaagagaaccatttaccatgaaaatggtcctcaaaagaaagcttgggtagcaatcctcatgtcagaaaaatttgattttaagccaaagactgtactaagagatgaagagggacactatatcaaaattaaagggtctgtccaacaagaagacctaacaaatgtgaatgtttataaccataatgtgggagcagccaattatatgaaccaattaataaccaaagagatacatacataataatacaattaatagtaggagatttcaatgctccacactcagtcaaggacaggtcttctaagcagaagatgaccacggaaacaagggccatgaatgacccactggaccaaacgggtttcacaaatatatacagaacattccatcccaatgcaactgaatatacattcttctcaagtgcacatggaactttctccaatatagaccacatactgggtcacaaatcaggtcactactcatacccaaagatggggattattccctgcatattttcagaccaaaatgctttaaaactagaactcaatcacaagaagaaatttggaaaggactcaaacacttagaggttaaagagcatcctactaaaagatgaagggtcaaccaggaaattagagaagaatttaaagatttatggaaactaacaaaaatgaaagtacaactgtttaaaatctttgggatacaggaaaggcagtcctaggagagaaatacatctcaatagaagcctccttcaaaaaattagaaaaattgcaaatgcgcaagctaactttacacctaaaggaactggagaaaaacagcaaataaaacctacaccaagcaggaaaagagaaataataaagaatagagcagaaatcaatgaaatagtgaccagaaaaactgtagaacagatcagtgaaaccaggacttgtcttcaaaagaattaataagatatataaacccctagccagacttattagaaaggaaagaaaaaagactgaaattaataaaatcatgaatgaaagaggagagatcacaaccaatactaaagaaatacaaacgatttttaaaacttattatgagctactatatgcgaagaaattaggcaatctggaggaaatggttgcattcctggaaacctacaaattaccaaaactgaaacaggaagaaatagaaaacctgaacaggccaataaccagtgaggaaattgaagcagtcatcaaaaacctcccaagacacaaaagtccagggccaggtggcttcccaggggaattctatcaatttctttaaaaaagaaataatacttactgtactaaagctgtttcaaaggatagaaatggaatacttccaaactcaaagacccccaccaaaagggagaattatagaacaatatatccctgatgaacatggatgccaaagttttcaccaagatactagccaaaaggatccaacaatacattaagagatcaattattcaccatgaccaagtgggatttatccttaggatgcaagattggttcaacatttgatagatcacattaataaaagaaaagacaagaaccatatgatcctctcaatagatgcagagaaaacatttgacaaaatacagcatccattcctgatcaaaactcttcagagtgtagggatagagggaacatacctcagcatcttaaaagccatctataaaaagcccacagcaaatatcattctcaatggggaaaaacagagagcctttcccctaagatcaggaacacaataggaatgtctactcttaccattgcctattcaacatagtactagaagtcctagcctcagtaatcagacaacaaaaagaagtaaaaggcattcgaattggcagagaaaaagtaaaattctccctctttgcagataataagatactgtacatttaaaaccctaaagaatcttccccaagattgctagaactcatacagcaattcggcaatgtggccgcatacaaaatcaatgcccagaaatcagtgacatttctatacactaacaacgagactgaagaaagagaaattaaggaattgattccatttacagttgcacccaaaagcgtaagatactaggaataaacctgacaaagagggtgaaggatctataaattaagactatacagcacttgggaaagaaattgagaaagatgcaaggagatggggaaaaaaataacatgctcatgaattggaagaataaatattgtgaaaatgtgtatgctaccctgagcaatctacacattcaatgcaatacttaacaaaataccatggactttcttcacagagttggaactaataatcctaagatttgtatggaactagaaaagaccccaaatagccaaggaaatgttgaaaaagaaaaacagagccagaagcatcacaatgtctggcttcaagctgtattacaaacctgtaatcatcaagacagtatggcaagggcacaaaaacagacacatcaatcaatggaacagaatagagaacccagaaatagaccctcaattctacggtcaactcatcttcaataaaacaggaaagcatatccactgaaaaaagacaatctcttcaataaatggcattggggaaattggacagccacatgcagaagaatgaaactggaccattctcttgcaccatacacaaagataaactcaaagtggatgaaagatctaaatatgagacaggactccatcaaaatcctacaggagaaaagacagcaaccttcttgatctcagccacagcaaactcttgtaagacatgtcggtaaaggcaaaggaaacaaaggcaaaaatgaactattgggacttcatcaagataaaaaaagcttctgcacagcaaaggaaacagtcaacaaaactaaaagacaacctacagaatgggagaaggtatttgcaaatgacatcagataaagcaatatgaaataaccaaattctatcatggaaaaggtttttagaaactttctcagaatctcttcaccatttgccaggaatgcatggaggcttcctaggaaggagatgttcacatcaaaatgctcagaataggaaaagacaacagtgcctttcaccgaattactggacacagtgcagcagatcgccccaaagcaacccagcaagctcagtcatgtccttcattttccccatgtgatatagtaagaactctcatattaaggaaccctcaataactgaggtaattagtagagaaatttatccttggctagggtgagcagagtctccagttgatcagaaggccggttttagtaaacaagggaatagagagatgcttcttctcagtgtccaagggtcagaaaggattcataatactacatttaaatttaaagagaggaactggaccagagcaaagagattacagaacttgcaagcttactggatgatgcctcagcaagagtgagaaagatacaataaactgtaatagagaaaatccaggacagctgcaagtgaacctttcatggtaccaatctcgtttaaagctccttaatgtcatgtatctttagtcagtaccagcaaagaacaggtatatgaatgggtagtgagatatactacctcactgataaatgtgcatagcaatacaaaatcctattcttagacttcagttcccacattgttcttgagtcagtagcaatggaaaccagcttggctcaaattaccagctcatgcatttagaaaatctataatacagggcaaatgagggctgatttatcagatttgccattggctaaatagtaagagtggagggagaggagggtgctggataatttagcccaggccctaaagagctatgtgttctagaaaacacacaggtgcccttactgatggccagcatgtattcatatgctcacctccagcagggaatcctttactgcccagaccctgagttgacagtcaacagggttcccatctctgttcaggggtgggctctacaggcccagcctcctggttaatgtagtctttacctttccagcacagtctctcatgttgatgttgagacagtggccctaaggctgtctggcccagagctgaacacactctcactattgggccaaacaatcccagattctacttattgtaatgggcatccccagtgcgtttagaaaattttgcagtgtggttattaatacgttggattcagaggcctggaagctgttctgtaaagtacagtgtttaactgaaaattgccttcacagttgggagtagtagcctacactccttggatgtctttacttacagtttgccctgatggtcctcacctcttttgtgaaacctttggagaatcgaccaaagactacgttattgtctaaaatttacattgaaaacatcagaaaaaacagtaacaccctggatggttgttggaagggagaagctgtctgggcataggaagtagttattagaccagggttgaggtagaagaggaaggatgatgacatcaatctttgcagaacccacatttacatgaaaccatgatacgctattaaatacatttcctcccagctcacaaggcaaatgagggaagccagcgtcatttgtctctggtttagtctcccactaaaccgtcaagaaggcacacccaaacctgtggtggcagacagagcaggggagagaaattctattaacatctcagttcagaaaaatcggtgtatgcatcggtgtatgctgtttatggagcatcgtgcagaatttctgaagttactgcccatgccgtccccactggaactcccctgcctttcttctctcccacgggatgtcatggtcccccagggatcatggccacaaagtttctgaacttggttgggctcccgcccactttgcaatccttgtatagatcttagtcatttctatctctcatttcccttcaccgtgtgcctttttgatccactcacttcagagaactaaaagaattactcctttgtacctcccagatacaaagaagaaaaacatgaacactcctcaaatccaataaagccttaaattcagaacccatggacactgctgttcctttccttgcaaaaggaaactttcagaagaaacgcccggtctgtagtgaaggcacagcaacttttgttgaaacttttgtgatcggcgggaagccttgactctggctgcagttagcaatggtctcagcacaggaacacttgttgggattttgatgaagctggagagtggtttggcctccaagagtttgaacctagtctagtctgactgaatacaacttcagaatcttcagctgagcatggatgtctccaaaacgtatcatctctttaaagaacccttagtaaatgacactagaactgaccaggagtgttcatccatgcacgcatgaacaaaatgctgtcaggtatgagaaacagagagaggaggaagagctcttttctacccccaaggtgcccaggcttatcgtggtaaaacactgccaggtggaggcactggaaggtgtacatatgtggcccgaggtctaagcaattcgttctttaggagaatttgtggcctagtgcctgtgaggggaagtgtgcacaaatgtccttctggttcacagtgcagcacagctgcccctctagcacatcaccctgaggttagattgcctgagtttgaattctggcaccactccttcctgatggtacagccttaggcaatgtccatgctacaatttccttgctggtataatgggaaagggagatgataataatatgcctacctcgtggtatcatgaagatgaagacagttagtataggaaaagcacttacaagagtgtctggcatatagaaagcactctgcaaacattatacattattatgattatgattatgattatgattattatcatcactatttttctcaattaattatcaggcctcgagggtaacctggcaatctgtctttattcactctctcactagcctggttgattgggatccaatacctcagggaggaaagtctccgtgtcaaaactaaaatagcctggctttctttacattaggtgggaagggaggaaggaagggaggaaggaaggaaggaaggaaggaaggaaggaaggaaggaaggaaggaaggaaggaaggaaggaaggaaagaaggaaggaaggaaggaaggaaggaaggaaggaaggaaggaaggaaggaaggaaggaaggaaggaaaggaaagaaggaaagaaggaaagaaggaagaaaggaaggagtagggaaggagtagggaacagctattcatgctttaggtcttgccattgccctgctcacctccaggaaactaaccagcaataggaaaggaaggcaaaaggctggatccacctcctccctccctccctccctgatttcctttgcaccacttacatgtcccagaaattgttggttgacgctgaaaactgcaagaatcaggcttacacctgattgattcaggtcaaatgtgtagttgatttgggggtttattggcagatcggtgagcagagggtatcctgaaactgagcagacataattaaataaaacttcctctgcgtttcgagaagtggaaacactttaagatgtcagtattaatagctgtcattaccctaccaacctatgattgtgagcccacccttggtttaagggcagacgtggttgtgacctagatcagaggggtaatatgtattccctcatctaattgctgagccctttgcttctctttgcatatggaacatttttatcaatagagaagcagagcattttgaaaggcacacccatattctacgtgctatcaccttttttttcacccaaatctgcaattctataacccagttctccctagccaggctctgctgacaatctttgtggaaattgggtttaagtgaaaccaaaataagacattgggtgcgttcctctcagacaaatgaaaaccgcatgggaggcagcatcattggtctctggcagactaagccacgaaggagcataagaaaaaaatgtttagatgtatgagaagaaaaacgtatccattaaaaagaaaacagtaaaaaaaaaaatactaagccatatatttaacaacgatgtaaagagtcatcagagaaaacattacaaaagtacaccaaagttggaaaagtactgcagaatacaatattcacagtgagaaatataatataaatatatgattataatgcagtttccatcaagatctacatgacaacctaaaaattaatgatgtgtttgtgaaagtcagtattcaaaatttttgtaaataaacaataaatgattaagtgtgtgtgtatctgacactatgccgtgtactttttataaataattagattttgtatccactgtactgcttaatttataaaaaatgctgcttctttttggaaatattttgttcttctatggagatgatttatcccatcgtctctgatttcagtattaataattttaatttagtgtaacatgaaaagttaagagaaaaaagataaatcaaatatcacataaaattctaaaattacaatgtaaatctaaaattctccaggaatgatgaacaagcagaactaaggaagaactcttgtcttttcctgatcttactacgtgccttataattactcttctcacccacactgtttaatctacctaagtatttccttctttcagcatgcatttcctttacctaaggagacaatactttctcccatactctgtagtctgaagagataagatatttcctcaagtcagtagttggaagagacacattgagtcacaaaggatcattccccatcaataaaaaaaggcaggtaggctttcatggtgtctacatttatcatccaaatgacatggacacttgagtggtaaatttcatcttaattctgattgtacacttacagtctcttgtcacctaacaacctgccagcaatggcagtggtgtatgccaaggtatttgagaaatacaaagctggataaaagccttctctaaagtctaggatgacctcagcacacttgtagcctggacagggaccctgagaaacatatctactctccccacactagaagcacatgctttcacctacaaaaatttgtttcatcattctcttagaacacttctgccgaggttttcaaagaacgaagctcttccagatttatgacagcttgtattcagttatccttcagataactgaacaacaatctctccttttcagctccaaaaatctgaatggctttaagaaacaagatatttcattacattcattatattaatccatggcaggagagtggggggagaatgagaaaataaattcccatattttcgaagtaatcacatcacctttttttttttaacatcatcttttttatgtgatttgggcagcaaggacactggatcactgctaattgggctgtatgctatcccatcatatccctaaaatttaagttctacaaggttttcttctttttgaaaattgttttggctattccagatcctttgcatatctatataaatgtatttagtccagctatttctaaagaggaaaaagacgtaggaggagggaggatcctgctaagatattgactctataaactaacttgagagaattaacttaactccataaactaagttaagagaattaacctcttaaaaatattggagatttaaattcattatatatatgtattatatatatatatattatatatatatatatatatatcaatgttttagatcttttaaattttactcagttgtattttgtgggtcttggattagaggtcttccatatttttcattataattatttctaattatattatgcattttgatagttatgattttggttgtttttccattttttaaattaagatatctatctatctatagatagagagagagaaattaaaattcaccctttttaattcacaattctgtgagttttgacaaatgtatataatcatgcaaccaccaccatgatcaagatgtaaaatagtttcatcactccaaaatatttccttgtgccccgttatagtcaacccctttccctatccttataatttgttttcgtaataatgtcatatccaattttccaacaccatttgttgaaaagtctatcctccattgaaatgtttttgcactatggcaaaaatcagttgactatatatatacgtggacctaatttgagactactctgttttattgatcaatatgcctgtcctttcaccaatacaatactgtcttactttagtgttagaataaatctggcaatcagggaacatgagtcttccaactctgttttgctttttcaataagccacacttattggagtttggctgatttcttctcttttatttgcatttccttataaattttagaattcctttgtcagtttgtacaaaaaaaatcctgctgagaatttaaatagaaagatattgaaactatagatcaaatgaagagattgacaccttaatagtattgagtcatcttatcaaggaacagggtattttaggtctttgatttcttttacgcagatttgtatattttatataagacttatagtgaaatattttatgggttttagtgctatgtaagtggtacttattttattcttaaattgtttaatgcaaataaatagaaataaaataaatatttgtatattgatcttcaaactctaaccttgctaaactcatctactgtagtaagttttatagattctttgggattttatacatagacaaataaatatattgtctatgaatagagatattttatttcttctcttccaatcggtatgccatttatttgtttgttttgttttgtttttctgaactgatacttaattggagtggtaagagcacgtatcctgttttgtggccatttttagcaggaagcatttagtctttcacttttaaccgtggtgttgattataggttttttgtagatgccatttatcaggctgaagacatgctgaaagtttttatcatgaaaagaggttaaactctgtcaagactctgtcagctctgctttttctgcatctattgacatgattacattgtggggtgtttttcatgctattaatatgataagttacatcatatcatgatgaacaaccttggcattaatggatgaatcccatttaattatgattaagcttttctgtaattattggattctatttgatagtatttaattgagaattggtatatataaataccaactattgtttgttcttgtaatatctgtcaggttttggtatcagggaaatattaacctcataaaatgagttgggatatgttttctcttttcttaaattatggagaagtcctatagaattggtattatttatttcttcagtgtttggtaaaatttgccagtggagtcatctggtcttagagttctctttattaaaagttttaaactaaaattttaatttgtttaatagattttaaagtattcctttttattttattttctattttttcattttatagtgaaatatatttgatgcataacattgtataagttgaaggtgtataacacgtttatttaacacatttacatatttaatgtgattgccattttatcaatatttagtatctatcacattataaaattatccttttttaatagttggaataataaagttctactctcttaataagtgttgaacttaaaaataaaacagctattttactggcaaaatgggtgtcttcaggaatagcagagaattgcaatttgggacaaaacaagatttggtaaaaactatcagctaggtcaacaaaaaaaggagaggaacattattttgtggaaaggaaggaggaagttgggaagggttgttttgaacaaaaatccattgaagaaaaggaagaatgtaggtgatgacactctttcattggctgagctgctgggatagtctgtttcttgtagaaggtgcaaggtacatcttttcctgttggagtctgtaattgattctctcctgttgagaatttggttatggtctataacaggcatcgggcggtactggtttgagcttccccttctatcctcccaactccattttagtgaggtttcctattattaatatttgcgtgttggatgattaaaatacaatattgttatctttattcaatataccatgcattagatttactacttgttgccagtttgtaccctaaacaacatttgtcctatgccgccactcttatcccctggttacatttttactcttcttatgagtaactttttagattccacgttgaagggatatcatacagtacttgctttctctgtctgacttatctcacttagtttaatttgctcaaggtccatccatgattttgcaaacggcaagatatctttctcatagctatagtattccatatgtatataatacacacacacacacacacacaaacacatcttctttatccattcatccattgatgggcactttggtggtttccatatcttggatattgtgaataatgctgcaataaatctggcaaacagaaattgaaattctgtttcaatttcctttgggtatatacacagaatggaattgctggatcatatgatagttctacatttaattttttgaggaaactccatattgttttcatagtggatgaaccaatatgtatttctaccaacaatatacaagggttcccttctgtccacatccttgccctcctgagcagggagcctgatgctgggctctatcccaggactctggtatcctgagcagaaggcagatgttcaactgccagtcactcaagcactccatcttttgtgtttctttttaaagattttatttatttattcataagagacatagagagagagaggcacagacacaggcacaggcagagggagaagcaggctccatgcagggagccaggtctccaggatcacaccctgggatcacaccctgggctgaaggtggcgctaaaccactgagccaccctggcttgccagatcttttgtgttcttgatgacagccattccagcatatgtaagatgatatcttaattgtggtgttttttttttttaatttttatttatttatgatagtcacagagagagagagacagagagaggcagagatataggcagagggagaagcaggctccatgcaccgggagcccgatgtgggacttgatcccgggtctccaggatcgcgccctgggacaaaggcaggcgctaaaccgctgcgccatccagggttcccttaagtgtggttttgatttgcttttccctaatgattagtgatgctgagcattttttcatgtacccattagacatttggatggcttctttagaaaatgtctatttaattcctctgctcacttttaaatcgaattgacaatttcgttattgagttttctgaattctttatatattttggcattaactccttttttaaaaagatttatttatttatttatttatttatttatttatttatttattcatgagagacacacactgagagaggcagagacataggcagagggagaagcaggctcctcacagggagccagatgctggactccatcccggatcctgggatcacaacctgagtcaaaggcaggcacccaaccactgagccacccaggcatcctggcattaactccttatttgatatatgatttacttacatttttcctgctctgatattgccttttcattctgttcatggtttcctttcctgtgcagaagtttttcagtttgatgtagtcccattttgttgattgttgtttttgttgtttgtgtttgagatgtcatatccaaacacatattgccaaggcaaatggcaagaacattttcccctatattcttctagggctttccatatatttttcttctgttccttactggttaaattctctgtgatccaagaaaatatatacactgtataaattcaatattttaacatttctgaggtgtgttcttttgtcagaatatggtttatcttgagagtattccacacccatttgaaaaaaaacatgtatttttgatgtgatgtggaggcggagaaaattaaggccattccactttaagttcagcgttagcacaagtacagccatcccaggccgctgtgaataagagctgaaatttacttacttacttacttacttcagttacaggaaaaaaacagtttacagcttaacgccctagaaagcccctattagaatgagaacagagcccaagccaagggctggaagccccatattagaattaaaacagagcccaatgcccttgaaaaccccatatcagaatgtaaacagaatttgagaaattcctcccccccttctggaggccccctagaccagcccataaaactaagctgaaacgcacttcggggggccaagtccctgctcctctgtgtcgggtatacatggacccaagctagagcttgcaaataaaccctcatgtgtttgcatcggtgtcagctccttggtggtttctgggattcgcaatcttgggcacaacagtgggtaaagtgttctatagatgtactcaagttggttgatagtactgctcagctactccatagctttactgactttctgtttaatttttctatcaaatactcaaaaatgagtgtagagcctccaaccataattttggacttttctttttctatcagcttttgtctctatatattgaaactgtcattaaatatacactaacttagaattgttatgtctttttggagaaataacccctttatcattaagggctccctctatccctcataatattccttgttctgacatctacgttttctgatattgacataattattccagttttctttggattttgtttacatggtataacttttacttttaatgtggctatgtggttatatgtggctataaatgggttacttataaacagatgatggtttgatcgcaccatttttattcattcccataacctatcattgaatatatgtttataccaagtatatttaatacaattattaaaatgattggattatttttgctaaatattttctattaattatattagatatgtgctcactttttaatcttttcctgcttacttttgggttagcagttgccgtacgatttactgcatataaatatagtctgtgttcaaattctaattcaagaacttagatcagtgtactctaaatttccctccccacttttttgtgcaactgttatcatatatgaagtggcaaaaaaaggcaaaagaaaaacttaaatttccttccttcctacagcccattgacaagttcttacaacagcccaagtgatcttcctccgggagctcagctacctgaatcaatgctgacactttgctaagggcaaaggcaaacttagcaaaccgccatttagcgctgaaaatgtcttaagaattctttcttggctgttggctccaaactctaacatttccacatcaatatactttactttttcatatcccataaaaacacaatgcattgctactatttttgctttacagagtctgttaccttatacaacaatgattcccccaagtgacatttgacgatgtctggagatactttctggtgtcacaactgggcggtaggctactgatatctatcgggcagagggcaggaatgttgctaaacagcctacagtgagcaggaaagattcctacaaaaagggattatccatataactgtaacaaaacctacaaacttacagttataaaataaataagtcatcggatataatgtatagcatggtgactacagttaatcatttattcattaactgtaaatagtaaacttagtattatcaatagttaacgatgtattattgacgtggagaacaatggcaaaagaaatgtagctaaaattaaatctccttataatttgcagcccattgacaaatacttgagggaggtagaataaaactctcctccaggactcccaatcctaatgttaatgccttctagagaaaaacaacatctccagcatgaggatagtcaggcttccaggatcttataagtcttctttaacatatgaaaatcctttttaaaacttcccttgtctttatctcccccaactccaaagtgtctagtcagtcactcctcccccttatgatgcagctctctctacccagaggtcctattcgatgtgatattcaaaaaaggttttttgcaccaaaaagtctcaagaatttttttttttttttttggtctttggttcctaaccttaccaacctcaaaccacagcattattaccaatgtattgatattatcaatattatcaagagttaactattaatagttaacaaataaatgtatatttgaagaagatatttgaaaatgacgtatcagataaagggctagtttccaagatctataaagaacttattaaactcaacaccaaagaaacaaacaatccaatcatgaaatgggcaaaagacatgaacagaaatctcacagaggaagacatagacatggccaacatgcacatgagaaaatgctctgcatcacttgccatcagggaaatacaaatcaaaaccacaatagataccacctcacaccagtgagaatggggaaaattaacaaggcaggaaaccacaaatgttggagaggatgcggagaaagggaaccctcttgcactgttggtgggaatgtgacctggtgcagctactctggaaaactgtgtggaggttcctcaaagagtcaaaaatagacctgccctacgacccagcaattgcactgcgggggatttaccccaaagatgcagatgcaattaaacgccgggacacctgcaccccaatgtttatagcagcaatgtccacaatagccgaactgtggaaggagccttggtgtccatcgaaagatgaatggataaagaagatgtggtttatgtatacaatggaatattcctcagccattagaaatgacaaatacccaccatttgcttcaacgtggatggaactggagggcattatgctgagtgaaatgagtgaatcggagaaggacaaacattatatggtctcattcatttggggaatataaataatagtgaaagaatagaagggaagggagaagaaatgggtaggaaatatcagaaagggagacagaacatgaagactcctaactctgggaaacgacctaggggtggtggaagggaggagggcagggggtggaggtgactgggtggcaggtactgagggggtgcacttgatgggatgagcactgggtgttattctgtatgttggcaaattgaaccccaataaaaaaataaatttattattaaaaaatgtatatttgaaagttgctaagagaatgaatcttaaaagttctcatcataagaaaagaatgtataattaggtatgctgatggacattaactagacttactgtggtgatcattccacaatgtatacaatatcaaatcattatgctatacaactgaagctaatataatgctatgtgtcaattatatatcggtaaaaaaaaataataatcctgctcaagataacaatagttctatggttgagaaacttttttttaatgagaaaagaaagaaaagatgatttttctacctaaccttgatttatgccttttccaatgcttttcacttctttgtatgaaccaggtttctgtctgatattaaatttctaacacatgaaggccttctgttatagaggtttgcaaaaattctgtggacttcaatcttcctgcatctcaaaggtaagaaggaatgcatgactctgaagtgcacagggtgaaagaagagactgaatgggttttgggttcattctctccaccttctctctctcttcagagcacactccttaaagccctctcaaatctatcatctctcagatgcatgacacatcttttcttttaatgagatggtgttttgtgcctgcctcaggctttccataaacaatgttgttggaatcaactcctggattcttaagaagatccaagatgtcctcagcaatacccaatgggaaactttgaaagagacaaggcttattacttacaaatcttggaaattacacagcacgcctggggccgtactgtgaagtcatgggtggggatggggaggagcaaacctaggtcctgcctttactgaagctgagagtaggagcccagaggtttgaaaatccgcttcaggttggtgaatttaaaacatcagaggagaaattaaggcataggaagagaaaaaatgaaggagcagggagtcagttacctaaatcgactagatctctaaaacaaacaaaataatcagagtggggcagttggctccttctctagtcttttggctggcagcctgttgattttaattagcctttgaagtagatgcttctttgaagtggatgcttccccaatcaggcaccattaggacaatcccattaccaaaaaaaaagaaaaccaatagccaaggtttatactacagatagttttagagaaatactctagtaaaaatatttgtaaccaattccattgttgtaaatacgattttataagataccactttgaagtatttttcaaaattccaaaatttacactcatagggattacttttcctcaatattgtcgattattagaacagtagaattctacttgtgctatcatctatatttttaaattctggttcaatcccaatttaaaactttcgaggcaaaatgttttaaatatatgtgctgacatctgatttttttaaatgtcatttaaaataaataattatatttaaaatttcatttgagtcatttgcatttgatttgctgagtaatgataagtatttctgtataatgaatgctcatgataaatgatatgacaaaaaaaaaaaggcaaaagaaataattaaatctccttattttctacagtccattcacaagtccttgaaacaggtaaagtgaccatcctgtgggagctaggtagcatagatgttgacactttgctaagacctaaaggcaatcttagcctgaccccgcagggtccagtgaatctactttaaagggcttctatgttaaaggaacttctcttcctttggaagctccctttatctgctcctaccaacaccatcccacctgcccagataatgttaggaatcatcctccaagcatataatccactgatatacgtggacctggagacgtggttgtggagaccacgaagggtctcctgactgaggattcactcaacagtagtaaatgacgttttcttaacaagaaccagtcccctcaagagtcgggaaagctgtttccaaatcccctggaggcttgtgctgtccctaaccccctcccaacttgaaatgatatcatccacactcctcaccaccccagtgcagctcctttctgcccatgggtcctgtccccgtgctttaataaaaatacctttctgcacacaagacatctcaagcattcttttctcgccatcttatcagaaccccacctcttcaaactacatcaataacctattacaataggagagttcttggaaagagaaccaatcaccgctggacctgaagaacgtcatctgtctctaggcaatcagtttctagcctcctgaattaagagcttccattcaaaaggcacttgtggattatagaccctagccctagcacacaggcctcatcaaatgacctattcagctgaactgaagagttcccttgagcaatagtgaaatctctgcccttggaagcaatgtttcaggtttttcagcaagtaaagagagaaagtaattagttcatacatacaggagttgttggtggcaaaggataggtggcagtgatattaaatgaaaaacagaaaaattatctttgcaatgtccatctgcttcattaatgtggtgcctaaattgagtgtctctccctcagatggggccctgaaatgtggtgcaacaacccagtggaagcctgtggctagggaggtgaaagaattcacctgaggcaaaagaaagaagaaagtttattgaatacaccacaagggagcagcagggggacctgctctcagaggagaggctaactgcaaggagcagagggtgggggcagtgttctaagggggatgaggaggaggtatggcaatctatggaactccccctattttggtaatggcgcctggttgtaagtagcccattggtcagttagagcctatggacactttgaggtgggtaccctgatggatctgtttgtattccatccctcaagcttgtttgcctaagaacagcctccaaaataaactctgtcatttgagaggccatgtgactggataatagtacacaggtctttgcatcagactgtgcttggtgaccataaggaagtcacttataattctcaaagtttctgtgctttcatctgtaaatcctaaaaggtttttggtgagaaaatatcatagcatctagtgcatgttggaattcaacagttcttagttcccatctcctttgagaaaggtatggggagaaactaaaatttagtgggtaaatgggtgggattcatttcatatgtggaagcacaagaactctcacatgcaaaatgtattgatgttttattctccaacaccagagaacatttgtgctaagttgaaaaaaatgatcctaaattctttgcagctcattctattaagaagtgtaacattcgggcgcctggggggctcagcgattgagtgtctgcctttggatgaagtcttgatcctggagtcctgggatccagtcacacttctggctcccctagaggagcctgcttctccctctgcctgtgtctctgcctctctctctgtgtctctcatgaataaaaaatacaatcttaaaaagaaaaaatatgcaacattaactcacctcttgaatgacatagctctgtgacttgttttgactactagaatgtaggggaagtggtgttgtgagtctaaatttaggctgaagaagccctgcagcttctctcttggactagggagtcttcccataccttgtgggtaagtgtaagccactctgctggatgatgagcccaaatggagtggcccagtagactgggctgaagcagttgatgccacagacatgtaaacacctgaagacaagggagctcacccaggacacagagtgccctgtgggcgtgacacaattttctgtcttacagaatcctgagaaaatactaaaacattatctgaaatcgttgcattttggagtagggtattatatagaaaaagctgactgatacaatatccttcaaagaaaattctatatcctagtgatctcttggtgctcccttgcttaacaggctctcacaaacctacactgccatagggggaagatgggatgatgagggaaaagctataagccatcgctggcctagaacgattaatctctgtcagtatacagttgtcatcatttgggagtattttccatgtgcacatactagagtgtatttaaaccttataatttgtacttctttataatttcatttcatcatataactatcacataatggttttcatcgcattttatagaaaagtacactaaagcttgtatattctgagtgacttacccaaggtgatacagctgataaagtcaaaagtagtttacaataaaagtaaacatttatttgatgaccaagtccaccttcttcttacttttgcttcactggacttggttgattgctgtgaggcatctctaattactgcaagacgggagaggctttggcctttgtagtacaattaaccgatgcataatgattgacattgtagcagggcaaaagagttgaaagtcagaactaaagaatttgaaaatacacaagtccttagaaaatgttatatatattaatgagaactaacctacattttgtctaaataatttcttagagggcacccaatgatgtaagttataatgactcttccatttatcttgacaattttaagttaaatcaatgcaggaaatagtgatttttgaggaaattatgagacaaagtaatattttaaactccatattttatttctaccatgaattaatttgtctttcagacagagctaagaagttagtttgtgtcaaaaatgacacatcattcttctgaatctaattctcgaataattttacctgatgtcaaaattatgacctgaagacagaagtgactggaacaggttcattgtgtgactgcaggaggaaatgagacacagagtctggttacaggcagagctcatcttcgcctagttaacgacatgggcttgcctgaacttctccatcccacaggatttgagatctgcagctagaccttggaacttcccgtccaagatgcaattctgatccacatgattagcaccctaacttcctaatctgagttaaattttctttaaagatgatactagtaggtaatattctggagccttgtcaagaatggttttgtccatctgtcacagtcttaagtaattttggcaaagaaatagcaaagtttcaagacagcgaaagtaaaaccaatgaatcaaggaagtagaaattagtagaaatttcttgtgcacaagtcaaaagacagtttgcacaccagaagtatttaaaccacaaggtgcaaggctcagggatagcttattataaggtagctatgtcatgagaaagcagtgactgcttaatcttcacaaggattggctacaatattcagttttcagtggttacctcatatcaaccatgggaaagagttcaatttcatttgtcctttccagaggctgaagcaagaaatgatccaattcaagatgaccttgcaaaataagctgaattactgttgtttgtacgattaaacttgtgccttccaaaggtacaagcaagacatgatcgggttcaagttagccttgcaaaataagccaaattaagcttcgtttgtaaaagttttgaggctggatgccatttgtttctgattttaacagtacagggcaggtaagtctggatccaagaagagcccagaaacatggtatctcctgcacagaaagaaggaggctgcatagtaaatgaagcatgcctcagtgaaacctcaaatcccgaatgatccataaaggcacagacttgaaagaataaatccaccgtagggtcaaatatctatcctaattatgttaggacctgtattctgaatccacacaggaaactccctcccctacaaagactcatgagtgacccttgtcattctgcagctctgcactcactagctgtgggaccgtgagcaaattccttcacctttctgaaactcaatatccttcttgtaacttgggggtgatattcatgtactacaggtatagtgggaaacccaggaatttttcattccaagtacagtatatatatatatatattcctcacagcgctcagatgagatgctgtcaatgcctccagccaaagaccatcaggagcacacctgagaatgaacaagttggtttaattgttcattgtcatgagggagaaaattcaccatggagaaaaacggggctctcaggctcatctctgctttttttttttttttatcctaattaaagtctgtttcatgcccagcatggagtccaaaacggggcttgatttcacaaccctgagatcaagacctgagctaagatcaagagccagacgtttaatccactgagccatctgggtgcccacatctctgttcttaagactttacaactggttggtttggagtcatccagattatctaggaagacctcccttgctttacatcaactatttattttaatcacatctacaaaatattttcagagcaattacaacattaatgtgtgattgaataactgaggactatagcttatcaacacatgaaaccaacaatttgactgctgtaaggtttgggtttgtgttaggtgattttgaggagaatataagatagagggactctgctcttagttggttgtcaggcaggaggattgcttggtctttttgtggcctggacaatatttgtattttgtctatgttcagacatagttactgactggccttgtttctctttatccatcatggtcgtcacagagtggcttacactgctgttctatgacatttttatgttcaccaggaaaacaccagaacccggctgtgggtagcacacctggttactagtaccaagtagctcccagatgccagagcttttcctgtcccagtcttcctatcatgtctgtcaatacagggtatgatagagtactgagcaatagaaggccatccaacaggcacaaagtgattgattctaagtggaagcccctagtatcttgtagcttccatacctctcagaagaagagaggtattcctctctattccatatttctcagaagaaaatcggttcttctggaaaaagaaggactaaggactgcctttgtcttcagctcaattcctagtccctcacaattatctggaatacgtagcaggataaagaatatgaaaacttccaggatgtcagggaaggaaatcaatttctaaatcacagcagttcccctcattctaccctcaacatttgacttacattcttaaatgtaaaaaaaaaaaaaaaaaaattgaaaacttaaaaataatacagtgaagcagctgaagcagtctttaatgcaatcaatgtccccaacttgcctttaaatgtaggcaggcaacactgaaacacagagcacaaagaacgctcagggtagggaaaccatgacagtgaaaaatgatgcaattactgtaggcagcattaatgaccttatgagttcttttatcgtcccagatgcaaatactggagcttttgagaccataagaggaatttaacaggaattacatatgtagtaaagcaaaggtaatccttggttaccatcagaagaaatatcctggtagataaatcaaaatttggaaaattttatatgcactatggaagcaaaaaaaaaattacatgtggaggccaggaaaagggaaggagttaaggattgccaaggaggggaatcaatttataggagaatttttggaggctgtaacccagaagagcctgaagaaaaccatgtaagtgattatgttatctatacatgaggctactcagaaattccgcccctcttgttgccaccaacaagcatacacatccatagaaagattgattgagtgagcctcctcctgtcctaggtaattcccccaggtccactctccatgcaggctacctcagaacaaggggatttcccagtatcttctggcttcttagtacaaactcttcaactggcaacagcagtgtcaccataaggcatttttctgattggccagaacctgacctggcaggttttggtttgggtgtctttagattcccctttctgttgggtcctcaccctagttctacaattcagaacagcaagtgtggagaccgcacggagaagaggatgatcctaaacagagttctgattctggggaccctcatcctgactattatgatgagcccctctggaggtgaagagattgtgggtgagtgcacacctgagggatatggggactagactagggaaaaggaattggaaggggaaaaagagagaatggcataaaatagtggagactcctcaaaggtgttctcaatattaagcaattctaaaatttttaatcattcttccttcaggaaactagagacccaacccactgtctttgctccctgtgatgttgcagagttcatcaaggatattattccatttctaatctcagatccagtgaatataggctagagagcttgatggcattcattcatgattaccttaaagtatagggatgtttccatgttttgttttgttactaaaaccaaatttgttttgttactaaaaagtcatgaactattgctcccaaatgtttctgaaaacattttgaaactttctacatgttttttctatagtcttacttggggtaaaaagtttcatgaattatgtatactatgtagatataaggaagggtatcctcttctttgactcaaatttacacacattttcatgctgggaactggcatgaggggagtgggtatacaagcccagctgaatacctttagacaagtcattcaaccacatgacctcatatatgtcattcaggaataataattaaatcaaatatgtatttagaaatatttttccaataatgtaaacatatccatgtcaatgatcatacttgtttcttaactgtttctattacaggtgtgagttaattttttaatttaatttaattctaggatggttaacctatacgtttctagtgtacagtatagtgattcaacaattctatacattactcagtgctcatcaagataaatgtactttttttcttttaaagatttttatttatttatgagaaacacagagagagaggcagagacatagacagagggagaagcaggctccctgtggggagcctgatgcaagactcaatctcaggaccccaagattatgatctgagctgaaggcagacgctcaaccaatgagccaccacccatgtgcctccaagataaatgtattcttaatcccctaacctgtttcagccatgccccccagtcacttatcctccggtaaacaacagtttgttccctacaattaagagtgtatttttgtttcttttgtttctttgtttctttgttttctttcttaaattccacacatcactgaaattatgatagttgtctttctctgaatgtttatttcgcttaccattacacgctctagctcctaccacattgtgcaaaaggcaagatttcattctttttatgactgaaaaatattccattgtacatatatatcatatcttctacaaagagtaggtttgtaacaatcaaagtagaaaaaccaagcagccttaagaggggaagtgaaatggagcatactctaattttcaacatctttgttagccatgagtgttcccatcctaatttaatttggtcagggaagtttgcctcactttgccagagaacttctaatttccttcttcaacatcatgccagaacatcttggtcaggctcaacttatccagtaagcacagtgccaagggcctatgatgcttctagggcaccataaaatgttttagtttcttctaaaattagaagaaatgaacttatgaggtagaggaaaatgttttaatttttaattcaacctggattatatttatctttataccaatgcagtcacaaagtgtgatttctaatattttatgaggaaagggacccaatagtgattaggctcacgagtcatacgacagccttgaccactgctgattaagttccgtatggtttgactagctctgtgtctatcaacctccactcacccaaatgtctgtgatctttgagaatagcaattgatattcaatacacacttttgagcaaacagtgagattaattttggggattcaaagatgaaggaaagcagaaggaatatcgctgagcagaactatggacccagctgaggctgaaaatacagaagtgaatcagttccagtcagccatgtagtgtgatgttcatcaacaaatggtgccttggacaagcaccaaatggaaagaataattgcatatactcatgtttgaaaaaggaaccaagggaaccaaggataaaggctagaggatgcagagggtttgatggagggcctttaagtaatcaccaaggaggggggcgggtcatgctgggcaaggaagagagttggatgaggcatagataaatctggaaagcaagacattgggatggaggcgttggaggttatagtgaagccaaaaaaatgttcaatgagactaattaactgaaatgttgctaaccaaacagaaacttccaaaaggaattggaggtacccaggaagtctgaaaagatagctttgtttcaaggagacacacccctaaaaaggccaaggaacatacaagaagaatgtgctttggtttgactggcagatgagatatttgcagaggaagtgggagcataagactgctgctgttccctgcaggactcaccacagcgtactgtatttgttcctgtactcacttgactctcccaccacgcaataaactccttgaagacagaaaccatgctgatgggtgtttgactccctgctcctcatgatgtctgacatcttgctgatgttcagtaaatgaggaagagcataaggaggaaatgataaaaaagctcacatatctctttacaaaattttctagttaggctcaccgggtggagtcatactgctgccattctactttggcatccttgcaaaatgtactgtccatttgaagagaagggccacagtttaccaggagtcctaaagtgatagaaatgcaactcagaattaggttagggggttacaagggaaaaaaaccccacgagggatggggagtgacagaaatctaaaatctaatgaatgttccattttgtacttctgatgaatcaagtgctcccctctgaggattaccattgttaacaagagaacttggtggctcctgggtggctccattggttaagtgtctgcctttggctcaggtcatgatcccagagtcctgggacagagccccaagttgggctacctgtggggagcatgtttcttcctttccctctgctgcctcctctgcttatgctctctccctctgtcaaataaataaataaaatcttttttaaaaaggaaccagagaccttaggagtattgtttattttttataaactttttaacaccgttgctgtccttgtcatactctttcttataccctaaaatagttaagaaactcttttagaagaatacaatccttcgtgctttttttgacaaaataagaagaagcagaagaaggcgcaggagagaggaggaagaaggaaggaaggaagcattacctctgcagaaaatattctgctctgaaccagtcctggggggagagcaatcaatgtatgtgttattaactgatgaaggaattaagagataaaactgatgaagcagagagaagttaagtgaatttctgataaaggaagctatagccatgataatttattcattccttctttcatttcattgtaatatttatcataagtctactgcgtaccaggtgctgagctacacacacgggaagagcagcagcaagactgttgtaattgtgctctcacggagcatacacgatagtggaaaagcagagcgtattctgactggacaactaccaacacggagagagagggggcaggtgctgggaaacgtgcctaaagactgtgccaaggatgaagctcgtaatatttgtttgcccacagtttgttctgtcacttggttgaataaggttcttttctccctctgttttctgcttcctgctcctcacccctgctgctcagctgaccatgttgcctactacggcataaatgtctaccagtcttacggtccctctggccagtacacccatgaatttgatggcgatgaggagttctacgtggacctggagaagaaggaaactgtctggcggctgcctgtgtttagcacatttacaagttttgacccacagggtgcactgagaaacttggctataacaaaacaaaacttgaacatcatgactaaaaggtccaacaaaactgctgctaccaatggtatgtgtctaccattctgcctctcttcactgaatctgtccccacatcccagctctctttcccttcctccctagcatagatactcttcactgttttccaaggatatttccccagatcttctcatagtaattactgaaccctcatcctcccccatctgaaaactgaaatattgccatgtaatgcaagaatccttactcccataccatgttccttgaatccctcaaggagacgccctgtggatatgctactttaataagcacacctgcatagagaagggctcgggggtaaagtataggcagtgcatatacagcattcccaagcagaaggtaagcaagaacccttccaccacagcatggagaactgttgctgcgagggctcctctaggacacaatgcagagcctcaaggcagagttattgcaattcatgtcagtgctgcttcctcaccgcagaggttcctgaggtgactgtgttttccaagtctcctgtgatgctgggtcagcccaacaccctcatctgtctcgtggacaacatctttcctcctgtgatcaatgtcacgtggttgaagaataggcactccgtcacagaaggggtttctgaaaccagcttccttgccaaaggggatcattccttctcaaagatcagttacctcaccttcctaccttctgctgaggatatttatgactgcaaagtggagcactggggcctggatgagccacttctgaaacactggggtatgtatgaattccacctcctgtggtgccttcttttctttgtcaagtccaaaatatcctgcctttcagccccggagtctcaaggctcaaagcatgtttatgacacttcagggtttctaataacagagttcactctcttccctaagcctggtgccctgagacttcatagacccaacagcaccatcaccctcctcaaccccccactccatctcacacctgtacttgaaccaacactgtattctgactttcacaacctcattttcacagaacctgaggttccaacccctatgtcagagctgacagagactgtggtctgtgccctggggttggctgtgggccttgtgggcatcgtgatgggcaccgtcttcattatccaaggcctgcgctcaggtggtacttccagacatcaaggacctttgtgagctgcaccctagaaaggaaggtaaggattcagatttgtcagagctgagagttggagacacagtccaggaggatggaaagtgggaggagtttgtggacccaaatgtggttggaaggttataggagaattgggagaggggatgatgacagcacagcagccccctaaaatccaaccatctatgtctgtcctattgcaggtgcactgcatgcccacctcccagagcagaagagtggacctgataggccacctagcactatttccttgcccagttcatcatactcctactctctaccaatgcttctctgtcacctcttctctgggactcaagaactatatcctctgagcgctaaccctttaaattctaccccttccttgactgcctgtttttgtttgtttgttttcttttcttttctcaattgtcaactacaatgagatctctgggatatcccaaccagttacctgatccctcattactctgatctagcattcccatggaaataataattttctctttaagagatcctttagatcaatttttcctgtctttcatctcagggctgattaggactttggtccccgcttttattataccttcctaatctcactttccatattatgtttcatgcccagcaacaccagaaaatgcaggtataggctgataatattttgatatcttaggtaaggataatggttctctcttcctgttattctcatgtttgggtactgtcacactcccccaattcagacaccaagaaaagtaatataagccctctgaccttggtgtaaatttggtatagaagaaatacaaagccaagaaataagttcatacttcttttaacataattttagaaagctatgacagagaaataagttaagataaagaaattttgaatttcaaaagtaccaaaagacaaattgttttccaaaactttaaaatttcaatttgtgaagaatgaatgatgataggagaagctttcctctcccatcctcacccatgagaagataagaattctttaggcaggaaaataaatggaagtcgggtaagagagcattagaataagaccataaagtaagtacctgaggacaggtacttagggacagcaacaacaggatgagaaagggagtagaaatcatagacatggttaagtttcttagaacacaggtgtagtttgcctcacctcttacatgaatctcttctagataagcacgtagactttcctgtgccgtggtggcatatcagggatagtagagtgagtatatctgcaggatgtttctaggcagatcatcttaggtcaagctcactgaatccctgtgtatccctgtgcatccctgggcacccaaggaaactgcacaacaccccaataactccagtcccgtgccctacccctcatccctcttgtatttggaaagaatgaatctatgagagagaaaggccagcagggacaacatagtggagataatgtactggcagctatggatgctgtattctcttctagattcattgtcttctagtggaaacttgcagaggaaatggatcaacagatggaattttctggtgttcttgagttgtctaaagcttcactcggaaagtgtatgtgacttgactcggagtcattttccctttgaaattattttaggcacatattggccttagtcttttcactctgcaagtactgtgtccatacatggtgtctaaggcaatattatggaacagctgtaaaatgtatgaggctgtccctggccacaccacctgtatcagtgaatttaaagtgtaattgggagaaaaaaaagacaattttaacacaatagttgacatagtagagtttgatgaaaagaaacttaaatccaaattcaggattcagcactttatagctaatattttaaacattttaacactgcgcatatgtattctgagactcatctttctcatccattctctggaagtaataatactttccttgcagttattgacagaatttgaataatcttgattacacataatatggaaatacataagaaaacattgctatttgtatctgtattattaaaaagaattgattatatcatattaaaagcacttctctttttctgagtccattaatgatttagaagattcaaaaatggagctgtgaatgaatttcttttcataagttaaagagaggattttgttttccccagcaacttagagactctgagattggcttaggctaagagaatatagggtatagcagtcagcgacatgtcactagtggaagattgctaagagaattcttagaacagtaagtcgtaagaatttgacttgaggtttttaagaccaaagatatgctatattgtaacagaccttatgcatatttactttggggataattcaaggatcaagagttacctgtgaggtagaagtaagagaataattaacaatggagactaggaactagtaaatttagggaatctgacccagaagttatcaagaaaatgtaggtaacagaacacagaggaggtcaggccagtgaaactactctgcattgtattataatggtaggtacatgccattacacgtttgttcaaacccacaaaatgtacaccaagagtgaaccctaatggaaactatggactttggtgataataatctatcaaaatagtgtcatcaattgtaataaatgtaccactctggtaagggatgctgatagtaggggaggctgtacctggtggggacacggatatatgggaaatctctgtaccttccactcaattttgctgtgaaccttaaattgctttaaaataaactgtattgggatccctgggtggcgcagcggtttagcgcctgcctttggcccagggcgcgatcctggagacccgggatcgaatcccacgtcgggctcccggtgcatggagcctgcttctccctctgcctatgtctctgcctctctctctctctctctctctctctctgtgtgactatcataaataaataaaaattttaaaaaaataaaataaactgtattaaaagaatgtcagcaattatgatgtcaaaggtataaaataaaaattttagtataaaaaatgtaatcatctgaaaatgcactaatgtactcagggagagtttttggcaataggctgtcaaataaatgttatataaatctcaaggaatcgtgagatgggaactcaggaatttgggtaaaggtgtgtgtgtgtgtgtgtgtgtgtgtgtgtgtgtgcattattgtactataaggtgtatactgaatcccattatgaccagtgccctaggaatacacaaatactgacttactcagactccttctcaatgaaatactgaggaaaacaaatttaatggaagatgcattttattaagggacttgcttcatttgtaagacttcatataattttaaaatagaatttatattaattctaacaacaagcacaatcatttcgatattagctaaaagttaaaagtgagatcatcacatgacattactgtaaacaaagatatcaatcttcatgatactaaattatgtgattttaaaaattatttgagttattttaattatttctgattgtgtgcataaattgtgactattaatatttaatatcatactatttaaaaatacataattagaaaatccttttattcagcaaatcatttgcagggaaaataaagaacagataaaattcatattaaaaaaattaagatacatatcaaccaaatgttaggttttgtttggatgcatattcaaataaaagaactgttaaaaaattcttgtgaaacaatcacaaaaattgaactctgactctattaagaaatttttaatctaattttgggtgtgataatggcaatgttatgtttccaaaaagtcattaaattttagatttcataataacatattcatcgataaaatgatatgatttataagaatatcatcaaactaatcgagtatatgtgtaaaattaagtgggtaggtttacaaaattatccatgaattaataattattaaaggtagactgttgatacttggcactattctctctaccactacatattgttgaaattttccatgataaaaagggtttcttttaagtatcccaggaaagacaaagaaaaaactaggttgaaaagcattctgtttgaagttaacattcgtttttaaggttttcctcattttttatccgtaggaagccatgagtatccaaaacttgctccacaccatgaacctctcagaaatgtaaccctaaagaatacatatgtcacaaggataatattgaaggaaagcaaagtaatactctctttatcttgactggactaagccccaaacatggctaatatatacactaatttaattaataatgcaaaaataaaaatggttattgaataccagtgttgtgacacataccatactacattctgagtgtattaaattgatatgaaaacagatatgttcatcgtcttcacagactttacattctagtaggaagaaaaatgcatatacaaaatagttccacaaatatataataacaaactctgaagaatttataaaggaaatgaacaaggtaacacataaccattgcacaggaattaagcagttggtggagattagaggtggcttgaacaaatgtatgagatgaaatagatattgtatagtatgtaaagcaaataaataaataaataaataatcctgtaaaaatagaaataatggacttgagctataccttagaccaaatggacctcatggacattttaatgacctgaatagacatttttccaagaaaagcattcaaatggccaacagctaacatgaaaacatactcaacatcattaatcattaaggaaatgcaaatgtaaaccacaatgagacatcacctcatacctgttagaatggctatcaccaagaaagtaagaaataacaagtgttggcaagcatatggaaaaaagggaacccttacacactgtttttcagaaagtaaattggctcaaccaaataatatggaggctcctcaaaaaactgagataactgcaccttcatatccactgcaactttacatactgtagccaagacatggaaacgttttaagtccccactgatgatgaagggataaagcaaatgttacaccaacacacaccacaaaatggaataccagtcggtcataaaaaagaatgaaatcttgccatttgtgacaatacaaatagaccttaaaggttctatgctaaatgaaataagtcagacagagaaagacaaataccatacattttcacttgtatgtggaacctaaaaaacaaaacaaattagaaaacaaaaccagactcctaaatacagaaaacacactgatggttgccagaagagagaggggttcggtgttgggcaaaatggatgaaagtatcaagaagcataaacttcagttttattttatttttttaagattttatttatttattcatagaaacacagagagagagagagagagaggcagagacaccggcagagggagaagcaggctccatgcagggagcctgacatgggacttgatctgtggtctccaggatcacacctcaggctgcaggcagctctaaaccgctgcgccacgggggcggcccaaacttcagttttaaaataaataaaccatggggatgtaatgtatagcacagggaatagacaatactactgtattaactttggtgacaaatggtaactagacttattacagagatcatttcataatgcatatgaatgttgtacacctgaaactcatataatattgtgtgtcaattatacttcgattaattttgtgtggtgacagatgttaagtaggcttattgtagtaatcatttcacaagatatacaaatatcaaaccatgtgtacacctgaaaataatatagcgctatatgtcaattatacctcaataaaaaagaaataactgttttcacttttaatgaataggtcttggcaacaatttcttgggtataaaatcatagccaaagggaaaaaaaaagaaagaaaaaaaacaaaaccaaaaaaacccaaataaacaaaaataaatataactacatcaaatttaaaacttctgtacagccaaacgattagccaaatgcaaaggcaacctgtggaataagaaaaaaacatattttgtaaaccatctatctcacaagtggttaatataaagttactcatataaatcaagaattaagaaaacaaactgatttaaaaagggacagaggaggacttcagggaagagagcagagtagctggaccctaagttcacctcatcccatggatacaactagataaaatcaacatcagtgtaaataccccagaaaaccacccaaagactggcagaacagactctccacagctaaatggaaggaagaggtcacaaccaagaaggaaaggagggcagagatgggtcaggaattaaagtacctatacaactgtccacaagagagggctgctgtggcctcagagaggggtaagaaggaggccttcacaccaggcaggtggaacccacacaggaaagacaaacccctataacatttgactttgaaaactagaacaacacaattttgccagttcttacaatcaatagggcctaacatctgggtctttaaaaatcatcaggcttgactcccggggagcctgggagccggagggcaatagaaaattgagtccctgcctttaaagagataacacaacaaacaatcccatggagatacagcatgcaagcagcagtttgaaaaccaccaggggtgaggggtggtggggttggatggtggtagtgtacactggagggagttttgtttactaatctcagagcatgtgttggagtggcagggatctttgagaggcttctttaagaacaaaagagctggtaggttccatttgcatcccttatccccatcctagacacacagacacttgcaggaaccagggcagcaacaacacgttctacctaacttgctaacagtgcaccccactccccacattctcctacaaacatacccacttcaacccgatctcagctccaggagctgtctcacatcagacctatacaaaccttgataacacctcatgccctgccagacttctcctgtggatctgcctctacaatacctctggccagagcccatccaaaggtgtgccacaggcctggcagggtgcggcagccctaaaaggagccagcacaactccaaagtggctcctgcctggggaagaggggaaaggaagatcactgcatagatgagtccaactacagccccagcaaccagctgagggcagacatctggtctgactgcaggccccacccaagagtgaaagcttctcaaaagacaacacagagaaagcaaccagcagttcagtgttaccctatctctggcaaacacctggtctgattcaattcaggctcagtgcagtcccagattgcctcattaacacaaggacaaaaccctgcctccatcagggaaagagagccattgcagacagctgaactgaagtcgaatgtggctcagcaacaacagtaggggacatgcaacgtataggagacaaccctgaagcaccaggttctggtgaacaggggacattggactacagggcaccacaggacctctccttcataaagccactaatttcaagagcaggagattagctgacattccaaacacatagaaagagaccgagggagttggacataatgaagaaacaaaggaatgtgtctcaaatgaaaagaataggacagggaccctgggtggctcagtggttgagcatctgcctttggctcagggcgtgatcatgcaggcctggggcctagttccatattgggctccccacaagaacctgcttctccctctgcctatgcctctgcctctctctctctctgtgtctctcatgaataaataaataaaatcttttcaaaaaattaaaagaacaggactaaatcataggaaaagaattcaaccaaaaggggaaaattaatatgcctaatagacaatttaaagtaacggtcataaagatattcaacgcactcgagaaaagagtggaggacctcagtgagatccttaatgaaaagatagacttgaggaaggtggcagagtagggggaccctgagttctccctgtcccatgtttgtcaccgattatcatccacacccaagtcagtaagccagagagtgatctgaagactggtagagcaaactccacaactataaatagagaagtttcatctgaaagttaacccttcagctcagaattgtcgaaggaggctacctacaagaaggagggggctgcacacaaggagagggctgagaaagaggccctcacaccaggaagctccacagggaagattaatcctcataaaagctggccttaataaccagatgggctgaattctgtgagtttttaaaaccagtgagacctggggcctggaactttaaaagtcagctgacccagcactgggtgagctggaggggtgagtgatagcaggatcactgcctttaacaagacagcaaccattttcacaatatttagtctttcaatccatgagcatggaacatttttccatcccttggtgtcttccccagtttcgttcacaagtgttctgtggtttttatagtacagatgctttacctcattggttaagttttttcctaggtatcttttggtttctcgtgcaatattgtgaaaatgtctctgctacccagagcaatctacacattcaatacaattcttatcaaaataccatggactttcttcacagagttggaacaaataatcctgagatttgtatagaaccagaaaagaccccaagtagccaaaggaatgttgaagaagaaaaccaaagctgacggtatcataatactatattaccaagctgtaatcatcaatacagcatggtactgacacaaaaacagacatatagatcaatggaacagaataaagaatctagaaatggaccctcaactcgatggtcaactcgtcttcaacaaagcaggaaaggctatccactggaataaagacagtctcttcaataaatggtgttgggaattggacagccatgtccaaaagaatgaaaccagactgttctcttatactatacacaaaaataaactcaaaatagatgaaagacctaaatgtgagacaggatccatcaaaatcctagtttttccttttgaccttggccacaacaactttatgcaagacatgtccgttaaaggcaagggaaacaaaagcactaatgaacttttaggacttcatcaagataaaaagctcctgcacagcaaaggaaagagtcaacaaaactaaaagacaacctacagaatgggagaggatatttgtacatgacatatcagataaagggctagtatccaagatctgtaaagaacatatgcaactttacatccaagaaacaaacaatccagtcttgaaatgggcagaagacatgaacagacatttctccaaagaagacctacacatgggcaacacattaaaaagtgttccacctcacttgccatcagggaatacaaatccatacctctttataccagtgagaaaggctaaaagtaacaggacagaaaacaacaaatattggggaggatgtgggcaccctcttacactgctggtgggaatgcaagctggtgcagccactctgggaaacagtgtggaggtctctcaagaaattaagaatagagctaccctaggacctagcaattatactactgggtatttcccccaaagatacagagatagggaaaccatgggacacctgcaccccagggttcatagcagcaatgtccacaatagccaaactgtggaaggaggtatgatgtccatcgacagatgaatgcatagagaagatgtggtctatagatacaatggaatattactcagccctcagaaaagacgaatacccaccatttacatcaacatggatggaactggaggccattatgctgagtgaaataggtcaattggagaaagacaactatcatatggttttactcatatgtggaatataagaaatagtgaaagggaccatgagggaaaggagggaaactgggtggggaaaaattagagagggagacaaaccatgagagactcctgactctgggaaacaaagggttctgaaggggaggtgggagggaggatggggtaactggctgatgggcattaaggaggacacacgataggatgagcactgggagttccactatatgttggcaaattgactttaaatttaaaacatgaagccaaaaatatatttaataaaaatactcaaattttgaccttctaaaaaaaaagacagcagcctgcacagaggcaacataaaaagggcagttgacacaggatgggggcaaacaggggagagatctgttcatagtgactttagagcatgttaggggacttctctgaaagaggagctggcagtcaccagtttctcacccatcctgccagcataaacacagagccacctgcagcaagtggcactgcgcagacatttgctacctaacctattagcagtgtgccaggcccacgggttctgaggacttgccactccaagcccactagcctcagccctaagctcagggcaaatttggttaaagcctcactgcacccttccaagctgcaggatgcacagccttggcagagtgcacgctgccaccacacactgtggccagccactccacagcacccaggcactgagcagcacccagccaccactgagtgctgtgcatagctcccaccttgcactgagaccagcttcatgcccccaaccatcatcctgtgctaggccctgccgaacccagccatacccagcctcagtcccctggctaccccagcatgtagtccccaaccacggcagtgcttcagtggatctggcttaagactcgtgtcccagtaaaaattttgctaacacctccatcctgtgcccaaatttcctggcagacacagccctcagagctgggcacttgggttccactagcaccacaaagagcaagcacagcgcaatagacagagagccagtgcagacaatgcactgaaaggaaaagtgactcagacacaacacacaaggacactgtcctgaagtgttaggttcccataaactggagacactatactgtaggccactgcaagacctctccttcataaagtcactactttccagaacagaagacagagctgactttcttaacacagaaacagacatagagaggcagattaaatgaggagacaaagaaatttatccaaaatgaaaggacagaggagctaagattgcagcactttaggggaccctagacttgtctcatccctcgaactagttgattatcaaatcaatccaaataccccagaaatcaacctgaagactgacagaaccattttcacaactacaggaatagaagaagccacactgaggacggtaggaagtacagagcagtggtttgggggagaaacagatcaaggggctgcagagaggaggaagtcatggtcacagagaaaggcaagagagagcagcacatcggggaatgtgcaaggagaacacttccccccaagccactggctgggaaaatgaggtgggggggggggggcaggatttcaggagttcttgcaaccagcaagacttaaggactggagttttaaaggtcagggggtgatctgaagaatgcttgggagacgtgaggggtggagagaggagagattattccctcttcttagggctggtccctgacaggcagagttcagggagatgcctctctggggacaaaggagctggctagtgccattaccctcctccacccctcatcataaacacagagcagcctgtggaaggtagcttagccccgaactatcttcctaacctgcttacaccaagtgccacacctctgcactccagcacaatggccaatttccatcaagctcagcatgccccttccccagaagaccagcagaaactctagtccacaccatgtcttccaatagaaggttccgcaaggcttcagttctaatggaagtagtatcaagtctcatttaacaagcagaccagagcatgcccacttaaaatttgccaattctggtcaagaaccaaacagcacacactgcaggaaaggatggcctctgcagagaattatcctgaagaatggagcagccaaaatagaacggctgagcgcatgcagcacacacaagacacattccctgaaatcccaggcactggacgctatatgatctcttcttcatgacacattactctcaggagcaggaaatttagcaggcttttcttttttttcttttctttttttttttttttttttttttttatttacttattcatgagagacagagagaagcagagacacaggcagagggacaagcaggttccctacagggagcctgatgtaagactcactctctggacccgggatcacaccctgagccaaaggcagatgctcaactgctgagccacccaggtatcccttaccaggcttttctaacacagagaagaaggtagagacatagacaaaatgctaagatggaggaattcttcccaagtgaaagaataagagatccaagttaaacagatataagtaacatgcctgatggagaatttaaaacaacaatcataaggatactcactgagcttgagaaaagtatgaaagacttcacagaggcccttactacaaaaataaaagagttaaaatagcatcagtcagaaatgaaaaatgcaataaccgagattggaaacagactggataccatgaatacaaggctggaagaaacagaggaatgaataactgatatagaacacaaaataatgggaaataacgaagctgaacaaaagagagaaagaattatggaacacaacagacttagggaactcagtgacttcatgaaatgtaataacatttgtatcataggcatcccagaagaagaagagagagaagagagtgcagaaaatttatgtgaggaaataatagctgaaaatttctctaatcctgggaaggaagcagatatccagatccacgaggcacagtgaactcccaccaaaatcaacaaaagcaggttaacaccaagacatattgtaattaaatttgcaaaatacaaaactaaagaaaaacttctaaaagcagcaaaagtccttaacttacaagggacgacccataaggttagatacaaatttctcaacagaaatatagcaagccaggagggcatagcataatatatcaacatgctgaatgggaaaaatctgatgccaagagtactctatctagcaaggctatcattcagaatagaagagataaagtgtttcccaaacaaatattaatggagtcatgagcaccaaaccaccccaggaagaaatattaaaggggaatctctgagtggaaaggaaagaacaaaagtgacaaagacaacaaaggaacagagaaaagctgcagaaataatgacaaaacaagtaataaaatggcactaaatacaatctatcaataattactctgaatgtaaatggactaaatgctccagttaaagacacagggagtcagaatggataaaaaacaaaaacaaaaaccccactctcctatgtgctggctacaagatactcattttatacctaaacacaactgcagattaaaaatgaggggattggggatccctgagtggctcagaggtttagcgcttgcctttggcccagggcgcgatcctggagtcatgggatcgagtcccgcatcaggctcccggcatggagcctgcttctccctcctctgtgtctctgcctctctctctctctctgtgtgtgtgtgtgtgtgtgtgtgtgtgtgtctatcataaataaataaataaatcttaaaaaaaaaaatgaggggatggagaaacatttagaaacatttatcacacaaatgcttgtcaaaagaaagccagaatagcaatacttatattggacaaatgagactttaaaacaaatcctgtaacaagacatgaagaaaatattatgatattatatatcataataaagtagatactccaataaaaagacataacaattgaaaatatttatgcagccaatatgggagcacctagataaataaaataatgaataacaaacaaaggaattcattggtaataatacaataatagtaggggactaaaacacttcagttacatcactggacagattatttaagcagaaaatcaacaaggaggggtgcttgggtggctcagtttcttaatggctgccttaggctctgatagtgatcccagagtcctggaatcgagcccttattgggctccatgctcagcgctaagcaaggagactgcttctccctttccctccaccagctgttccccctacttgtgctttccctctctctctctctctctctctatctctatctctatctctctttgtcaaacaaataaaatccttttttagaaaaaagaagaaaagaaaatcaacaaggaaacaatgactttgaatgacacactggaccagatgaactttttttttaagtttttatttatttattcacgagagacacacagagaggcagagatacaggcagacagagaagcaggctccatgcagggaacctgaagtgggactccatcccaagactccaggatcatggcctgggccgaaggcaggtgctgaactgctgagccacccaggcatccctggaccagatgaatttaacagatatatttggaacatccatcttaaagtagcagaatgcacattcttttcaaggacagtctccagaacagtcacatactaggtcacagatcaggcctcaataagacaaaaagactgagatcatactgtacatattttctgaccacaatattatgaaacttaaaggcaatcccaagaaagaaattcatagaggttaaacaaaatgctactaaacaatgaatgggtaagtcaagaaatcaaagaagaaataaaaaatacttggaaacaaatgaaaatgaaagcacactggtctcaacctttgggatagggcaaaagtggacctaagagggaagtatatagcaatacaggcttaccttaagaaacaagaaaagtcttaaataaacaaactaatcttacactgaaaggagcctacagctacaggaaaaagaacaacacacaaagcctaaagcagaagaaaggaaataataaatatttgagcagaaataagtgatacagaaactaaaacaaacaaacaaacaatagagcagatcaatgaaaccaggagctggatctttgaaaaacttcatcaaattgataaatccctaaccagacttatcaataaagaaaagagaagggatccaaataaataaaatcaacatcgaaagaggaaagatcacaaccaataccacagaaatacaaacaattttaagaagttattatgaaaaactatatgccaacaaattgaaaacctggaagaaatggaaacattcctagaaacatagaaactaccaaaactgaaatgggaagaaatagaaaacttcaaaagaccaataaccagcagagatactgaatcagtaataaaaaaaagttttccaacaaacaaaaggccagggccagatggcttcccaggagaatcctaccaaacatttagagaagaattaatatccactcttcccacatttttccaaaaaagaaatgggaggaagacttcaaattcattctgtgaagccaactaccttgattctgaaaccagataaagactccagtaagagagagaactatagtctaatattcctgataaacctggataaaaatttttcagtaaaaaaattcaataaaacactagcaaaccaaatccaacagtatattcaccatgctagagtgagatctatttctgggctgcaaggctggttcaatattcacaaatcaatcatcatgatacactacattaataaaagagaagggatgcttggggggctcagcagttgagcggctgcctttacctcagggtgtgatcccagtccaggatcgagtcccacattgggctccctgtaaggagtctgcttctccttctgcctatgtctctgtctctctctctgtgtgtgtctctcatgaataaataagtagaatctttaaaaaaaaaacaaaagagaatataagaaatatatgaccttctcgatagatacagagaaagcatttaataagtatgacatccacacatgataaaaaaaaaaaaccctcaccacagtcgggtcagtgggaacatacctcaacataataaaggccatagacaaaaaccccacgtttaatataatcttcaatgatgtttcttgtcagaaataagacaaggatgtccgctctcaccactgttgttcaacatagtactagaagtcctaacctcagcaatcagacaacaaaaagaaataaaggcatccaattcacctagggagaaatcaaacttttactatttgcagatgacatgatattctatatagaaaacacaaaggactccagcaaaaataagaagtttctgcacagcaaaggaaactatccacaaaactaagaggcagcctaagcagtgggagaagatatttgcaaatgacatatctgataaggaattagtatccaaaatccataaagaacttacaaactgaaccctcaaaacacaaataacccagttcaaaaaagagaagtcatgcatagacgtttttccaaagaagatatccagatggtgaacagacacatgaaaaaatgctcaatatcacttgccatcagggaaatataagtcaaaaccacaatgagatcccacctcacaagagtcaaaatggctgcaattaacaacataaacaaaaaatattggcacacttggggagaagcgggaactctcttacactgttggtgggaatgcatactggtgttgctgctctggaaagcagtatggatgtttctcaaaaggttaaaagcagaactacactaggatctagcaattgcactactaggtatttaccaaggaatacaaaatactaatttgaagagatatgtgcagacaataaagagtgatgcaaaaagaaacaaagagatccaaataaataatggcaaaggtgtagttagtagagagacaggcagagacgcaatgaaagagtgagagacacaacagagacagagaggcaaagacagacacaaaaagatgtcgagaaaccctgtgttgattacagcaatattcacaatagtcaagatatagaagcagccctagtgtccattgatatgtgaatagataaagaaatgcggcataaatacaatgcattattactctaccataagaatattcaatcttaccatctgcagcaacacggatgaatctggaagatattatattaagtgaaataagtcagacaacgaaagacaaatgccatatgatttcacttatgtgtggaatctaaaggacaaaacaaatgaacaaacacacagaaaaacagaaacagactcataaatacagagaacaaactcatggttgtcacagggcagatggatgggaggataggcaaaataagccaagaggattaagacgtacacacttccagttataaaagaaatacgtcatgtacagaaaacatcagtatagtcaataatattgtaataaggtgacagctggtgactgtacctattgtggtaagcactgagcaatgtatggaattgtcagatcactgtgctgtacaccatatactaacataacatgcatgtcaactatgctatcacaataaataaataaataaataaataaataaataaataaataataaaaatatgtagagaggcacactgaaatatattaaagggacaaggagagacacatagaaaaataggtgcacacatggaaatataatgaaaaagagagagagatgaacatctcatcaaatgtctggatctagtaacttctgaaatcaacttgacctcagacttccttgtaacatgaacagagtacacttgacttgggtatctatcatgtgaaaccaaaaatagtacttatattactagttatactttttcaaaaataaaaatggaccttgatcagtgccaagatctatttgaaatgtcactgtggttttcagagacaccgcgggccactattacccacgccaggatacttccactgtaagcttacacgcgaatactccgcaaacctaaagaaaggccagcacctccttaggccattgcactgaacaatactcaatatccagaaaggacgtgactattgaattgattttccatctccatctcccccgcctgctcttcatttggcacccccagatgcctccggtctcccttcaaggagcaatatgaccctttcattctgcactggtttcctgcctccacccagttaagaagactcagggtacagagaactcataatcacatttaattatgataaaatctctatcttcaggtaaatggcttcaatgtgcttctcttgcacaatctgtgaaggaagaatggaaacaggaaaatcccttggggcctgagtagatcctgtagcagggaacacacaggtcaatgcaggaagcagaatcacacccagatcctcaagagtcctcagagtcatgtaggactctgatctatgtgggggacagtctgtcaggcagctgggaattctgggcagggacagacggacactacaaaggatggaatctccggtatcctcaggcatcagtgcaggagccctgtagaaaagagagtgatcagcagaggagaccctgacagatgagccctctcccctcctctcagggccactgcagcaccagagaaaactgagggccagggcaggcagtcatcacctcccccaatatttctgtaaaggtgaaaccaactaaagagaacatggcactccagctgcacacagatgtgtgggaggcagtggagcagctcttgtcctttaaggggatataaaaacgtgtcaatctttttagtaaacataataactcaccatctttgaaccactagtggcctttcacatgtaaattcacacaggcagcagccagcaacacataacacaaagtgggcatcatcctggtgtctaacacccaagatgtggctctggttccgagtttcacagacagatagcaccaacgttatggcttgattccagggaacaactctggatctgcctacacaaactgggcaatcttcccccctaactcttgatctctgtagcagggaataggccatgaactgagaccattgtgcccaggtacactcacctcatgctcttccccctttcacccgtccctgcaaccccactgaatcagagcagaaatagtacctgccggtggagacccccgagatcctgcaaaaggaagtgatacagaaaaaaaaaggtctcataaatagccaccttctccctcaccccaaatggaggtgagataagcaacttaattgaattttactttctccccactcatccactccaagaccttaactgccctaagctaaaatcccccaaaatcaatgacactgtcactagaaggaagggaagcagatgctctgaccctcttacagaaagaaactttcagaaaggagccagggagccaatgatgaactataaggaagccctagaatatgctccacctgttacctctgtggtagggctccttttcaaccaataaatcagattccagagtctccccctaggtggttccctctctttccaccaccagcccagcctctttcctttcagagtcagaaggaaagagctaatctagagacagagccaacccccccccccccttagcaacaagatactaatcctgtcaacccccctcttttaacgatatgtatcccttggaatctctccatgccacgaaagtcgccggacggtgcacggctggcgccccccccacgctaccccccccccgccccactcccttctctaccccaccccccccccccctcccctcgccccctccccgccccccccctccccccccccccgcccgccctccccccccccccggctccggagcaacccccccccccaacctttaacccccccccccccccgaacaaaaggtctcaggcatagcccatctccctcatttcccccagaatgccttacctttctggctcctgtgacggatgataaggccaagcccaaggaagatcagccccagcacgaagccaccaatgccactcagcatcttgctctgggcagattcagactgtgcccctggggagcagagactgagagtcagagttgtctccacacccccaggctccctttgggaagcctgaagtccagtctgaggtacaggaggtggaggtactgggtgaacctgaccacccctaggagagggaaggacccaccattagatccttgcacacagtgggtatgtggggggaaggagggaggctgaaacctgctcctccagacacatccataacctcaaacaccaaggccccagtcaccagccagggcagtaaacccttcagagctacagggctgcgttgtggggccaaggtatggagaatgatctctctagtatctagaaagaccacgagatcaagattctcctgatgcccctgccgtgggacaagaggtactctaatctcctgtgatttccacctcagtagtgacatcaaggataacaaatagaatgggatgggctagaggaagctctgccctctgtctgtggggctcatcatgacaggaaacaaacttctccttacgccactgcactgtgatggggctctggaggctggcgtgctccacatggcaagtgtagacatctcctcgctggggagtcatctccagcatcacaaggatctggaaggtccagtccccattcctaataagtggagtggacacgacaccagctgtctgctcctggtcattccgaaaccaccggactttgatctggcctggatagaaatctgtcactgagcagaccagcagattgtggtggttcagaacctctgtcctggacggggagatggtcactgtcggttccactgaggggagtaacagacaagaaaagacaatgagatgtgagactacacagcaagtctccccatggagaaaagtcctcccttggtaccagcatggaaagatccctggattccaagtcttggattcggatctcagcttggccaccttattagtttgcatgaacacatgagtcagtttacttttcagagtctgaagaaataatagcaatcattctaggaaagttattctgttgatattaatcgataaaatgaagcatttttaaattataggtcgctgcattacacatgctactatttataacattttcaaaaataaaaataataaatctggacagctctccctccatccctactgacagataaagtggctgctaatccctaacatgcaaggtggttagttgtgaaattaaatggcgcaatatagacggtgggtggtaaggtacttttctagaataggtatgtatgaaatggctacaattaacttccagaaagggtgtctacccctgaagtggattgcgatgccctgaggacgtgacccagggggaacaggatatgcagggcttaggccaaaggaaacctgagacaaatcttattcaataacttagtagcatcgattgattgactccaaaacttcagctccttttatactggcatgtgttgagaatttctaagaaattaaaattctgcctcacaccgcctttcacaaatagtttatatttttagttaacactttcttctttgcattcacaaatcctaggctattaagtaagattcaagtcactaagtttactttaaagcattaaacaaagcagaaaagaataataatagggtccatttttaagtcttatttactctgctatttttcttgagcctaagtggatgtgcagctgagtgcacttactcattaatttcacgaaggtttgcactcacacggcttgccagtccctgtgtcacacactaggcaggcaaggataaggcagggcctcgcctcagaaatgtccaggcccagtgacagccattagggaaaacagaattaagatgaataataatttgaaccagagtcaaaattcggcgtgtgacgactctgccttgcttaccaggtgtgtgcatgcagctcactgagcttcccacctgcagccccagggacaggtcactgcaggagcccggggcggggctggggtgctcagggggctcggcttaggaaaggtggggagggagcaagcaaggggtctcagggcgcgacatgggggtgcgtggagtgggggcatgagcctcggaagcgctgctcccccctccccgaacggaccccccatctctgctgagaaggcagagggccgggctcagtcccccagctctggcccctcgctggggacgcgccctgcctccctgtgcgcacctgggccgggtcccgcgaggggacctgggtggggagcccgcgggggcgaggagggtgcgctcacctcgccgctgcaacgtgtagagctcttccaccccgtagttgtgtctgcacaccgtgtccaccgttgcccgctcctgctccaagatctccttctgcccgttccagtactcagccgagggccgcccgagctccgtgaccgcccggaactcccccacgtcgctgtcgaagcgcacgaactcctcccggttatagatgtatttagccagaaaccgcacccgctccgtcccgttggtgaaatagcactcggccttacactggtacacgaaatcctctgcggggagacagccgggccagtgaggcctccaccgctcagcccaagcagcggccaccgccctggcaggcctctggggcagcgccagggcccgagaaacctgaaggcctcccggctctgatgcccgtcaacccggccccgagcaccctctctcccaggcctgcccgccctcctcggagagcttccagagctgccttcatccagggaagggagggaggaaagcccctctggaagggcaagccctggcacccctgaacccggcctgagcctgacaactgagctaaacagggcagtcgggtggattctacatcccgacttggactgggatcaggacgtgcccacaagataccccattttcttgtggactccaggaacctcagaggcaaataagtgtccccattagcacaagagggaatgtgcagaaaggtccagaattgagctcaacttcctcctgacaagcatattctaccggcccccagcaaaaggcctttcttctaaggcctgggttaactctgagtttctgtcgcccacccacccccctgcagtgtgaggtttgctcactcctgcagggctagaaggaacccacaccttccaagtcctagaaagaaacattttattcacagaaagaacaggcttttcaaaaagataaaatagattccaattaacctgtgccaatgaccagcttgagtaggttactaaacagagtatttcctatcataagtataatttgtaaaacggaagtcataaaacctacacataggggtgttaggaagatccaagagaacttatagtaagatcctaaccctatcgctgaaacggttcctcagtatgtgctatttcccttctttactttctccttcctcctacattcagtccaccatcatctcaagtctccgaatgccacacaagttactctctgaccataaactagtgagacttgaagttaagactccctgtctgtggccacccagtcagcgtcactcatacaccaagagttcatgcccatgtgcactccactcagaatccagtagaacatagagtcctttgtaccaaagactaagatgacagagaccgttgctgccctacatttccccaacatacaatcccacagtgcatagcctagacaaagtcttgggggacccagaaataaaaaatcctactgtgtcttctttggacaaattgttactttcaaaaataactccaatgtcactttgtcctgtcagtggttgcagatgcacactttgtttcctctaccccattaggaggattgagcccacaggatggggatgtcctcatctcatccttagaggtggacatgagaatgtcacagagctctcttccccaaagagaggaaactgtgataaaagtctatattctgagatcatagaaccttccacactcccaccaaaaggtccttcagagcctgttccccagagcagtggccctggggagcaggtgtcctgcacttacgtggagagtctctgccctcagccactgggatgctcagcaccaccaggatcatcatcacagctgctgtccagaagcctcgggggatgcacagagtcatcttcccagacataactgagaacaaaggaaaaagttggtagtcaacacagctcctacctggtggctctgaagtactcacttcaaagaataaaaatctgtaaaagcttccatccatagtaggattggagagttcctagggagggaaccaatcagcaccggagctgaagtacctcacctgtctccgggcagacattcgttatgaaggttctcagtccagtgcctggcgctgtgtcttcatcagattacactagatgaacacttgaggtgacgattttctcctatagaagacctaaagattgaatgccttaggggtttaagaaactgaacaaaaaatgactcgagagtagacatctttgtgcaattttggattatttagttcttatacctttggtttttagtaaataagtgggatcctatttcagggaagagaaaattattgtcacagagttgttcacttctattgtcttagacactctgaggagccttcagtcacgctgggaagagcatagttcttaggaggaaatggttttgaattgcaattttaccactaataggctttatgagagcaaattactgagcctctttttgcctcaggcttctcttggtaaaatgtggatcacgttgcctgcattgtatatccaggtcattatatatacgaacttaagagtaataggacttgtttaatattgcaaagtgttcctcagctgccacatgttaactgttgggaataccaggttaatatgcggagcaagagggcagccccactggttcagcggtttggcgccgccttcagcccagggcaggatcctggagatccaggatcgagtcccacgttgggttccctgtgcggagcctgcttctccctctgcctgtgtctctgcctctctctctatgtctctcatgaataaataaataaaaatctttaaaaaaatatgcggagcaagataacaaggaaaaaaagtggtgacacccagccctgtgggcaagtgattcttcattatgcaaggatcttttacatttgtgcttttgactgaaagtatttgaaaagtcgagttcacttttatgcaggttcctctgatatcagcaaagatgcaatccatgaacattcccagcattcacacaaaatcacctttcatttcaaggacagagagcaaaagatgtggagaagcattttctgggtcctgaatgatgttaatgaaggagcagatgttagagtcacacactgtgtatagatgtggcacttactgtgccagcccaaagttatcaaacctcgaatggcagaagtatcgatatgtttttatagcaaatctattatttatttatcaggctcctcttgcccatgactagcgtcagtgctaaatggttatagagcaattagaacaacgtgtggcaaatattaataaacaaaacaataagtatctccctcccttttctccctcctcccgtctttttcctgtatttaggttttcattcataagagaggccattatctgaaagccgaatagaaggagtttaccaggtaaaaagaagtacagcaaagacacaagaagtttccactagtggcacatgaaagcaatgagtcattccaatattttagattaggtgggtggttccaatctcctgagacttagtctctgggctttcactagcagcggtgtacttaggatcagggtaatgctggaataaggagggtttctatggtggcatagaagcagaaagaaggagcatcaaaatcagaactggaatagggttgaggggcaaggaagaatggtggaaaggggacctggaaggtacattagtccctccaaccctcacctcaggtccctcagaataaatagagaactctctctcctcttgtcctaaggggaaattctctccactctattgtggtgctgtgtggtagaggccatgtcagacctggggattgcccagtctcacaggcatcttcacccaagcttttcaacaagcaacaaaagtgtcagcttagaatgctttttctgattggctaaaacctcatttgaaatgctctggctcaggcttctgtcagctgcttccccctgagccagtcaacattctctacattctctagagctctctgtgctactcatagcttaccccattacccagggtagccattgcccaactgccctgagaggaaggcaactcagacacatgattcagggccttatctgaggtaccccaccctgggtaccacatcaggtggatgtgggcacttaggatgaaggcagtgtgtatcccatgtggttagaagatgagatcaagaaatagtcatgaaacaggtcaaggttccagtaaagagactctccctaggggacatcctctgttccctcaggatggaagataaaaggtatggactctttctttgtggaccatcagagagaaatcatcgtccctgatcagcatctcttggaatctatgctttgtcagtggagttaattgtgaacataataataacaatcaccttgtgaccagaagggccatctgggatcctagatacatttaattcaggaattaaaaaataatgtagggatccctgggttgctcagcggtttagctcctgcctttggccaagggcatgattctggagtcccggattgagtcccacgttgggctcctggcagggagcctacttctccctctgcctgtgtctctgcctctctctctctacgtctatcatgaataaataaataaaatcttttacaaaaataatgtatattctgaaatattctgtgacttccttaatgccagtagtaatataattagaaatactgccccacaatattatttcccttttaataaaaatttatctagcaattatccctaagtttttccaaatctttgtaaaggtactctttacatcaacccttacatcccagaatatgggatgtcccttacatcaacccaaaatatgaattttccatcacacatatgcagtagacccctgttcttagcatagttatctctttaaaatcacatcctagtaatctggtcaaggaatgaaatcagtagcaggttggccatggataaacctttcaactctgaaagatttagttttccttatttgtagaaagaataaacacctcactggaacaccatcatgaacgtaggtataatttattcaagtcctctgtaaactatgctgagatacatacaaaatagtttctaatataatagtgagctcattgtcttaacatcattaacaaagacagaaaattcttctcgtgatgtctcatctctcttcagatgacagaatcattatagttctgaatatatagttctgaatccctgcctcttacctcatcataatgaagagaaagagaacaggaagtatagtagatgtatttaactttgcatcggctacatgttccctctctgaaatgcatgaatacaactgaacagaactaccatttcagctataatttcaagtctcagaatctggtcctcctctcagtgttctcacaaatgtggaaacttgagtgcaaaacagagtctcaatacaaactgactaaaaaagaagacagtgaatacagctttgtgagctgcatgtaccattatggcactcatctaggcttgactgagaggaggagagactggcttcttattgttacttctgacaattgtctaaaagccccatcctatgccacatgcccgagtgccctctattcctcaccttcatgatcactagtccccctgtgtctgagctctgacacatacatttatgtagtttcatttccagtagttctgtctctcttcctcaacatccaacagatctcatatggtgagtactatcacttaatattttttatacacctacaaagataaggtcctaggtttcataggtgcaaatacatggatcctaccttctaagagttcacacattggaggggacaggtatgtggagaaaaataaaagggaaaagtttgcaacagccactgaagggcaatgtgaaatacagctgactaaaggcaggacccaaagtgctgaagattcaagggactcttaaaactataaaatgaaaatggtgcccattggttcagttagttattttttttctcttggaaaggattggcaacataggactagatgatgattatttgtggattaattttaattcatgaataatagttttttaagatgaagatgaagagttgatggtggagaggtaatgagagagttgaaagccaagcttttcaggtgtgattcttagaggaggtgatggctcagcagatgaagggctatgttcatttcaggcaaaaaggcttacatgagtgcaggggttgggaaggacactcaaagtatatggtttggtgtgaacaaaggtgggattcagttaccctggtccttgtgaggtttgatggcagcaccattcaaagttgtcttggttttcctcacagtacaacaggaaaaaatagagggaatttaagcagaggagtaccattacatgcatgtccattcataaagtgaccttggaagcagcctggaggacttttcagaggatctgtacattaccttttaccatccagaaaggatccaggttaatctgatgaacccaatccaccgaaatccagtttactgaggaacaaatttgccaatggtcaggttgctaagttggccaaatttattaatgtgccccaaacttatttctttttttcctatttctaaagtttgtagatactcatagtgacgtgttgctgtgatctgtgtactcctgctgtctaagctccactccaactttctgctgacacaatactcccatgaagcttaataagaaatgcatttatatagacaaaatgaaaactggtcaattacatttctgtccgactactaagtggctcctttcaaaatgaggcagatatcaatgttctaatacaaaagcctctctctcagttgcaaaaagtaaattacatgctatattatgatgtgtgttaacaatgaagacctgtacagatgagagatggagatagatggattttgcttccacatgtttagaatatttcgggaaggataagcattaagtactagcagtacttacctcctcagagacacataatggctgtatgtttgttttctgagaaagaaaccttctactgtgttgtacctttgtagcaattttttttaatcatgaacatgcattagcaatccaaaattgaatttataatcaagccaaaaatgatggggaaaatttaaattagaatataacccttttagtggtttctaatggaccagtctcacgtgaaatgatcctcattttttttgccttagaattatcataagctgtaagacaggatcttgtgaaaacattcaagctgatgatgatgctaaattagcagctagggtatgtgtctcaactttagaccatattaatcctcctgtccacccttcaccccattcttcaaagcaggttcctttttccctggcctctgtttctttcttgttctaaatccagaacatgggctttcctttcactgacatactaccttaattttatattgatcacatcaattgtgattattttgaaagcatcttataaaaagactaccttgttggatgtcatgttcaattctgggtactctgtcctatgccttgtattgatattacttcaaaattatatatacctatattcttcatacttgtggcaaattattatgttgtagatcagcctaaaaatgttgcaaatcaaaacttactataagaagttgggaagaaaggcttcagttggaagtgaatacataaaactagcagcctggacacttagcacaagaggaacaaagactgcgtgactttttttatcgcaagcctggctcatagagggggggagggttgcattggctgaaggaagtggttactagaacaaggcataaccaaagatggaatgttgcttaaaaaaacatcactgaggctgtgtttgagttaaatcattaaatactctccagacaatgggccagtgatgtgagatagcatcacttgtctctggcagaccaagccactaagtctgttagagaaaaaaattacttataagagcaaaaaacatacaaaactcaaaggtttgatttgccatcttctacctgtatattgcattaagtattgccttacctctgaggtcattttttccctctttgttcattgagcccttctttatcacattggtggatttccctaaaatatcttctcttcattggttattagttcacactttgaaatgaggcacagaagtgtggctgaagagactgtagcagtaagaggcttatgaaagatgcgctttgggcttacttggctgacaattcactgacaatatcataatatggaatttctctcttgaggtgactcatatccaaaaagcaaatttctggtgtctcagttgtgggggcagagcaagtgtatggtaaataaatggctgcccatgttccattgtaggggaaggccaggggttcaataaagatgctaatggtactttcaattaattcccaccagtgtacacaatttaaaggactaaataaatgaatcatagcacgattatatatatagactttcaaaacaatgttttagaaggacatttagtgacagaattgtttatcatatgttaaatttaaaagtagttacaaattagcctattcaatatgatcttaggcctctaaacatgtttctatttatatctctatttattatcttcaaagcctagaaggaaaaaaatgtcactcaaggacctagaatacagtaaagataatctcattttctcttctcctgcttcaaatattgactgacaaatctattctggttggctttaaaaacagatcagaaaaaacaaaaacaaaaacaaaaacaaaaaaacagatcagttagggatgcctgggtggctcatcagttgagcacctgccttcagtccagggcatgatcctggagtcctgggatcgagtcccacattggggtgcttgtatgaggcctgcttcgccctttgcttgtgtctctgcctctctctctgtgtgtctttcatgaataaaaaaataaaacttcaaaaaataaataaaaaataaataaagacacaaaagttaaatgagatctgcatgtggagctattagttaaaataataggctgaatcttaaagttaagtaaacaactattctgtacctttgttcatctccaccaagcttgtggtaccacgtatcatcagggcaacacaactacagctctcagttttatttgacctgctaaacacacttaatattttatttatttatttatttatttatttatttatttatttatttattttacttttcttttgattccagtgtagttaacatactgtgttatactacttgaaggcccacaatgtagtgattctatacattactcagtgctcatcacaataattgtactcttaatccccttacctatttcacccattctccactcacctgccttctggcaaccaccagtttgttctttatattcaagagtctgtttttaatctttgtcctttgttttctttccttgttttgtttcttaaattccacatatgagggaaatcatatgatatttgtctttctgtttgacaaaatggtttcaaaatgattaaagatctcagtgtgagaaggggatgaggcaactgggtgatggacactaaggaaggcacttgatgggatgagcactgggtgttatactatatgttggcaaattgaatttaaataaaatataaaaaaagtaaagatctaagtgtgagaaatgaaaccacaaagttcctagaaaaaaacataggcagtaagctctttgacatcagtcataagaacagttttctagatatgtatcctttgcagggaaacaaaagtaagaataaactattttgagtataccaaaatgaaaggcttttgcacagcaaaggagacatcaacaaaactcaaagtcaacccattgaatgggagaagatatttgcaaatggtatatctgctaaaggattagtatctaaattatgtaaaaaaaaaaaaatgtacacaactcaacacaaaagagcccccaaataatccaattaaaaacagaattcatgggacagcccaggtggctcagcggtttagtgccgactttagcccagggcctgatcctggagacccgggatcaagtcccacgtcgggcatcctgcgtggagcctgcttctccctctgcctgtctctgcctctctttctctctctctgtgtctctcatgaataaataaataaaatcttaaaaaaaaaaaaaagacagaagacatgaagagacatttcttcaaagaagatatacagatggctaacagacacatgaaacaatgctcaacatcaacttatttacaaagaaatgcaaatcaaaactacactgaaatatcacctcacacctgtcagaataactaaattcaactatacaagaaacatcaagtgttgggaaggatgtggagaaaaaggaaccctggtgaactattggtgagaatgcaaactgctgcagccactgttgaaaacagtatggaagctcttcaaaaaattaaaaataaaattaccatatgatccaccaattctactagcaggtatctagccacataaagataaaatttttaattattccagaagaataatttcctaatatggccaaaccatattaactaattaatctcccgtctgctctaccatcagataaccactacaaccactttaatgtatatttcagtctttttcccaaaacatatatatttctatttgttttaaagtgagtttataatgtagaatattttatttgcatagtttgcttaactctatgtttcaaatatttcccccatatccccatttattctttctctataagtgttctaaggtctgaataattattcatgaagacctgtgccatcgttctgtctgccataatttattatgctaatgtggagcatgttttattaattacacttgttatttggaataattgtagacccacatgaagttgtaacaagaaatacagaggcatcttgtgtaccatttacataatttagtcaaatggtaactactttaaaaattacactacaataccacaaccagaagattcccaatgatacagtcctgatacagaacatttccataatcacaaagatcccctatattgccctgttataaccacatctacttcccttccatcccccacacccatacccaaccctcaccttaaactttggcaaatacaaacttgtgcttcatttttataattttttccatttctaatttcttatacaaagagattaactcacaacagtatgaaatataaagaagtctactgacatgctcccgaaagaaattaacgaaacttaagttttagaaaaattaaagtcactggctcaaaggttaggggaaaacaggaaatgataaaatatttattcaagaaaatctataaaagatcagtaagaaaaaagggagtctgtggtatttcaaaagaaacactggcggtgtagcaaggcagagacttcactccagattgttgcagccaagaacaaaggattctgactcccccaagatccaagccagtggatcttcttcccaggagaagcaggacttcaacataactctttccgtcttcaattatctgttgccgaggcaaagtcccaaatgagtgtagtctagaggtgggaagtctcatcttctgcccaaccaccatttgttgggaatggaaaatctaccttgagtgtgacatgctgagaatactgcgtgcccccccgcccccgcccgccccactagccctttccttgactaataatgtggtgatttcatgacagaagactcaagccaggagagcttccagctgttggccactacctgtaccatgtgctctgcccttagagaggagatgtcactcaaagagaagcttaccattgtccccacacctagttccatagtcctagctcaaatattttaccggaggtgagagataggctataaaacaaatacctcctataatagtccttaagaaagtgacttcacttgcaacagagaatggagaatagtttaaaccaaagacaatccccaaaactgtagagattgggatgaaaggaaatggggaggagattcatgcatctaatgaagatacaccatagactgtaggttagccagtttgcaggtaagaactgggaataagtcccttgagaggagtcctccttgggtcagaacaaatatcaaccactgacctcaaaaactgtttcatagaaagactcacaatcttattaaattagattgtagagaaattatgccccaaggcactactaaaagcaatggcaattagtagaatttaacagctggatgtggtgaggaaaagagtggaagagtccttatcagtaccattgtcattccaaggtaactgtgctgcatctccttaaggagcataggcttagctctatggggtgaaggaaggaaaacacacatcacaaagaatccaaccaatcattatacaaataattatacaaatcattatacaaataacaagctccagggaggcaaggatagtatccaaagatgtcatatttcctaatatatacagtttcccaaaaaattatgagacatgtgaaaaatagaaagtatgaccaatgcatcagaaaaaaaagaaggcaggagcacctggtgggctcagtccgtggagcatgtgactcttaatctagaagtcataaattcaagccccatattgagcatagagattatttaaaaataaaatcttaaaaaaagaaagaaagtaattgaaactgcctatgagaataaccagatcctgggtttaatagtaaaagattttgaagtagccatttacaactaggttcatagacataactgaaagtatgattgcaaagtaaaagaagatatagtgataatgtagtgtcaaagagagaatatcaataaagatgaaaactatttaaaaaaaaacaaaaattttctggagctgaaaagtacaatgactaaaataagaaatcattagagggatttaacagttagaaaacataggtattgaacttgaggaggtatcaatagaaattatgcaaaagaaagaaagaaagaaaatgaaaggaaaggaaaagaaaagaaaaaagaaaagaaaagaaagaaaagaaaagaaaagaaaaagaatgaacagatatgaagagagcctcagtaaaatgtgggacaccattaaatgcgtcatcttatatataatggaaatatctgtaggaaaagagagaaagaagaaaattattcaaagaaattatagctgaaaacttcccaaatttgttgaataataatatcctacacatacaggaaggttgactgactccatgtagaataaatataaagagagccacagacacattagagtaaaaaaatgtagaaagtcaatgacaaggagaacattttgaaagcaacaagaaaatataatgatccattgctcacaagaaaacaccaataaagtcaacagcttacttatcattaggaataatacaagccataatgaactaagataacaaagtgttcaaagagaaaaaaactatcaacaaagaatcctatatccagaaagctatcactcaacaatgaagaaaaaataaaagctttaccagataatcaagaactgagagaatttgtctctagattttttttacagtaaatactacagaaaattcctcatgtgaaagcaaggactagagatagttatttggatccacacaaagagcactgctaaagaaaattatggaattatgaaagacactaaatgcatattttctcaatttttcctttaactggtttaaaagaaatacataaaataatatacatataatatactacggagtctataatgtataaacatatgtgtgtgtatatatacatatatatatatatatatatatatatatatatatatatacagtcaaaacagcaaaaggaagtaggagggagcaaagctatagtgttctaaggaaatgataatggatgataaataattataacaacctactgttggttttgcaatgttaatagatgtaatacatataataataccacataaaaagcataaaggaacagagatttgtagaaagaagatatataaatgtgtatatatatgtttatatgtttatatatatttctcaaattaagctaccatatactgaatagataaaatatagatataactcacaaaattaaaacgctacattagaaaatatttactcaatataaaagtatagtagatgtagaggtacaatagagggacaaaaagatacaccacaaggaaaacaaaagagtcatggtgcctgggtggctctattggttaaacacctgtcttcagctcaggtcatgatcccaggttcctgggatttagccccatgtcaggctcccaaattagtggagagtctgcttctccctctccctgtctgcttgcttgttctctctctctctctaataaataaatcaataaattttttaaaaagaaaaaaaaatagagtaagtagcagaagtactttcaactatataaaaaaagacatcaaatgtgaatggatttaataatctatcaaaaggcagagattagggcagcctgggtggctcagcggtttagcactgccttcagcccagggcctgatcctggagacccgggatcgagtcctgcattgggctccctgtgtggagcctgcttctccctctgcctgtgtctctgcctctctctctctctctctcatgaataaataagtaaaatatttttttaaaaaagacatagcaagcaatactttgaggtaaaaaaaaatgaagacaacaatataccacaccttatgggacacagttacaacagtgccaagaggggactttatagctgtaaacgcctatattaagaaaggaggaatcatttttaatcagtaatttaaccatgcatcttagacatatgtgacaaagcccacagttagcatcatactcaatgatgaaaagttaaaagattttcctctaagatcaggaacacgacaaggatgcccattcttgctatctcatttaaaacgaatactgaaagtcccagttagagcagtaagtcaataaataaataaacaaacaaacaagcaaataaataataagaagaaataaaaagtacctaaaccagaaaggaggaagtgaagcaaacactatttataataacataatctttgatatagaaattcctgaagaccctaccaaaaactgttagaactatgaaatgaattaagtaaatttgcaggacacaaaatgaatgtatagcaataagctgcaatttctatacagtaataaggaactatctgaaatagaaatagaaagaacaacccaatttacaaagcatctaaagcaataaaatacatagaaataaatttaaccaaggaatttaaagaactgtactctagaagctataagacactgatgaaagaaattgaagaagatgcagataaatggaaagataatttcatattcttggactggaagaattaatattataaaaatatatccatactacccaaagtgatctacaaatccaaagtaatctcattcaaaactccaatggcaaaaacaaaaacaaaaaaaacctttccaatggcacttttcatagaaatagaaaaaaataatcctaaaatatgtatggaaacaaaagactccaaatagccaaggtcattctgagaaacaacaaagctgaaggcatcacatttcctgttttctagctgtattacaaaactgtagtaatcaaaacactatgatactggcagaaaaataggcacatagatcaatggaatggaatagagagcctagatgtaccttacacatatacagtcaactcatatttgacaaagatgtcaagaacacacaatgaggaagacattctgttcaattactggtcttgggaaaactggtatccacatacaaagaatgaaattgggtccctaacctacaccaatcacataaatgaactagaaatgtatcaaagacttaaatataagacttgaaactataaagctcctagaagaaaacttagtaaaacagatatttgacattcgtttttgcaatgatttcttggataaaacatcaaaaacataggaaataaaaactaaaataagtatttaggactacattaaactaaagagctctacaaggcaaaggaaaccatcaatacattgaaaaaaccacctacgatatgagagaaaatattcacaatgcatatatatctgataagaggttaaccaaaacatataaattatagaactcatacaactcaaaacaaacaaacaagcaaacaaatgttctcattataagataggaaaagtactggaacacatttttgcaagaagacatacaaatgaccaataggtatataaaacctatgtaatagtaatcatcagagagatgcaaatcaaaatcacaatgagatatcacctcacacctgttataataactgttactaaaaagaccagagataaatgttggtgaggatatggaggaaaggaacccttctacactattggttggaaagcaagatggtagcaccattatggaaaacagtatggtggttctttaaaaaattaaaattcacctaccatatgattcagcaatcctactcttgggtacatatctgaagtaattgaaatcagtatccctaagagatattgtacactcattcatcgcaggactattcatgaaagcaggatagcaaacaacataaatgtccttcaactgatggatggataaagaaatgtatatactggaatccctgggtggcgcagcggtttggcgcctgcctttggcccggggcttgatcctggagacccgggatcgaatcccacatccggctccctgcgtgaagcctgcttctccctctgcctgtgtctctacctctctgtctctctctgtgtgactatcatgaataaattaaaaaaatcttcaaaaaaaaaatgtatatactcacaacagaatattactcagccatcaaaaacgatatctggtcactttgacaacatggatggaccttcagagtattatgctaattgaaaataatcagggacaaacaaaaatgccaagctcatattacagagaacagattggtgattgccagaggcagggcatagagagtggtgaaatggtttatggggtcaaagatactaaattccaggtttttaaaaaatgaataacagagttgtaatgtatggcatgctggctatagttcagtacagagtactgcacacttgaaagttaagtagaaattttaaagttttcatcagaagaaaaagaatatttgggatccctgggtagcgcagcggtttggcgcctgcctttggcccagggcgcaatcctggagacccgggatcgaatcccacatctggctccctgcgtggagcctgcttctccctctgcctgtgtttctgcctctctctctctctctctctctgtgactatcataaataaataaataaaatctttaaaaaaaaaagaatatttgtaattatgtatggtgaccaatgttacgagatttattatggtcctcattttgtaatatgtacagatgttgaaacattatgctgtgtacctgaaattaagatgttatatgtcaattatatatcaactttttaaaaaggcaataatatgaacatgaatatacaaataaatcagataatttggataaactggactaattctcaaaattacaaacgagcaaaactgaatcaagaagaaagagcaatacgaaataaccaaattctatcatggaaaaggtttttagaaactttctcagaatctcttcaccatttgccaggaatgcatgcaggcttcctgggaaggatatgttcccatcaaaatgttcagattaggaaaagacaacagtgcctttcaccgaattactggacacagtgcagcagatcgccccaaagcaacccagcaagctcagtcatgtccttcattttccccatgtgatatagtaagaactctcatattaaggaaccctcaataactgaggtaattagtagagaaatttatccttggctagggtgagcagagtctccagttgatcagaaggccccttttagtaaacaagggaatagagagatgcttcttctcagtgtccaagggtcagaaaggattcataatactacatttaaatttaaagagaggaactggaccagaacaaagagattacagaacttgcaagcttactggatgatgcctcagcaagagtgagaaagatacaacaaactgtaatagagaaaatccaggacagctgcaagtgaacctttcatggtaccaatctcgtttaaagctccttaatgtcatgtatctttagtcagcaccagcaaagaacaggtatatgaatgggtagtgagatatactacctcactgataaatgtgcatagcaatacaaaatcctattcttagacttcagttcccacattgttcttgagtcagtagcaatggaaaccagcttggctcaaattaccagctcgtgcatttagaaaatctataatacagggcaaatgagggctgatttatcagatttgccattggctaaatagtaagagtggagggagaggagggtgctggataatttagcccaggccctaaagagctatgtgttctagaaaacacacaggtgcccttactgatggccagcatgtattcatatgctcacctccagcaggggatcctttactgcccagaccctgagttgacagtcaacagggttcccatctctgttcaggggtgggctctacaggcccagcctcctggttaatgtagtctttacctttccagcacagtctctcagatgttgagacagtggccctaaggctgtctggcccagagctgaacacactctcactattgggccaaacaatcccagattctacttattgtaatgggcatccccaatgcgtttagaaaattttgcagtgtggttattaatatgttggattcagaggcctggaagctgttctgtaaagtacagtgtttaactgaaaattgccttcacagttgggagtagtagcctacactccttggatgtctttacttacagtttgccctgatggtcctcacctcttttgtgaaacctttggagaatcgaccaaagactacgttattgtctaaaatttacattgaaaacgtcagaaaaaacagtaacaccctggatggttgttggaagggagaagctgtctgggcataggaagcagttattagaccagggttgaggtagaagaggaaggatgatgacatcaatctttgcagagcccacatttacatgaaaccatgatacgctattaaatacatttcctcccagctcacaaggcaaatgagggaagccagcgtcatttgtctctggtttagtctcccactaaaccgtcaagaaggcacacccaaacctgtggtggcagacagagcaggggagagaaattctattaacatctcagttcagaaaaatcggtgtatgcatcggtgtatgctgtttatggagcatcgtgcagaatttctgaagttactgtccatgccatacccactgggactcccctgcctttcttctctcccacaggatgtcatggtcccccagggatcatggccacaaagtttctgaacttggttgggctcccgcccactttgcaatccttgtatagatcttagtcatttctatctctcatttcccttcaccgtgtgcctttttgatccactcacttcagagaactaaaagaattactcctttgtacctcccagatacaaagaagaaaaacatgaacactcctcaaatccaataaagccttaaattcagaacccatgaacactgctgacgttcctttccctgcaaaaggaaactttcagaagaaaggcccggtctggagtgaaggcacagcaacttttgttgaaacttctgtgattggcgggaagccttgactctggctgcagttagcaatggtctcagcacaggaacacttgttgggattttgatgaagctggagagtggtttggcctccaagagtttgaacctagtctagtctgactgaatacaacttcagaatcttcagctgagcatggatgtctccaaaacatatcatctctttaaagaacccttagtaaatgacactagaactgaccaggagtgttcatccatgcacgcatgaacaaaatgctgtcaggtatgagaaacagagagaggaggaagagctcttttctacccccaaggtgcccaggcttatcgtggtaaaacactgccaggtggaggcactggaaggtgtacatatgtggcccgaggtctaagcaattcgttctttaggagaatttgtggcctagtgcctgtgaggggaagtgtgcacaaatgtccttctggttcacagtgcagcacagctgcccctccagcacatcaccctgaggttagattgcctgagtttgaattctggcaccactccttcctgatggtacagccttaggcaatgtccatgctacaatttccttgctggtataatgggaaagggagatgataataatatgcctacctcatggtatcatgaagatgaagacagttagtataggaaaagcacttacaagagtgtctggcatatagaaagcactctgcaaacattatacattattatgattattattatcactatttttatcaattaattatcaggtctcaagggtaacctggcaatctgtattattctctcactagcctgtttgatcgggatccaatacctccgggaggaaactcacagtgtcaaagctaaaatagcctggctttctttacattaggtgggaagggaaggaaggaaggagtgggagggaacagccattcatgctttaggtcctgccattgccctactcacctccaggatactaaccagcaataagacaggtaagcaaagggttggatccacctcctctctctctccctcctaatttccgttccaccacttacatgtcccagaaagtgttggttgactctgaaactgcaagaatcaggcttacacctgattgattcaggtcaaatgtgtagttgatttgggggtttattggcagatcggtgagcagagggtatcctgaaactgagcaaacatagttaaataaagcttcctctgcgtttcgagaagtggaaacactttaagatgtcagtattaatagctgtcattaccctaccaacctatgattgtgagcccacccttggtttaagggcagacgtggttgtgacctagatcagaggggtaatatgtattccctcatctgattgctgagccctttgcttttctttgcatatggaacatttttctcaatagagaagcagagcactttgaaaggcacacccatattctatgtgctatgacatttcttcacctaaatctgcaattctataacccagttctctctagccaggctgtgctgacaatctttgtggacattgggtttaagtgaaaccaatataagacattgggtgcgttcctctcagacaaatgaaaaccgcatgggaggcagcatcattggtctctggcagactaagccacgaaggagcataagaaaaaaaatatttagatgtatgagaagaaaaaagtattcattataaagaagagcaaaaaagccaaatttctaaatcatatatttaacaaaggatctaaagagtcaccagagtaaacattacaaaacttctgggaacaccaaagatgaaaagtgcagcagaatgcaatgttcacagcgagggttataaaatatggatttaatgcaatttccatcaagatacacatgacagcctaaaaattaataatgggtttccaaaagtgcatatttaaaatactcacaaataactaaacaagtaaatgtactgagtactttttataaataattagcttttgtctccactgtactgcttaatttataaaaatactgcttctttttggaaatattttgttcttcctctatggtgatgatttattccattgtctctgatttcaggactaataatttccatttggcctaaagagataagtcctggagacagatttaggatacccagggaagagaaaaacacatccagagtggctttgcagccctgccttgctctgtttgactcccactccaccaccaccatatgcccacaaagagaatatcagctaaagaagaactaagagcatttgcagaagtcctgtttaagtgacacagcaatttgacattgaacacattctcttcagccaatgaggatcagatgtagtgtgacatcacttgtctctggaaaaaaaagccgtcaagaatactcacaggaatagagctactgcatagagaaaagtacctttctcacaataccaccaaaatctaaaaagtaggaaacaaaaggtataacaactttactaatttatttagtgtaacatgaaaagctaagagaaaaaatggaagtcaaatataacataaaattctaaaattacaatgtaaatctaaaattctctaggaatgatgaacaagcagaactaaggaagaactcttgtcttttcctgatcttactacataccttataattactcttctcacccacactgtttaatctacctaagtatttccttctttcagcatgcatttcctttacctaaggagacaatactttcccccatactctgtagtctgaggagataagatacttcctcaagtcagtagttggaaagagacacattgaggcataaaggaacattccccatcaataaaaaaggcaggcgagctttcatggtgtctgcatttatcatccaaatgacatggacacttgagtggtaaatttcatcttaattctgattgtacacttacagtctcttgtcacctcacagcctgccagcaatggcagtggtgtatgccaaggtatttgagaaatacaaagctggataaaagccttctcaaaagtctaggatgacctcagcacacttgtagcctggacagggaccctgagaaacgtatctactctccccacactagaagcacatgctttcacctacaaaaacttgcctcatcattctcttagaacacctctgccgaggttttcaaagaatgaagctcttccagatttatgtcagcttgtattcagttatctgaaggatcaccaatctctcctcttcagctgcaaaaatctgaatggctttataaaacaagagatttcattacattcattatattaatccatggcaggggtgggtggagaatgagaaaataaattcccatattttagtagatgacatcacctgtttttatgtgatttgagctgcaaggacactggatcattgctaattgggctgtatgctatcccatcatatccctaaagtttaattctctaaggtttttttcttttttgaaaattgttttggctatcccagatcctttgcatatctatataaatttatttagtgcagcaatttctacagaggaaaaagaaggaggaggaaggatcctgttgagatattgattgactccataaactgacttgagagaattaacctcttaaaaacattgaagatttaaattcattatatatatgtattacatataatatatatatatatatatcaatgttttagatcttttaaattttactcagttgtattttgtgggtcttggattagaggtcttccatattttttattataattatattatgcattttgatagttatgattttgattgtttttccatttttaaattaaaaatatatatatagagagagagaaattcaccctttttaattcacaattctgtgaggtttgacaaatgtatataatcatgtaagcaccaccatgatcaatatataaaatagtttcattattccaaaatatttccttgtacccccttgtagtcaaccccttctctatccttataatttgcttttgtaaaaatgtcatataaatggaattatacagtataggatttagagtctggcttcttgcatatagcatagtgacatgaaactaatcatgatgttgcatgaatctttagtttgttcctttttagtgttgaaagttattccattatatgaatgtaagatgatttatttacccatttcttaactgcgaaacatttgtgttatttctagatttgctgattaaaaattaagcagctttactttcttctagaggttttattttaagttgacctttagctctataatttaatttttgtatgagatatgagtaacagatcaaaatttattattttgcacatggatatccaattttccagtaccatttgttgaaaagtctatccttcattgacatgtttttgcacttatgccaaaaatcagttgactacatatatatgtggacctaatttgagactgctcttttttactgttcatatgcctgtcctttcaccaatacaatactgtcttactttagtgttagaataaatctggcaatcagggaacatgagtcttccaactctgttttgctttttcaaaaatgttttgcctattttcttctcttttatttgcatttccatataaattttagaattcctttgtcagcttgtacaaaaaaaaaaaaaaaaaatcctgctgagaatttaaatagaaagacactgaatctatagatcaaatgaagagattgacaccttagtcatcttatcaagaaacagggtattttacatcctggatttctttcatgcagatttgtatgttatataagacttagagttaactattttataggctttagtgctatgtaaatggtacttattttattcttaagtgtttaatgcaagtaaatagaaataaactcaatatttgtatattgatcttgaaactctgaccgtgctaaactcatctactgtagtaaattttatagattctgttgtgcccaagattgcaaatctgagaaaccacggaggagtcgaggagcccacacaggtgcaagcccacgagggttgatttacaagctcgagcttgggtccaagtatacccgacacagtggagcagggacttggaccccgaggtgggttttagcttagttttaagggctggtctaggggaccttcagaagggctggagcaattcctcaagttctgtttacattctgatatggggctttcaagggcattgagctctgttctcattctaatatggggtttccttcccctgacttgggctctgttctcattctaatagaggcttcctgcccttggcttgggctctgtttttattctaatatgggactttctaggacgttaagctgtaagctgtttttttttcctgtaactcaagtaaggtaaagttcagctcttattcaccggggcctgggatggctgtacttgtgctaacgctgaatttagtggaatggccttaattttctcggcctccacagattctttgggattttatacgtagacaaatatattgtctacgaatacagatattttatttcctctcttccaatcggtatgccatttatttgtttgtttgttttgttttactgaactgattcttcattggagtggcaagagcaggtatccttgttttgtggccaattttagcaggaagcatttagtctttcacttttaatcatgctgctgattatacgttttttgtagataccatttatcaggctgaagacatgctgaaagtttttatcatgaaaagaggttatattctgtcaaatactttttctgtatctatttacatgattgcattgttagtgttctaattctattaaattgataagttacatcatatcatgatgaacaacctttgcattaatggatgaatcccacttaattatgatttatcttttctttattggattccatttgatagtatttgagagttcgtatatatatgcatatctatctatatatatacacatatatgtatatatagatatatatatacaccaactgttgtttgttcttcttgtaatatctgtcaggttttggtatcagggaaatattagactcataaaatgagttgggatatgttttctcttttcttaaattatggagaagtcctatagaattggtattatttatttcttcagtgtttggtaaaatttgccagtggagccatttgggcctagagttttctatattagaaagtttctaactaaaacttaaatttgtctaatagatttaaaagtattcctttttattttcttttttattatttcattttatagtgaaatatatttgatacataacattgtataagttgaaggtgtataacatgttaataaaacacatttacatatttaatgtgattgtcattgtatcaatgattagcatctcttctatcacattataaaattgcctttctttttaatggttggaatgataaagccctactctcttaataggttttgaacttagaaataaaacagctatttgactggcaaaatgagtttcttcaggaatagcagagaattgcaatttgggacaaaacaagatttggtaaaaactatcagctaggtcaacaaaaaaaggagaggaacattattttgtggaaaggaaggaggaagttgggaagggttgttttgaacaaaaatgcattgaagaaaaggaagaatgtaggtgatgacactcattggctgagctgctgggataatctgtttcttgtagaaggtgcaaggtacatcttttcctgttggagtctgtaattgattctctcctgttgagaattcggttatggtctataacaggcatcgggcggtactggtttgagcttccccttctatcctcccaactccattttagtgaggtttcttattattaatatttgtgtgttggatgattaaaatacaatattgttatctctattcactataccatgcattagatttactacttgttgccagtttgtaccctaaacaacatctgtcctatgccgccactcttatcccctggttactatatttttacttttcttacaagtgactttttagattccacgttgaagggatatcatacagtacttgctttctttgtctgacttatctcacttggcataatttgctcaaggtccatccacgtttttgcaaacggcaagatatctttctcatagctataatattccatatatatattatacgcacgcacacacacacacacacacacacacacacacaccgtctttatccattcttccattaatgggcactttggtggtttccatatcttgactattgtgaataaagctgcaataaatatgggagtggatatacctctttgatattctgtttcaatttcctttgggtatatacagagaatggaattgtggatcatatgatagttctacatttaattttttgaggaaactccatattgttttcatagtggatgaaccaatatgtatttctaccaacaatatacaagggttccctctgtccaccaccttgcccacacttattggtgttcttttttattttttttaagattttatttgtttgagagaaagaaagagagagagcaaaccgaagtgtggggagggggagagggagagaaagagagagggagaagcagactccctgctgagcaggaagcctgatgccaggctctatcccaggaccctgggatcaagacctgagcagaagacagatgttcaactgccagtcactcaggcactccatcttttgtgttcttgatgacagccattccagcatatgtaaggtgatatcttgtggttttgatttgcttttccctgatgattagtgatgctgagcatcttttcatgtacctgttagacatttggattgtttctttagaaaatgtctatttaattcctctactcacctttaaatcaacttgacatttctgttattgagttttgtgtattcttcatatattttggcattaattcctttttttttaagatttatttattcatgagagacacacactgagagagagaggcagagacataggcagagggagaagcaggctcctcacagggagccagatgcagaactccatcccggatcctgggatcacaacctgagtcaaaggcaggcgcccaaccactgagccacccaggcatcctggcattaactccttatttgatatatgatttacttaattttttcctgctctgatattgccttttcattctgttcattgtttcctttcctgtgcagaagcttttcagcttgatgtagtcccattttgttgattgctgtttttgttgtttgtgtttgagatgtcatgtccaaacacatattgccaaggcaaatggcaaggacattttcccctgttttcttctagggctttccatatatttttcttctgttctttgctggttaaattctcttgtggggcagccctggtggctcagcagtttagcaccatcttcagtctgggttgtgatcctggacacccaggattgagttccacctggggctccctgcaaggagcctgcttctccctctgcctgtgtctctgcctctctctctcgtgctctgtgtctctcatgaataaataaataaataaataaataaataaataaataaataaataatcttaaaaaaaaataaattctcttgtgatccaagaaaatatatgcactgtataaattcaatactttaacatttctgaggtttgttctattgtcagaatgtggtctctcttggggaatattccacatccatttgaaaaaatatgtattcttgatgttgtgggtgaagtgttttataaatgtactcaagttggttgatagtattgctcagctactccatagccttattgactttctgtttaatttttctatcaaatactcaaaaatgagtgtagggcctccaaccataattttggattttctttctcttttttctatcagcttttgtctcatatattttgaaactgtgtcattaagtatatacacacttagaattgttatgtctttgtggagaaataacccctttatcattaagggatatctcccttaatccctcataatattccttgttctgatatctactttttctagtattcacataattattccaactttctttggattttgtttacatggtatacctttctccatttacttttactgtggctatgtttatatttaagatgggttatttataaacagatgatagtttgatcgtgccatttttattcattcccataacctatcattgaatatatgtttatacgaagaacatttaatacaattattaaaatgattggattatttttgctaaatattttctattaattatattagatatgtgctcactttttattctttcctgcttacttttgggttatcagttgccctacaatttactgcatataaatatagtctatgttcaaattctaatgcaagaacttaatcagtgtactctaaatttccctctcccacttttttgtgcaactatgtcatacatgaagtggaaaaaaaatgcaaaagaaaaacttaaatctccttcctttctatagcccattgacaagttcctacaacagcccaagtgatcttcctctgggagctcagctatctcaatcaatgctgacactttgctaagggcaaaggcaaacttagcaaaccacctttttgcactgaagatgtcttaagaattctttcttggtgttggctccaaacactaacatttccacatcaatatactttactttttcaaatcccataaagacacaatgcattgctactatttttgctttacagagtctgttaccttatacaacaatgatccccccaagtgacatttgacgatgtctggagatattttctggtgtcacaactgggcggtaggttactgatatctaacgggcagagggcaggaatgttgctaaacagtctacagtgagcaggaaagattcctacaaaaaagaattatccatataactgtaacaaaacctacaaacttacagttataaaataaataagtcatcggatataatgtatagcatggtgactacagttaatcatttattcattaactgtaaatagtaaacttagtattatcaatagttaacgatgtattattgatgtggagaacaatggcaaaagaaatggagctaaagttaaatctccttataatttgcagcccattgacaaatacttgaggcagacagaataaaactctcctccaggactcccaatcctaatattaatgccttctagagaaaaacatctccagcatgaagatagtcaggcctccagaatcctgtaagtcttttttaacatatgaaaatcctttttaacacttcccttgtctttatctcccccaactccaaagtgtctagtcagtcactcctcccccttatgatgcagctctcttgacccacaggccctaatccatgccatatgaaaaacagttttttgcactaaaaactctcaaaaattttgtttttagcttttggttccggaaccttaccaacttcaaaccacagcattattaccaatgtattgatattatcaatattatcaatagtcaactattaatagttaacaaataaatgtatatttgaaagttgctaagagagtcgatcttaaaagttctcatcataagaaaagaatgtataattatgtatgttgagggatgttaactagatttactgtggtgatcattccacaatgtatacaaatatcaaatccttatgctatacaactgaagctaatataatgccgtgtgtcaattatctattggttaaaaaaaaaaatccttctcagtataccaatagttctatggttgagaaactttttttaatgagagaagaaagaaaagatgatttttctacttaaccttgatttatgcattttccaatgcttttcatttctttgtatgaaccaggtttctgtgtgatatcatatttctaccacatgaagaccctccctttatagaacattgcaaaaattccatggacttcaatcttcctgcatctcaaaggtaagaaggaatgcatgactctcaagtacacagagtgaaagaagagactgaatgggttttgggttcattctctccaccttctctctcttcagagcacactcttaagccctctcaattctatcatctctcaggtgcaagacacatcttttcttttaagaagacggtgttttgtccttgcctcaggctttccctaaacaatgttgttggaatcaactgctggattgattcttaagaagatgcaagatgccctcaacaataaccaatgggaaaccttgaaagagacaaggcttattacttacaaatcctggaaattacacagcatgcctaggaacatacagtgaggtcaagggtaggtctggggaggagcaaacctgggtcctgcctttactgatgctgagagtaggagcccagaggtttgaaaattcacttcaggttggtgaatttaaaacattagaggagaaattaaggcataggaagagaaaaaaggaaggagcagggagtcagttacctaaatcaactagatctctaaaataaacaaaataatcagagcgggacagttggctccttctctagtcttttggctggcagcctgttgattcaaattagcgtccacctaagccaagagagactgggagagaagagcttgcaggacttagtaatagtagcagaaagagtctataataatagagaaagtccggaagagcaacaaaccaaactaagtgaccggcagactcgaaacctggccaagatcctgctggtcacaccatggacgacccatgggaaagacggaggcacctcaagaagctggcttcagggacaggtaaagaggatgttcctggtccctgtcaggagcgccctaactaaactgaactaaactaaactgaacaaaaaccaatgtgcttattgcaaagaagagggcaactgggtgaaagactgccccaactaaagatttaaggcctctgccgagatcttgaagatggaggacctggaagattaggggagttggggttcagcacccctccccgagcccaaggtagctctcagagtggagggacaaccccttgaattcctagtggacactggggcacaacattccattttattacaaccccaagggaaattggctagcaagacttcatgggggcaaggggccatgggtgcaaggagctacgggcaccaaacagtactcagggactacccgaagaactgtggatctcggcatgggccgggtatcccattccttcatggtcatccctgagtgcccctacctgttgttaggtcgggatttgctcaccaagctaggggcacaaattcgcttccaccccaaaggggcaaaaatcctaaacaaagaggggcacccgattcaggtgcttgtcctgagtttagaagacgaatctcgtctccaccaaacaccctcagccccaatgagtgacattgactgttggctgcaggcatttccccaagcgtgggtagaaactgggggaattgggctctcccagcaccaaccggccatatacatagaactaaagccgggggcagaccctggcagggtccgacaataccccatgcccctcatctccctaacccagactgggacccccgctctgcgtgactgtcaagaaattttggcacaggtgcgtggaatcagagctgatctccaggaccagccactgctgaacgcagatgccacttggtacacggagggcagcaatttcgtccaagaaggaaccagatacatgggggcagccgtaaccacggaaacggagacccgatccgggggcaccgaccctgccggacaccaccaactatactgatgctgacttacactggatcaaacgcttgcctaagacccagtgcttgcgtggctggtggagggccgcagactccagcatcatcctgccaaaggaactaggacggcgagtcctgtccagagtgcatcggagtactcatatgggagcaaggaagatggaagacctcatacgacacgcaaagatcactattaaagactcttgagcaaagatccagcagattgtggcgagctgccatgcatgccagttaactaatgccaccgcccatggatctaacccggacacccggctccgggggactgcccaggagcctactgggaagtggacttcactgaggtaaaacctggaaaatatggatgcaagtattactagtgtttgtagatactttttcaggatggacagaggcatttcccaccaaacatgaaacagcacagaccgtgaccaagaaactgctgggagacatcttaccaaggtatggtttcctgttaagattggatcagacaacggcccaggattcttctctaaggtaacacagggagtggcactagtacttggggcagattggaagttacattgtgcatataggccccagagctcaggacaggtagagaggatgaacagaacattaaaggagaccttaactaattagccctggagactggcggggactgggtgactctcctcccctttgccctatatagggtgaggaactccccatataagatgggactgactccctatgagatcatgtttggtcttcctccacctgttatccccaatttaaaacctgaggtgcttgctccttttctccctgcaaatgttacaacgaacccatgagcaggtgtggcctaagctgagggccctctaggagactgagccacccctggatccccatggatatcggcggggtgactgggtgtatctgcggagataccaacaccagacgcttcaacctcgctggaagggaccctacattgtgatcctgaccactcccactgctctcaaggtagacaggattactccccgggtccactacacccacttcccaccggctgatccacacgctgttctcaaggactttgttccagaatggaaaagccaaccagacaaggacaatcccctaaagctaagactgcactgttctcacttatttccctcctccaagactccctagtctgaggttgtccttcttcactgggacgtaaacgggaatgagaacagcaacaaggttggttcgaatcctggtttaatcattccccatggctcactctgagaccaacctggacccttgattgggtccttccttaggttcctctgagagggggaaatatggatgctgagaaaattaaggccattccaccttaagttcagcattagccctggagcattagccatctcaggcctctgtgaacaagagctgaactttaccttacttcagtgaagccctatattagaatgagaacagagctcaatgcccatggcaaaaagtcccatatcagaatgagaacagagcttaatgcccttgaaaacccatatcagaatgtaaacagaacttgagaaattcctccacggacgtcccctagaccagcccttaaaagtaagctggaacccacctcggggtccaagtccctgctctgctgtgtggggtatacttgatcccaaattagagcttgttaataaaccctcacgtgtttgcatcggtgtcggctccttggtggtttctcggattcacaatcttgggcacaacattttcagacagaggtaacaagttagtttttgtcaaaaatggcacatcattcctctgaatctaattcacgaataattttacctgatgtcaaaattatgacctgaagacagaagtgactggaacaggttcattgtgtgactgcaggagatgagacacagagtctggttacaggcagagctcatcttcgcctagttaacgacatgggcttgcctgaacttctccatcccacaggatttgagatctgcagctggaccttggaacttcccatccaagatgcaattctgatccacatgattagcaccctaacttcctaatctgagttaaattttctttaaagatgatattagtaggcaatattctggagcctcatcaagaatggttttgtccatctgtcacagtcttaagtaattttggcaaagaaatagcaaagtttcaagacagcgaaagtaaaaccaatgaatcaaggaagtagaaattagtaaaaatttcttgtgcacaagtcaaaagacagtttgcacaccagaagtatttaaaccacaaggtgcaaggctcagggatagcttattataaggtagctatgtcatgagaaagcagtgactgtttaatcttcacaaggattggctacaatattcagttctcagtggttacctcatatcaaccatgggaaagagttcaatttcatttgtccttcccagaggcagaagcaagaaatccaattcaagatgaccttgcaaaataagctgaattacctttgtttgcatgattaaacttatgccttccaaaggtacaagcaagaaatgatcaggttcaagttagccttgcaaaataagctaaattaagctttgtttgtaaaatgtttgaggctggatgccatttgtttctgattttaacagtacagggcaggtaagtctggatccaagaagagcccagaaacatggtatctcctgcacagaaagaagaaatgaagcatgcctcagtgaaacctcaaaatccctcgtgatccataaaggcacagacttgaaagaataaatccaccgtagggtcaaatatctatcctaattatgttaggacctgtattctgaatccacacaggaaactccctcccctacaaagactcatgagtgacccttgtcattctgcagctctgcactcaccagctgtgggaccctgagcaaagtccttcacctttctgaaactcaatatcttccttgtaacgtgggggtgatcttcacatactgcaggtatagtgggagccccaggaatttttcattccaagtacagtatatatatatatatatattcctcacaacgttcagatgagatgctgtcaatgcctccagccaacgaccatcaggagcacacctgtgaatgaacaagttggtttaactgttcattgtcatgagggagaaaattcaccatggagaaaaatggggctctcagcttcatctctgctcttttttatcttaattaaagtctgtttcatgcccagcatggagtccaaaacggggcttgatttcacaaccctgagatcaagacctgagctgagatcaagagccagacgtttaatccactgagccatctgggtgcccacatctctgctcttaagactttacaactagttcgttcagtcatccagattacctaggaagatctctcttacttaacgtcaactctttatgtattttaatcacatctacaaaatatttttcagagcaatacccacattaacattgattgaataactgaggactataacctagccaccacataaaagtgacaatttaactaccataaggtttgggttggttttggtgattttgaggaggatttaagaaagagagactctctcttagttgctttgtcagaaagtagtggtgggatggaaggaaggaaggaagactagattgaggctaaagctctaacttgtaaggaagcggcagccagtcatgtcatctagggaagaggattgcttggtcacacacacaatgtttgtgttttgtctgtgttcagacgtggttactaagtggccttgttttctctctctctctctctctctctttttcctcttgatccattatggtcatcacagagtggctgatactgctgttctctctctctctctctctctctctctttttaaagattttactttatttattcatgagagacagagagagagagagagaggcagagacacaggcagagggagaagcaggctccatgcagggagcccgatgtgggactagatcccgggtctccaggatcatgccctgagccaaaggcaggcgctaaactgcttgatactgctgttctatgacatttttatgttcacctggaaaacaccagaacctggctgtgcgtagtacacctggttactagtaccaggtggctcccagatgccagagcttttcctgtctcagatttcctaccatctctgtcagtatagggtatgatagaatgttgagcaatagaaggtcatctaacaggcacagagtgattgattctaagtggaaacccctagtaacttatagcttccataacacagaaaatcgattcttctggaaaaaaaaaaaaaagatttccctctaagcactgccttcatcttcagctcaattcctagtccctcacaaatatctggagtatgtagcaggttaaagaatatgaaaagttccagaatgttctgagaacattttctaagtcacataaattccccctcattctaccttcaacatttgatttacattcttaaatgtaaaaaaaattttcaaaactaaaaatgagtgggaaaaattggaaagagtgacaaaacatgagagactcctaactctgagaaatgaacaaagggtggtggagggggaggtgagggggggaggtgagggggggatgcggtgactgggtgatgggcactgaggggggcacttgatgggatgagcactgggtgttatactatatattggcaaattgaacttcaataaaaaaatatttttttaaaaaaaaagaaaactaaaaataatagaatgaggcagcccaagtggtctttaatgtaatcaatgtcccaaattgcctttaaatgtaggcaggcagcactgaaacagagcgtgaagaatactcagggtagggaaaacatgaagttgacagatgatgcaattactgtaggcaccattaataacattatcacttcttttattgtcccagtgcaaatactggagcttttgagaacatgagaagagcttaattcaactggatttacgtaagtagaaaggcaaaggtgttccttggctatcgtcacaagaaatactctaggtgataaatcaaaatttggacaattttatatacagtatggaatcaaaaaagaaagataattaacccacatgtggacgccaggaaaagagagggagttagggatttttagggagaggaatccttttatgggagaatttttggaggctgtaacccagaaaagcctgaagaaaaccatgtaagtgataatgttatctatacatgaggctactcagtaattcccacccccttaccaccagcaagctatcatacccataggaatgtgttttaatacccttcctcctttcctagataattcccccaagtcactcagaatggaggctacctgagaaacaaggggatttcccaatcaccttcctgcttcctagtacatcctctaaaagtggctactgaagtgtcatcatagggattgtgtctgattggagggaacctgacctggcagggtttggtttagatgtctttagattcctttctcagttgggtcctcaccatcgctctgcaactcagaacagcaactgcggagaccacaccgagaaaaagatgaccctaaacagagttctgattttggggaccctcatcatgatgagcctctctggtggtgaagatattgtgggtgagtgcacacccgagggatgtggggactagtctagggaaaagaaattaaaggggaaatgagagaatggtataatatagtggagactcctcaaaggtgttctcaatactaagcagatctaaaaattatggtcattcttctttcacaaaactactgcccatgcagttgcagagttcatcaaaaatattattccatttggaatatcagatccagtaaatatagcctggagggcacaatggcattcatttatgattatctctaaggttagggatgtttccacagtggatgttttgttactaaatttcatgaacttttgttcccaaatatctctgaacaacattttgaagctctttataagtttttctgtagtctcacttggtataaagaatcccatgaattatgtatgttatgtagacataaagaagagtatcctctttgtcttatatttatatccatttttatgctgggaactggcatgaggatagtgggtatacaagtccagttgaatacctttagacaagtcattctaccacaagatgtcatatatgtcacatcagaaataatcaaatcaaatattcatttagaaatatgtttccaaaaaaaaaaaaaagaaatgtttccaattgtgatgacgtgtaaatgccaatgattatttttgtttcttaattgttactattacaagtgcagcttaatttttattattttaattccatataatagagtattatattagtttcaagtgtacaatattatgtttcaacaactctatacattactcagtgctcatcatgacatatgtatactcttaatcccttcacctatttcactcatcctccacccacctgccttctggtaaacatcagtttgttctgttacaagtctgttttttgatttgtctcttttttaatgcatttgttagttttgtttcttaaatttcacgaatgagtgaaatcatatggtagctgtctttctctgattatttcactttgcattatactctctagcttcatccatgttttacaaaaggcaagatttcattctttttatggctgaataatattccattgtacattcatatacacaccatgtcttctttatccattcatctatccatggagagttgggctgctttcataattttttttctttaacaaagtagagaatatctttatttttattttacaattgagaattttatgatggaagacttgcttaattaagttatattgtattcaaattatatgacctctcatctataaaatcgagacccttaaaagaaaaactggggaagcatacactaattacttaatccctaaggcccatctctcttcattgcccacctcttcccactttcttttcaggtattcttttatcatcctttccttccaggatctatctctggtcttttttattgttgttttattgacatgaagagtgggtttctaaaaatcaaagtagaaaaaagtcaagagttaagaggggaggtaaaatggagcatactctaatactcaccaactttgttaaccatgacttctcctattctaatttcacttggtggtttctcttgcttctccagagaatttccattttcctttcttcagtgtcttggttccttttttcaaacatgagtatatgcaattattctttccatctggtacttgtccaaggctgccatttgttgatgaacagggctgactgaaaccgattcacttctgtattttcagcatcagctgggtccacagtcctgcttagtgaggttccttctactttccttcatctttgaatccccaaaatttatctcactgtttgctcaaaagtgtgtaatgaatgtcaattgctattctccaggatcacagatatttgggttagtggaagttgatagacacagtgatagccaaaccatatggaagtgaatcaacagtgatcaaggctgtcttatgaccaaggataaaggctagaggattaagagggtttgatggagggccctttaagtaatcaaccaagagggggtcgtgctgggaaaggaagagagtgagttggatgaggcatagataaatctggaaagcaagacattgggatggagactataatgtggtcaaaacatgttcgatgagactaattaactaaaatgttgctaaccaaacaaacttcggaaaggaattggaggtacccaggaaatctgaaagataactttgttttaaggagacaacctctaaaaagaccaaggaacatacaagaagaatgtgttttggtttgactggcagatgagatatttgcagaggaagtgggagcataagactgctgctgttccctgcaggactcaccacagcgtactgtatttgttcctgtactcacttgactctcccaccacgcaataaactccttgaagacagaaaccatgctgatgggtgtttgactccctgctcctcatgatgtctgacatcttgctgatgttcagtaaatgaggaagagcataaggaggaaatgataaaaacctcacatatctctttacaaaattttctagttaggctcaccgggtggagtcatactgctgccattctactttggcatccttgcaaaatgcactgtccatttgaagagaagggccattctttaccaggagttctaaacagatagaaatgcaatgcagaataaggagagaagtttacaaggaaaaaaaaaaaaaaagagggatgaggagtgacagaaatctaaaatctaatgaatcttccattttgtacttctgaggaaatcaagtgctctcctctgaggattactattgttaacaaaacagagaccaaggaatattatttatttatttattatatactttgtaatgctgttgctgtccttgtcatactctttcttataccctaaaatagttaaaaattcttttaaaacaatacaatcctttgtgcttttctttgacaaaataagaaatagaagagggcacaggagagaggaggaggaagaaggaaggaaggaagcgttacctctgcagaaaatattctgctctgaaccagtcctggggggagagcaatcaaagtgtatgtgttattaactgatgaaagaattaagagataaaactgatgaagcagagagaagttaagtgaatttctgataaaggaagctatagccatgataatttattcattccttctttcatttcattgtaatatttatcataagtctactgcgcataccaggtgctgagctacacacacgggaagagcagcagcaagactgttgtaattgtgctctcacggagcatacacgatagtggaaaagcagagcgtattctgactggacaactaccaacacggagagagagggggcaggtgctgggaaacgtgcctaaagactgtgccaagaatgaagcgcatatttaaagtcaggttttctaagtcacctgtccccaccaaattacctagataactttcaaatcatcctgaaaacctacgaattcagcttgagatttaaagagagagcagctggaacgctatagtgagaagagttcacgcttccatcaaggtaggaagactggggttgggggtgggggggtgggggtggtaataaagaaacaaaaggcatccaagggggagggaccccacgaggggccgggcgaaggccacagcgagtgtccccaagacaggaaagccccctcccggagaggcaggagctgcaccaatcttcccgggtggaaaggggctcgcagggagttggagcaggaccccaggagggcgggatgccctcaggctcctgggacactaacaggcacctgcgctccgggaagagtgcgccacaccccacggccgagctccctaaagggctgcagtgcacgcccgcctggacccgggagcagctccggggcggctcgggcagaagctcctggcagacggagctgcgctaccgagagcgggattccagcagtgcaggtccgggagcccagggcgtgagggacacagcccaagatccgacgctcccccaggacaggcagaagccaggagggcccaggacagcaaggacactcctgccgccaggcggcctgaactatgcagatcagcggccccgcccggagcctccaggccctgcagacggggagctctgtagttactgcgggagctgactccagggctccagagctggccccgcgactgcggttgttcctcctggggcctcacagggtaaaaatcccccactgagcctcacagtggcctcaatggataaacagcttaaacatctttcaccgagcccagcaccaggcagggggctgagcagctccccaagtgctaacacctgaaaatcagcatagttggcccctcccccagaagacccgctagaccgacaggggaaaaacaaattattgaccaagcagcactagaaagttccagagaaagtcgagggatttacagtatacagactcagaggatactcccccttctttctttgttttttgatttctgtttgctcccccccttttttcttttttcttttcttcttttttatttatctttctttccttctttctttttttctttttcttttctcctttctcttctctctttatctccttttcccaatacaacttgttttaggccactctgcactgagcaaaatgactagaaggaaaacctcacatcaaaagaaagaatcagaaccacagagttacaaaatttggattacaattcaatgtcagaaagccaagtcagaagaactattataaagctactgatggctctagaaaaaagcataaaggactcaagagacttcatgactgcagaatttagatccaatcaggcagaaattaaaaatcaattgaatgaggtgcaatccaaactagaggtcttaacgatgagggttaacgagatacaagaacaagtgagtgacatagaagacaagttgatggcaaagagggaaactgagggaaaaaagagacaaacaattaaaatatcatgaggatagattaagggaaataagtgacagcctgaggaagaaaaatctatgtttaattggggttcctgagggcaccgaaagggacagagggccagaatacgtatttgaacaaatcctagctgagaactttcctattctgggaagggaaacaggcattcagatccaggaaatagagagatccccccctaaaatcaataaaaaccgttcaacaggtcaacatttaatagtgaagcttgcaacttccaaagataaagagaagatccttaaagcagcaagagacaagagatccctaacttatatggggagaaatatcaattaacagcagacctctccacagagacctggcaggccagaaagggctggcaggatatattcagggtcctaaatgagaagaacatgcagccaagaatactttatccagcaaggctttcattcagaatagaagaagagataaagagcttccaagacaggcaggaactgaaagaatatgtgaccaccaaaccagctctgcaagaaatttgaagggggactcttaaaattcctctttaagaagaagtccaatggaacaatccccagaaacagggactgaataggtatcatgatgacactaaactcatatctttcaatagtaactctgaacgtgaacgggcttaatgaccccatcaaaaggcgcagggtttcagactggataaaaaagcaggacccatctatttgctgtctacaagagactcattttagacagaaggacacctacagcctgaaaataaaaggttggagaaccatttaccattcaaatggtcctcaaaagaaagcaggggtagccatccttatatcagataaactaaagtttatcccgaagactgtagtgagagatgaagagggacactatatcatacttaaagaatctatccaacaagaggacttaacaatcctcaatataaatgccccgaatgtgggagttgccaaatatatcaatcaattaataaccaaagttaagacatacttcgataataatacacttatacttggtgacttcaatctagcgctttctacactcaataggtattctaaacacaacatcttcaaagaaacaagagctttaaatgatacactggaccagatggatttcacagatatctacagaactttacatccaaactcaactgaatatacattcttctcaagtgcacatggaactttctccagagtagaccacatactgggtcacaaatcaggtcttaactgataccaaaagattgggatcgtcccctgcatattctcagaccataatgccttgaaattagaactaaatcacaacaagaagtttggaaggacctcaaacacgtggaggtgaaggaccatcctgctaaaagatgaaagggtcaaccaggaaattaaggaagaattaaaaagattcatggaaactaatgagaatgaagatacaaccattcaaaatctttgggatacagcaaaagcagtcctgagggggaaatacatcgcaatacaagcatccatccaaaaactggaaagaactcaaataaaaaagctaaccttgcacctaaaggagctagagaaaaaacagcaaatagatcctacacccagaagaagaggagagttattaaaaattcgagcagaactcaacgaaatcaataccagaagaactgtggaacagatcaacaaaaccaggagttggttctttgaaagaactaataagatagataaaccattagccagccttattaaaaaaagagagagaagactcaaattaataaaatcatgaatgagaaaggagagatcactaccaacaccaaggaaatacaaacgattttattttattttttattttttacaaaaacatattatgaacacctatacgccaataaattaggcaatctagaagaaatggatgcatttctagaaaaccacaaactaccaaaactgtaaacaggaagaaatagaaaacccgaacaggccaagaaccagggaggaaattgaagcagtcatcaaaaacctcccaagacataagagtccagggccagatggcttcccaggggaaatctatcaaacgtttaaagaagaaaccatacctattctactaaaactgtttggaaagatagaaagagatggagtacttccaaacttgttctatgaggccagcatcaccttaattccaaaaccagacaaagaccccaccaaaaaggagaattatagaccaatattcctgatgaacatggatgcaaaaattctcaacaagatactagccaataggatacagcactacattaagaagattattcaccatgaccaagtaagatttatccccaggatgcaaggctggttcaacactcgtaaaacaatcaatgtgattcatcatatcagcaagagaaaaaacaagaaccatatgatcctctcaatagatacagagaaagcatttgacaaaatacagcatccattcctgatcaaaactcttcagagtgtagggatagacggaacattcctcaacatcttaaaagccatctacgaaaagcccacagcaaatatcattctcaatggggaagcactgggagcctttcccctaagatcaggaacaagacagggatgtccactctcaccactgctattccacatagtactggaagtcctagcctcagcaatcagacaacaaaaagacattaaaggcattcaaattggcaaagaagtcaaactctccctcttcaccgatgacatgatactctacatagaaaacccaaaagactccaccccacgattgctagaactcatacagcaatttgtcagtgtgtcaggatacaaaatcaatgcccagaagtcagtggcatttctatacattaacaatgagactgaagaaagagaaattaaggagtcagtcccatttacaattgcacccaaaagcgtaagatacctaggaataaacctaaccaaagagagaaaggatctataccttaaaaactacagaacacttctgaaagaaattgaggaagacacaaagagatggaaaaatattccatgctcatggattggcagaattaatattgtgaaaatgtcaatgttacccagggcaatttacacgtttaatgcaatccttattaaaataccatggactttcttcagagagttgaaacaaatcatcttaagatttatgtggaatcagaaaagacccggaatagctaggggaattttaaaaaagaaaaccatagctgggggcattacaatgccagatttcaggttaatactacaaagctgtggttatgaagacagtgtggtactggcacaacagacacatagatcaatggaacagaatagagtatccagaagtggaccctcaactttatggtgaactaatattcgacaaaggaggaaagactatccactggataaaagacagtctcttcaataaatggtgctgggaaaattggacatccacatgcagaagaatgaaactagaccactctcttgcaccatacacaaagataaactcaaaatggatgaaagatctaaatgtgagacaggattccatccacatcctagtggagaacccaggcaacaccctttttgaacagccacagtaacttcttgcaagatacatccatgaaggcaaaagaaacaaaagcaaaaatgaactattgggacttcatcaagataagaagcttttgcacagcaaaggatacagtcaacaaaactaaaagacaacccacagaattgggaagatatttgcaaatgacgtatcagataaaggtctagtttccaagatctataaagaacttattaaactcaacagcaaagaaacaaacaatccaatcatgaaatgggcaaaagacatgaacagcaatttcaccaaagaagacatacacatggccaacaaacacatgaggaaatgctctgcatcactgtccatcagggaaatacaaataaaaaccacaatgagataccacctcacaccagtgagaatggggggaaattaataaggcaggaaaccacaaatattggagaggatgtggagaaaggggaaccctcttacactgttggtgggattgtgaactggtacggccactctggaaaactgtgtggaggttcctcaaagagttaaaaatagacctcccctacgacccagcaattgcactgctggggatttaccctaaagatacagatgcagtgaaacgccgggacacctgcaccccgatgtttatagcagcaatgtgcacaatagccaaactgtggaaggagcctcggtgtccatcgaaagatgagtggataaagatgtggtttatgtatacaatggaatattactcagccattagaaatgacaaaagccaccattttctttgaagtggatggaactggagggtattatgctgagtgaaataagtcaatcatagaaggacaaacattatatggtctcattcatttggggaatataaaaagtagtgaaagggaataaaggggaaaggagaaaaataagtgggaaatatcagaaagggagacagaacatgaaagactcctaactctgggaaacgaactaggggtggtggaagcgacggggggtgaggggtgactgggtgacgggcactgaggtgggcacttgacggtatgagcactgggtgttattctatatgttggcaaattaaacaccaataaaaaataaatttttatatatttaaataataaaaaatgaaagaaagccagagtagtgatacttatatcggacaaactagactttaatccaaagactatagcaaggaatgaggaagtacactgtataatattaaagagaacaatccaacaagaagacctaacaattgtaaatattaatgccccaacctgggaggactttaacacccacttacagcaatgtacagattatcttaagtagaaaatcaacaagaaacaatagctttgagtgacacattagaccagagagacttaacagatatgttcagtactctccatcctaaaacagcagaatatacattcttttcaaaggcatgtgggacattcttctgaacagaacacatcctaggtcacaactcagccctcaacaagtacaaaaagattgagatcataccatgcatattttctgcacaatgctatgaaacttgaagtcaaccataagagaaaatttggaaagaccaaatattcacagaggttaaacaacatgctattaaataatgaatggatcaaccaggaaatcaaagaagacattaaaaatacatagaaacaaatgaaaatgagaacacaatcatccaaaacctttggggtgcagcaatatatataacaatacaatgtcctatcttaagaagcaagagaaagctcgaataaacaacctcaccttacacgtacaggattttatacctaaaggaaaaagaacaacacacgaagcctaaagcctaaagcagaagaaaggaattaataaagattagagcagaaataagtgatatagaaatgaaaaaaaaaaaaaaaaaaaaaccaaaccaaacaaaaaacagtagaacagatcaatgaaaccaggagctggttctttgggaaaaaattgtaaaattgataaactcctagccagacttatcgaaaaggaaaagaagggacccaattaaatacagtcacaaatgagagaggagaaataaccaacgccacagaaatataaacaattataggacagcattatgaaacactatatgccaacaaattgaacaacctggaagaaacaacttcctagaaacataaactaccaaaactgaaaaaggaataaatagaaaccttgagaacagacccattaccagcaaagaatcgaatcagcaatcaaaaacctcccaacaaaagaagtacagagccagatggctttccaggagaattctacaagacatttaaggagagttaaacctattcttctcaaacttttcaaaaaaaaaaatacaaatggaaggaacacttccaaattcattttatgaagtcggcataactctgataccaaaacaagagaaatattccactaaaaaagagacatatagggcaaagtccttaatgtacatggatacaaaaatttcccataaaatactaagaaaccaaatccaaaagtacattaaaaggatcattgtaaaatgatcagtgagatttattcctggactgcaagggcagctcactattcacaattcaaacaatgtgatacaccacattaatgaaagaaaggataagaaccacatgatcctctcaatagatgctgagaaagtatttgacaaaatacggcatccattcatttaaaaaaatcaacaaagtagagtcaacgagaatatacctcatcatcgtaaaggccatgtatgaaaaaaacactcctaatatcatactcagtggagaaaaattgaaagctttccctttatggtcaggaagaaaacggatatctactttcagaactgttatttaacagtactggaagtcttagccacaacaataagacatataaaggcatccaaatcagctaggaagaagtccagttctcactatttgcagatgacatgatactctatatagaaaacccaaaggactccaccaaaaaattgctagaattgatacgcaaattcagtaaaggcccaggatactaaatcaatgtacagaaatctattgcatttccttacatcagtaataaagcagcagaaagagaaaccaagaaatcaatcccatttataattgcaaccaaaataataaggtgcctaggaataaacctaactaaagagttgaaggaactttattctgaaaactataaaacactgatgaaagaagttgaagatgatataaattgaaagacattccatgctcatggattagaaaaccaaatactgttaaaatgtctgtactacccaaagcaattgacactattgcagtccctatcaaaatgccaacagcatttttcacagagctgaaccaaacaattctataatttgtgtggaaccacaaaagatcccaaatggctaaaacaacctttaaatacaaaacaaaactggaagtatcacaattagggaattcaaggtatattacaaagctgtagtaatcaagacagtatgatgctgctataaaaacagatatagataaatgaaacagaatagaaaatccagaaatgaacccacaattgtatggtcaattaatattggacaaagcaggaaagaataagcaacgggaaaaagacagtcctaacaaatgttaggaaaactggacagcaacatgcgaaagaatgaaactggaccagggcgcgatcctggggtcctgggatcgagtcccgatttgggctccctgcagggagcctgcttctccctcctcctgtctctctgcctctctctctctctctctatcataaataagtaaataaataaatcttaaaaaaaaaaagaaactggaccgctttcttacactgtacacaaaaacaaaatcagaatggattaaagacctaaatgtgagataggaaaccactaaaatcctagaggaaataggggcggactctctttgatattggtcataacaatttccaactagatatgtctcctgaagcaacagaaacaaaagtaaaaataaactattgggatttcatcaaaataaaatcttctgcacagtgaaggaaacagtctacaaaactaaaaggcaacctatggaatggaaggagatattgcaaatgacatatctgataaattgttagtattcaaaatgtataaagaatttatcagacttaacaattaaaatataaataatccaattttaaaaagggcagaagacaggaataaacatgcttccaaagaagcaaacagacatgaagagatgctcaacatcattcatcatcagagaaatacaaataaagctacaatgaaatatcacacacatcagttaaaatggctaaaactaacaacataagaaacaacaggtactggtgaggatacagaaaaagaggaaccctcttatgcagttagtaggaatacaaactggtaccggtacagccactctaggaaacagtatgaagcttcctcaaaacgttaaaaatagaataaccctataatccagcaattctactactaagtatttgcccaaagaatacgaaactactaattcaaagggatacacacactcctatgttcatagcagcattattaataatagccaaattatagaaagagcccaaatgtctatcaactgatgaatggagaaagaagatgtggtatatatacacattggaatataatgcagccataaaaaaggatgaaatcttgccatttgcaaagacatggatggagctagagagtattatgctaagtgaaacaagttggtcagagaaagacaaataccataggtttgcattcatatatggaacttaagaaacaaaatgaacaaaggaaagaaaggaaaataaaaaaatggattcaaccagagagaacaatcagaggattaccagtgtgggggtggctgggcagatgggcaaaattggggttggagggcagccccggtggtgcagcagtttagcgccgcctgcagcctagggtgtgatcctggagacccaggatcgagtcccacatctagctccctgcatggagcctacttctccctctgcctgtgtcgctgcctctctccctctctctctctctctctctgtctctgtctctgtctctctctctctctcataaataaataaataaaatcttttttaaaaattggggttggagattaagactacacttatcatgatgagtactgaaaaatgtatagaattgttgtattgcccacatgaaactatataatactatatgttaactatacctgagttaaaatttaaaataaaagaaatcatacagcaattcggcagtgtggcaggatgcaaaatcaatgcccagaatcagtggcatttctatacactaacaatgaacctgaacaaaaagaaattaaggagtcaatcccatttacaattgcatccaaaagcataagatacctagaaataaacctaatcaaagagggaaaggatctatagcctaaaaaccatagaacacttctgaaaaattgagaaagacacaaagagacggaaaaacattccatgctcatggattggaagaattaatatggtgaaaatgtcaatgctacccagggaaatttacacatttaatataatccctatcaaaataccatgggctttcttcagagagttgaaacaaatcatcttaagatttgtgtggaatcagagaagaccccaaatagccaggggaatattgaaaaagaaaaccagagctgggggcatcacaatgccagatttcaggttgtactacaaagctgtggtcatcaagacagcgtggtaatggcacaaaaacagacacatagatcaatggaacaaaatagagaacccagaaatgggtcctcaactctatggtcaactaatattcgacaaagcaggaaagactatcctatccactggaaaaaggacagtctcttcaatacatggtgctgggaaaattggacagccatgtacagaagaatgaaactggatcattctcttacaccatacacaaagataaattcaaaatggataaaagatctaaatgtgagataagaatccatcaaagtcctagaggataacacaggcaacaccctttttgaacttggccacagcaacttcttacaagatacatctatgaaggcaagggaaacaaaagctaaaatgaactattgggacttcagcaagataaaaagcttcttcacagcaaaagaaacagtgacacaaaactaaaagacaacctacagaatgggagaagatatttgcaaatgacgtatcagataaacgactagtatccaagatctataaagaacttattcaactcaacagcaaggaaacaaacaatccaataatgaaatgggcacaagacatgaacagcaatttcaccaaagaagacatacacatggccaacaagcacatgaggaaatgctctgcatcattggccatcagggaaatacaaatcaaaaccacagtgagataccacctcacactagtgaaaatggggaaaatacacaagacaggaaacaacaatgttggagaggatgtggagaaaggggaaccctcttacactgttggtgggattgtgaactggtacggccactctggaaaactgtgtggaggttcctcaaagagttaaaaatagatctgccctacgacccagcaattgcactcttggggatttaccccaaagattcagatgcaatgaaacgccaggacacctgcaccccgatgtttctagcagcaatctccacaatagccaaactgtggaaggagcctcagtgtccatcgaaagatgaatggataaagaagatgtggtttatgtacacaatggaatattactcagccattagaaatgacaaatacccaccatttgtttcaacctggatggaactggagggtatcatgctgagtgaggtaagtaaattggagaaagacaaacattatatggtctctttcatttggggaatataaaaaatagtaaaaggaaataaaggggaaaggagagaaaatgagtgggaaatatcagtgagggtgacagaatatgagagactcctaactctgggaaacgaacaaggggtagtggaaagggaggtgggcggggggttggggtgactgggtgatgggcactaaggagggcacttgacaggatgagcactgggtgttatgctatatgttggcatatcgaattccaataaaaatatatacaaaaaaaaccccacaaaatctagttttgaagaccacaataaaaaaaaatcggcagagaaactgaatagaactttttccaaagaaaacatacaaattgccagcaatacatgaaaagatattcatcataggtaatcatcagggaaatgaaaatcaaaagtacagtttaataccagctcacacctattagaatgattatcagaaagacaagagataagttctggtgaggatatggataaaagagaaccttgtgtattcttagaggaatttaaattggtatgggataggcactacagaaagcagtatggaggttccttgaaaaattaaaaattgaactactatatacttcagcaatcttacttctgggtgtatattcaaacaaaatgaaaactacatatcaaagtaatacctgcactcccacttcttttgcagattgttcacaatagctaagtcgtgaaaatattccaagtattccaatagatgaatggataaagaagatatatatttacaatggaattcaaccatgaataagaaggaatattaccattgaaagtaagtaattgaaagtaagaccaaatactcacaactaatagattattctaggacatccatacatttttctccaagatataagcctaataagactcaactctttttgttagcaaaagtgacatcaatggagccacagaatgtagtgacctccttaccacctaggaagatagtgctatcaggaatcagtaagttcaatatgttcacaggtgaggggaaccctgtcctctgagagtcccagctcagcagggccatcaagagaatatgcaggagacagggctgggattgttgtgagctggcaccccaaagagggactcagaatctttcctaaaattgttcaaatttcagtagatactgtagaaacacacaacaaaaaagagacacatgcacacagaaaagcaaagataaggtaagatgagagacaatgagagagatgcagacagtagagagagagatgcaaaaagaaacagagataaggggatctagataaataatggcaaaggtgcagatagaaatagaaagagacagaggcagagatgctatgaaagagtgagagacataacagagacagagatgcagagacagacacagaaaggtgcagagacacctctgtgttcattacagtgttattcacaataataagatatggaagcagcccaagtgtccattggtagatgaatggataaagaaggtatgacgtatagatactctacaataagagtattagatcttaccatatgcaacaacatggatggatctatagggtattacattaagtgaaataagtcacataaataaaagacaaatactatatgatttcacttatatgtggaatctaaagaacaagtttacatgaacatatacaaaaaaaaaaacaaaactgggatccctgggtggcgcagcggtttggcgcctgcctttggcctagggcgcgatcctggagacccgggatcgaatcccacatcgggctcccggtgcatggagcctgcttctccctatgcctgtgtctctgcctctctctctctctctctctgtgactatcataaagaaataaaaattaaaaaaaaaaaaaaacagaaacagattcagaaatacagagaacaaacttgtggttgcctcaggggacctcaggagatggatggggaaaataggcaaaataggtgaagaggattaagaggtacaaacttacacttattttttttttttttttttttttttttttttttttttccaaacttacccttataaaacaaataagttttggggacaaaaagataataaagtaaataatattgtaataaggggatagatgtgactgtccctattggggaaaaatttagtaacgtacagaattgtcaaatcactgtgctgtacaccagatactagcatagcattgtatgtcaactatctgagacaataaagaaaaacaataaaagatgtagagaaaaaactaaaggaaatataagggacaaggagagacacataaaaagaaaggtgcacacatggagatataatgaaaaaaagagagagatgaacatctcatcaaatgtctggatctagtaacatctgaaatcaacttgacctcagacttctttgtaacatgaacagagtaaacttgacttgggtatctatcatgtgaaaccaaaaatagtacttatattgctagttatactttttcaaaaataaaaatggaccttgatcagtgccaagacctatttgaaatgtcactgtggttttcagagacaccgcgggccactattacccacgccaggatacttccactgtaagcttatatacacaatactctgcaaacctgaagaaaggccagcacctccttaggccattgcactgaacaatactcaatatccagaaaggacgtgactattgaattgattttccatctccatctcccccgcctgctcttcatttggcacccccagatgcctctggtctcccttcaaggagcaatatgaccctttcattctgcactggtttcctgcctccacccagttaagaagactcagggtacagagaactcataatcacatttaattatgataaaatctctatcttcaggtaaatggcttcaatgtgcttctcttgcacaatctgtgaaggaagaatggaaacaggaaaatcccttggggcctgagtatatcctgtagcagggaacacacaggtcaatgcaggaagcagaatcacacccagatcctcaagagtcctcagagtcatgtaggactctgatctatgtgggggacagtctgtcaggcagctgggaattctgggcaggacagacggacactacaaaggatggaatctccggtatcctcaggcatcagtgcaggagccctgtagaaaagagagtgatcagcagaggagactctgacagatgagccctctcccctcctctcagggccactgcagcaccagagaaaactgagggccagggcaggcagtcatcacctcccccaatatttctgtaaaggtgaaaccaacttaagagaacatggcactccagctgcacacagatgtgtgggaggcagtgaagcagctcttgtcctttaaggggatataaaaacgtgtcaatctttttagtaaatataataactcaccatctttgcaccactagtggcctttcacatgtaaattcacacaggcagcagccaccaacacataacacaaagtgggcatcatcctggtgtctaacacccaagatgtggctctggttccgagtttcacagacagatagcaccaacgttatggcttgattccagggaacaactctggatctgcctacacaaactgggcaatcttcccccctaactcttgatctctgtagcagggaataggccatgaactgagaccattgtgcccaggtacactcacctcatgctcttccccctttcacccgtccctgcaaccccactgaatcagagcagaaatagtacctgccggtggagacccccgagatcctacaaaaggaagtgatacagaaaaaaaaaaggtctcataaatagccaccttctccctcaccccaaatggaggtgaaataagcaacttaattgaattttactttctccccactcatccactccaagaccttaactgccctaagctaaaatcccccaaaatcaatgacactgtcactagaaggaagggaagcagatgctctgaccctcttacagaaagaaactttcagaaaggagccagggagccaatgatgaactataaggaagccctagaatatgctccacctgttacctctgtggtagggctccttttcaaccaataaatcagattccagagtctccccctaggtggttccgtctctttccaccaccccagcctctttcctttcagagtcagaaggaaagagctaatctagagacagagccaacctcccccccccccccccgcnnnnnnnnnnnnnnnnnnnnnnnnnnnnnnnnnnnnnnnnnnnnnnnnnnnnnnnnnnnnnnnnnnnnnnnnnnngtctcaggcatagcccatctccctcatttccccagaatgccttacctttctggctcctgtgacggatgataaggccaagcccaaggaagatcagccccagcacgaagccaccaatgccactcagcatcttgctctgggcagattcagactgtggccctggggagcagagcctgagagtcagagttgtccccacaccccacaggctccctttgggaagcctgaagtccagtcaggtacaggacgtggaagtactgggtgaacctgaccacccctaggagagggaaggacccaccattagatccttgcacacagtgggtatgtggggggaaggagggaggctgaaacctgctcctccagacacatccataacctcaaacaccaaggtcccagtcaccagccagggcagtaaacccttcagagctacagggctgcgttgtggggccaaggtatggagaatgatctctctagtatctagaaagaccacgagatcaagattctcctgatgcccctgccgtgggacaagaggtactctaatctcctgtgatttccacctcagtagtgacatcaaggataacaaatagaatgggatgggctagaggaagctctgccctctgtctgtggggctcatcatgacaggaaacaaacttctccttacgccactgcactgtgatggggctctggaggctggcgtgctccacatggcaagtgtagacatctcctcgctggggagtcatctccagcatcacaaggatctggaaggtccagtccccattcctaataagtggagtggacacgacaccagctgtctgctcctggtcattccgaaaccaccggactttgatctggcctggatagaaatctgtcactgagcagaccagcagattgtggtggttcagaacctctgtcctggacggggagatggtcactgtcggttccactgaggggagtaacagacaagaaaagacaatgagatgtgagactacacagcaagtctccccatggagaaaagtcctcccttggtaccagcatggaaagatccctggattccaagtcttggatttggatctcagcttggccaccttattagtttgcatgaacacgtgagtcagtttacttctcagagtctgaagaaataatagcaatcattctaggaaagttattctgttgggatccctgggtggctcagcggtttagtgcctgccttcatcccaggggtgatcctggagacccgggattgagtcccacgtacagctccctgcatggagcctgcttctccctctgcctgtgtctctgcctctctgtgtgtgtctctcatgaataaataaataagatttttttaaaaaaaggaaagttattctgttgatattaattgatgcaataaagcatttttaaattacagatcgctgtattacacatgctactactacttatcacattttcaaaaataaaaataataaatttggacctctttccctcatccctactgatagataaagtggttgctaatccctaacatgcaaagtagttagttttgaaattaaatgacataatatagacagtgtgtggtaaggtatttgtctagaacaaggtattgattaaatggctacaattaactttcagaaagagtgtctacccctgaagtgagatgatgatgccctgaggaggtgatccaggaggaacaggatatgcagggcttaggccaaaagaaacctgagacaattcttattcaataataatagcatcagttaattgactccaaaacttcagctcttcctagtctaaaattagttgatattttctaagaaattaaaattctaggtccaagattgcagaggagatggagaccttggtttcatctggtcccaagagttcagctacataggtattaaactattctgaacacctggcaactcaaccagagacctagaaaagattagctgcaactgcaactccactaatagaaaagcaaccactttctgcaaggtaggaggtgcagagaagtgaatccaaggtgataacatgggaagataaactgggcgggcagggggttgtttaagcagccagctatcagaaagtgatatagcagtgaagtgcaaaatcagaacttttagaagtctgccccagtgagggatgtccttgcctgaaaaggtgctcaagcagcaaagtaagggtagaatcctaggtagtacagtatggtctcaggatcatggggtcagaggaagaccgagggtgcctgaatgtggcagagttccgaggtatcagtgtggggaaatcaactgcaacagtgatccaaggagaggttccacgtctccaaccatgtctcagctccagagttgccataaacctggaacaacagcacagtcagcacaactgctctctaaggaggggctcagcaagtagcagaaccagtgagaacctccttcctcccctaggaagaatggcctgtggtttacaccacaggagtctgaaaggtttagggactgaaaatactgtctcatacctgagacagaaatgctgggtcataggctgggtgagcacagagtgtggacagggactagagagacaggagtgcttgactgctttttcctgatgatgcactgagagtggggtcccaagctttctgctctaggctagagattgagaagctgccattttcattttcatcttctaaagctgcccagaaagccttcaggaaacaaaagccacctagaccaatccagagcagattagtagattagtagataaacagattataatgatgattttaaagatactagcagggcttggaaaaaagcatagaagacactagagaatccttcctggagaaataaaagaactaaaaatctaatcaagtcaaaataaaaaaaggctattaatgagatacaattgaaaaatagaggctctactggctaggaccaatgaggcagaagagacaattagtgatacagaagataaagatggagaataaagaagctgagaaagagagataaacaactactggatcatgaggggagaatttgagagatatgtgataccataaagtgaaacaatattagaataattgggatcccagaagaagaggaaagagagaatgtgggggagtgggttgtgggcagaaggtatattggaataaattatagctttgaaattctttaatgtggagaaggaaccaggcattcaaacccaagaggcacagagaacccaccacaagatcaataaaaattgtcaacaactatacatataccagtgaaacttgcaaatctcagagacaaagaaaaactcctgagcgctattcagggcaagaggtccataaactacaagggtagaaacattagactgatagaagacctatccacagagacctgggaggccagaaaggactggcgtggtatattcagggtgctaaatgagaaaaatatacaggcaagaatactttattcagcaaggctgtcattcggaatggaagaagagacaaaggttcaggacaaacagaaactaaaagaatttgtgatcactaaaccaaccctacaataaatactagaggggatcctttgagcaaagagagagcccaaaaataacatagtctagaaaggaacagacagtgactttgcagggaatacaatggcactaaattcacatatttcaatagttactctgaatataaatagctaaatgcccccagtcaaaagacaaagggtattgattggataaacaagcaagatccagtgatatactatctgcaagagactcattttagacccaaagacacctccagattgagggggtagagtaccatttaacatgctgatggacatcaaaagaaagctagggtggcaatagtcatgtcagattttaaaccaaaactgtaataagagatgaggaaggacactatatcataattaaagggtctacccaatagggtctaacaattgtaaataggtatgcccctaacatgggagcagccagttatataagccaattaataacaaaattaaggaaacatgttgataatcatacaataggggatccctgggtggcgcagcggtttggcgcctgcctttggcccagggcgcgatcctggagacccgggatcgagtcccacatcgggctcccggtgcatggagcctgcttctccctctgcctgtgtctctgcctctctctctctcactgtgtgcctatcataaataaatttaaaaaaaaaaattaaaaaaaaaaagataatcatacaatagtagtaagagactttaacaccccactcactgcagtggacagataatctaagcagaagataaaccaggaagcaagggctttgaatgacatcctgggccagatggggacttcacagatatattaagaacttttcaccctaaaggaacagaatacaaattattctcgagtgcacgtggaatattctccagaatagatcatgtactgggtcacaaatcaagtctcaactgaaaaatagcaaaaggttgggatgatttcctgcatattttctgaacacaatgctttgaaactggaactcaatcacaagaggaaatttagaaagaactcaaatacatggaggctaaagagcatcctactaaagaatgaataggtcaaccaggaaattaaagaacttttaaaaattcgtgcaatttaatgaacaaatgcagagctggaatagagttaaggagcaaggaagaatggtcaaaaggggacctggaaggtacattagtccctccaaccctcacctcaggtccctcagaataaatagagaactctctctcctcccttctctcttgtcctaaggggaaattctctccactccattgtggtgctgtgtggtagaggccatgtcagacctggggattccccagtctcttacaggcctcttcacacaggcttttcaatgagcaacaaaagtgtcagcttagaatgctttttctgattcgctaaaacctcatctgaaaggctctagctcaggcttctgtcagctgcttcccccctgagacagtcaacattctctacattttctagagctctctgtgctacacatagcttatcccattactcagggtagccactgctggcctggcctgagaggaaggcaactcagacacccgattcaggggcttacctgaggtaccctgctgggcccctgtggatgtgggcacttaggatgaaggcaatgtgtatcccatgtgggtagacaagcaatcaagaagtattcatgaaataggtagggttataataaagagactcaccctagaggacatactctgttgcctcaggaaggaaaataaaagctatagactctttctttgtgggcattcatcattcctggtcagcatctcttggaatctgtgcttggtcagtggagataattgtgatattaataataataatcaccttgtgaccagaatgaccatccaggactgcttgcatgttcaattaattaattaattaattaattaatcaatcaatctttcaatataaattggaataaatagtttaattaaataatattctttggctgaatttgataaattttatgaattaatcctttagagaaattagcaaaaaccctttaaaatgctaaaattcataaaataagatacaactctgaaaggatttgacaccaagataaatataaactgaaatgtttctatctaagtgtcaaaatgctgacactttcttatgtttactagacaagtaatgaataaatttggtaaaactcttcctcgaggaatgttttgttagattgttaaatgtactaaacctagtcgagatgtcattcaacaaactgatgcttgggctactggctgttaattagccattagttcagtaaattgatcttttggcaaagaagcccctgaacctgtcaggcatatccttgagagtgaacacaaaacttcaaccacaaattgcttttatccagttcttgtttctggacaagatttcccaaatttaagaccctccaacagtaaaccaaatgtttaaagaaaaattaacatcaattttatatgatctcttccataaaattgaagaagaagcaggaacttctgggtagctcagccagttaagcatgagactcttagttttggctcaggtcatgatctcagagtcctgggataaagtcaggctccatgctcagtgggaagtctgccttttctccccttgtccctctggccctccccatgctcttgctctctctcttaaataaataaataaatcttgagcaaaaaaagaagaggaagaaacacttcccagttcatgttatgaagcctgtattaccaaagccaagcaaaaaaaggataacacagacaaaatacaaagcagtatcttttatgaacataaacataagaaatgcctaacaaaatgttagcaaatagaatttaataatctataaaaagactaatattcattgactaggtgatttattccagcatggttcaacattcacctatcagtcaatgtgactctccatattgcatgctaaagaccaaaaattacatgattatatcaattgataaagaaaaagcatttcacaaaattcaacatgcagtcatgagaaatgcttttagaaaactagaatacagggaaatctgtaacatgataaagagctacaaaatatcctaacatcatacttaatggtgaaaaattgaatgctttccccctaatatatccaggctccagaagaagtcaagagatttatagtatatagaactaggggggcccctttttcctctttttccagtaaaacttgtttttatatcagactaaaaatttccaatattttttctcttttcccaccttaactacaatattttaccactgcttcaatttaaacatcatcctttttgactgccatatttctacaattacatgtcttagatatattttccacttctagattcccttcaatatactcaatttaatttttggagatacatgagatagttttttttgttttgtgggtttttttcctctgccacatttttttctacaatggtggaagttaataccttctaaaaatgaccagcatgcgcccagaaccaagtggaatacggtgctggttcatgctgtgagattatattctctcttcattcccactctgctcccctcttttatctcatttatgttttggtggtcaatgttggggctttctacaagtattgctggtttatataaatgtgggactgagcatcttctaacacacagaacttaataaactcagaaccaagaggctcaccccctagaacccctcaggtagactatattctccctcgacttcaatttcttcaccaccaccatctcccagtccacccctctttttcttcttcttcttctttttttttctttttttcctttttccttttgctttttttctcttcttttttcttctttcttctttctcttctttggactttgtggccttatattttttactactttgttttaaaatttgtttttcactttagtggtccttttattttcttttgttctgatctttgctttcattttctggtctctgacctcatgagaataatctagggtgaaatttacttaggtcatggttgatattcttgactgagcccactcatatagccactctgaactgagcaaaatgactagagggaagaagtcaccacaaaagaaagaatcagaaacagtactctctgccacagcgttacacaatatggattacaattcaatgtcagaaagccatttcagaagcacaattataaagctactggtggctctggaaaaaatcataaacgaatctagagacttcattactgcaagttttagatctaatcaggctgaaattaaaatcaattaaatgagatacaatccaaactggaggtcctaacaacaagggttaatgaggtggcagaaagagtgagagacatagaagacaagttgatggcaaggaaggaagctgaggaaaaaagagaaaacaattaagagaccctgaggaaaggttaaaggaaataaatgatagcctcagaaggaagaatttatgtataactgggttccagaaaatgctgagagggaccgagggccagaaattatatttcaacaaatcgtagctgagaatttccctaatgtgaggaggaaaataggcattaagatccaggagatagagcagtcactccaaaaaatcaataaaaaccgttcaacacctcgacatttaatagtgaaacttgcaaattccaaagataaagaaaaactccttaaagcaatgagggacaagagattcttaacttatatgtggataaatatcagattaacagcagcagacctctccatagagatctgggaggccagaatgggctggcaggatatattcagggtcctaaatgaaaataacatacacccaagaatactttatccagcaaggctctcattcagaataggagagataaagagcctccaagataggcagaaactgaaagaatatgtgaccaccaaaccagttctgcaataaatattaagggggaccttgtaaaagaaagaggaagcccaaagaaataatccataaaaacagggactgagtaagtattatgatgacactaaattcatatctttgaatagttactccgaatgtgaatgggctaagtgatcccatcaaaagacacagggtttcagactggataaaaaagcaagacccgtatatttgctgtctacaagagactcattttagacttaaggacacctccagcctgaaaatgaaaggttgaggaaccatttaccattcaaatggtcctcaaaagaaaacgggtggcaatcctcatatcagataaattaaagtttattccaaaaactgtattaagggatgaaggagggacactatatcatacttacagggtttatccaacaagaagacctaaaaatcatgaatatttatgcccctaatgtgggagctgctagatatatcaatcaattaataaccaaagtaaagacatacttagacaatacactaatagtaggagacttcaacatggcagtttctgcaaattacagatctttttttttttttttttttttttttaattacagatcttttaagcacaacatcaccaaagaaacaaggactttaagtgatacattggaccagatggatttcacagatatttacagaactttacatccaaatgcaactgaatacacattcttctcaagtgcacatggaactttctccagaatagaccacatactgggtcacaaatcaggtcttaactgataccaaaatattgagattgtcccctgcatagtttcataccacaatgctttgaaactagaattcagtcacaagaagaaatctggaagaaactcaaacacttggaggttaaagaacatcccactgaaagatgaatgggtcaaccaagaaattagagaagaattaaaaagattcatggaaactaatgaaaatgaagatagaactgttcaaaatctttgggatacagcaaaagcagtcctgagaaggaaatacatcacaatataagcatccctcaaaaaattggaaagaacttaaatatgcagggtaatcttgcacctaaaggaactgaagaaaaaaacagcaaataaaacctacaccaagcagaagaagagagttaataaagattctagcagaactcaatgaaatagagaccagaaggagtgtacaaccgatcaacaaaaccaggagttgtttctttgaaagaatcaaaagatagataaaccattagccagccttattaaaaagaaaagactcaaattaataaaataatgaatgaaagaggagagatcacaatcaataccaaggaaatacaaatgattttaaaaacgtattatgagcagctatatggcaataattaggcaatctagaagaaattgatgcatttctggaaaaccacaaattaccaaaactggaacaggaagaaatagaaaacctgaacaggccaataaccagggaggaaattgaagcagtcatcaaagacctcccaacacacaaaagtccagggccagatggcttcccaggggaattctatcaaacattaaagaaataatacttattctactaaagctgttccaaaggatagaaagggatgaagtacttccaaactcattttatgaggccagcatcaccttaattctaaaaccagaccagggttccctgggtggcgcatcggtttggtgtctgcctttggcccagggcgcgatcctggagaccgggatcgagtcccacgttgggctcccggtgcatggagcctgcttctccctctgcctgtgtctatgcctctgtctctttctctctctctctctctctctctctctctctgtgactatcataaataaataaaaattaagaaaaaatattaaaaaaaataaataaataaaaccagaccaaaaccccaccaaaaaggagaattatagaccaatgtccctgataaacacagatgcaaaaattctcaaaagatactagccaataggatccaacagtacaataagaagattattctggcagccccggtggcacaccccagtggcacagcagtttagcactacctgcagcccacggtgtaatcctggagacccgggattgagtcccacgtcgggctccctgcatggagcctgcttctccctctgcctgtgtctctgcccctctctaaataaataaataaataaataaataaataaataaatatttaaaaaaaaaaaaaagagtattcaccatgaccaagtgggatttatccccgggatgcaaggttggttgaagactcgtaaaacaatcaacgtgatagatcatatcaactagagaaaaaacaagaaccatatgatcctctcaatagatgcagagaaagcagttgacaagatacagcatccattcctgatcaacactcttcaaagtgtagggacagagggaacattcctcagcatcttaaaagccatctacgaaaagcccacagcaaatatcattctcaatgaagaaacactgggagcctttcccctaagatcaggaacacgacagagatgtccactctcaccactgctattcaacatagtactagaagtcctagcctcagcaatcaggcaacaaaaataaataaaaggcattaaatttggcaaagaagaagtccaactctccttttcacagatgacatgatactgtacatagaaaatcccaaaagctctacctcaagattgctagaaatcatacagaaattcagcaatgtggctgaattggatacaaatcagtggtatttcttgagagcttgtttgaaggttctagcaggggagcgcagctactcgtatacccttgaccgaagaacggtcctcctctatcggggatggtcgtcctcttcgaccgagcgcgcagcttcgggagggacgcacatggagcggtgagggaggaaggggacacccgcctagccagccagatcagccgaatcaaccctggcgatcaatggggtgacagatgtcgcagccagatcgccctcacatcccaaatcagtggtatttctatacactaacaatgagtctgaagaaagagaaattaaggagtcaatcccatttacacttgcatccaaaagcataagatacctaggaataaacctaaccaaagaggtaaaggatctataccctaaaaactacagaacacttctgaaagaaattgagaaagacacaaagaaatggaaaaatattccatgttcatggactggaagaattaatatggtgaaaatgccaatgctatccagggcaatttacacatttaatgcaatccctatcaaaataccatggacttcattcagagagttggaacaaatcatcttaagatttgtgcagaatcaggaaagaccctgtatagccaggggaattttgaaaaagaaaaccagagccgggggcatcacaatgccagatttcaggttgtactaccaagctgtgatcatcaagacagtgtggtactggcacaaaaacagacacatagatcaatggaacagaatagagaacccagaaatgggacctcaactctatggtcaactaatatttgacaaagcaggaaagactatccattggaagaaagacagtctcttcaataaatggtgctgagaaaattggacagccacgtgcagaagaattaaactggaccattctcttacaccagacacaaagataaactcaaaatggatgaaagatttaaatatgagacaagaatccatcaaagtcctagagaagaacacaggcaatgccctttttgaacttggccacagcaacttcttgcaagatacctccatgaaggcaagggaaacaaaagaaaaaatgaactattgggactccatcaagataaaaagcttctgcacagcaaaggaaacagtcaacaaaactaaaaggcaacctacagaatgggagaagatatttgcaaatgacgtatcagataaaggactagtatccaagatccataaagaacttattaaactcaacagcaaagaaacaatccaatcacgaaatgagcaaaagacatgagcaccaatttcacagaagaagacatagacatggccaacaagcacatgagaaaatgctccgcatcacttgccatcagggaaatacaaatcaaaaccacaatgagataccacctcataccagtgagaatggggaaaattaacaaggcaggaaacaacaaatgttggagaggatgtggagaaaggggaaccctcttgcagtgttggtgggaatgtgaacgtacagtcactatggaaaactcctcaaagagttaaaaatagagctacgttgggacccagcaattgtactgctggggatttaccccaaagatacagatgcagtgaaacactgagacacctgcaccccaatatttatagcagcattgtccacaatagccaaactgtggaaggaacctcggtgtccactgacagatgatgtataagaagatgtggtctatatatacaatggggtattactcagccattggaaacgacgaatacccaccatttgcttcaatgtggttggaactggagggtattatgctgagtgaagtaagtcaatcggaggacaatcattatatggtttcactcatacaaggactataaaaaatagtgaaaaggattataggggaaaggagagaaaatgagtgggaaaaatcagagagggcaacaaaacatgagagactcctaaccctgggaaatgaaccaggagttatggaaggggagttgggtggtgggatgatgggcactgagggggtcatgatgggatgagcactgggctcatgagcactgcggcaacaggctcagagtccaggatcctgaggggagggggttgaggaaataaaagtaaagagatggggacaggagggacacagtggatgatgttcaagcagtgtcagctttattcaaggttctacaacattatatagcataagcaaagcaaagataaggaagtgtccattcttagcatatttgtgaatccctccaagctttccctttatcagcatgcaagacagacccacaggggccagaagatttagggtcctggttaatagataagcttgttgctctaggtgtatacacctcgaaggaacattatatatggttaacagaccagcaaggacagcacagacccttatttaagtttatggccaggccagaataaattgtatctattgtgttatgtgggtgatcacgtaaaagcgaactctgaaaaccattgctcaagccctttctcaagcgtcaatcaactattcaccctttaggctcccgagccttttgagtgaatgagggacgcaagtctgggcctggtttggtttgttactccagctagtccgtggccacccgcatgggtgttatagtatatgttggcaaattgaaatccaatttaaaaatctacataaaaaaataaataaaattaaaatttttccatcttattgttccaacgtctatgtcatatctgagtctggtcttgataatttcttttttcttttttcttttcttcttcttcttttttttttttttttttttttgtcctgataatttctttgtctcttctgactgtattttgtttcttgccttttgatatgcctcataattttttcttaaaaagccatacatgttttataagcagaaggtacttggataattttcttatacctgaagatggcatgcttttccttctgctaggcatttattatgataatttttgctaatttaatcattaattgaaatggatttgatgtttgtcattactggtcaccctcaacacattggagctttcaaattcctctgatgatacctggtatttgtcccttcatctagctttgtgtcttccctgcaggcctcttcctcaagagaatctgtttcttgaaattctgccagctatattccacttttagtgattattttcaatcaacatatcctaatatggtggtgaaatatgggatagggtctttctctgatgttataattaagtcttaggcaagtgctgtcgacttagatctcatcacagtagccttcacaagtgtctttgcccttctcatgaatagggcttctttcctcattcccctcccagatgcaggctcatgatatataccccatcagcaagatgaagccagtccaggattatgattgaatattgttggctgaaggacactgccctctaaggcaagaggtaagacttgcaccaatgatgtgaaccaagatggcatgattcctcacactactaaacctacttgtggactttatgctatctctagaaacttgaactctctcaatttagacatcctggttcctagaagaaaaacatttctgaaaaataacaccataagatgaaatttgactatgatagtcatcacatgccaaagaattaacaagcaaacaaggaaatttatgtattgaatagagaagctgatcttaattgccatgggaaactaggattgctcatacatagtaagggcagggaagaatatgtttggaatctatggaatttactggataatcttttattattttatgcatggcaataactatcaatagacactaaaacaatcatgatccaacaaaggtggaatatataagagcatagagactcctgaaataatatttgctataaccaaaagattactggaaaagcaatctagaccaaatttagagggtgtggggagacttgacaatgacttatgaaggagaaagatgatgaatattagttacaatcacaaggccagctacaacagtggacactagcaaattccattgcaatataaagcattgcaaccatcatgctttagtcttctaggagatcacacttgatcaacttcttgaacctcttgcggaaaaatttaggaaaaaatttcacagaaaactatactgaagttgagaagcctgggtccctgaattagcacctggaggagagttacccactagtcatcaacacctgctcttgttacactagtgagatatgaacttctactgtatttgagccattatacatctttgggtctatacatctttgggttacagcagtttggcctttcctaactaatatatgaagaaaataagtgtgagtacttatcatttttacctataaaatgagaagagctcaataaagatgatagtaaacccttatacattggtgatgagctgtaaattgataaaacttttgtggagggaagtttggcattatcaaccagaattacaaatctacaatctttgagctagcaattccacctctaacaatttatcttcatattcttatacatttataaagtcatgtgtgtataaagttatttgttccaccattgttaaaagataatgaaaacaatctaaatgtctattactatcagactgctaagtggctattttcaaaatgagacagatattaatgttctgatatgaaaataatagttgcaaaaagtaaagtacatgccatatgaagatgtatgctgataatggagacctgtaccaatgatagatggagatagatgacttttgcttttacatgtttagaatatttctggaaggataaacattaaatactagcagtgcttacctcctcagaggcacacatagtggctgtatgtttggtttgggagagataaactttctactgtaatgcacctatgcagcaaacttttctcgtgaacgtgtattagctattcaaaataaattgaatttataaacaagccaaaaataatggggaaaatttaaattagaatatttaatttcccatggaccagtctcacatgaaatgatcctcattttttaccttagaattatcataagctgtaaaacaggattttgtgaaaacattcaagttgatgatgatgctaaattagcagctagggtatgtgtctagactttagaccatatcaatcctccctgtacacccttcaccccattcttcaaagcattctttcatgttcagaacatgggcctatctttctttgacatattacctcctgattttatattgatcaaatcaattgtgattattttgaaagcatcttatagaaagactatcttgttgaatgtcatgttcaattctgggtactctgtcctatgcctcgtactgatattacttcaaaaaagagattttatttatttattcacgagacacagagagaaaggcagagacacaggcagagggagaagcaggctccaagcagggagcctgatgtgcgactacatcctgggactcaatcccgggactccaggatcatgccctgggcagaaggcccaactgctcagccacccagtgatccccaataactttcaaactatcctgatcacctatgaattcaacctgagatataaagaaataaagctggaactctacaaatggaaaagtgaccactttttgcaaggtaggagtgtgaagaagagaaacaaggggatatatcagaaggtaaacagtacaaggagggagcctttttaagcccactgcaggaaagtgatacatctctggaactcaaattcaggacctttagaaatctgctcctgagagagccttctctgcctgaaaagtgttaagtggtgaaccagggcagaatcataggagggacagtgaattctcaatattcctggaggcatagaaagcacaaggacacctaagctggcaaagctcccaagctttggagcggagtatcggctataggtcagtgagcctgatagagggctcctcttgtgccataacccacaaactgtggtctgatcaggagacctctgtcagtgatgggtcctagcaaaggactggaatgtagcaaccttccactattcatcaggaagaggcagaacaagtatgtactcaacaagatgaacactctccttgccagggccctgcaacaatcagaattggggcgaccatcctctccctccaggaggggatgagttgatgggcacacaagcaggcaaaacctctcctgccaccctgcaccctttaaattccacaaatcagtgtccccctgcctgccgcaaaggaagatctgagcaagtgggcactataggaatctgcagtttggcacacactcttgccccagggctgagatctggccacagccaattttttttcctttcaccctcaagagtggcctggcctccagggagcagagacttcacagggcaaatgcttacactgagccccaccacctagcaaagggtggggcatcttcaaccaggcacagacacctaagaatcagcacagcaggcccctcctccagaagacctgctgaaagaacaagaggagcagcaagcttactgaccaaacagcactggaaaaatccaggactgagtgaaaatggtaaatagaacttgagggtttttttcttatgattcatttatctttcaggttaaaattttccaaaattctttcttttctcctgtctttaatgttttattaagtcttcattttaaatttttttcttttttgactttcatattttacaattacatgttatagatatattcttcatttttggcttgctttcaccgtattcaattttatttttatgtatataaattttgttggtttgtggttcttttgtttggttgtttttttttttttaataattttggaatttagtaccttctaacatacaaaccaaaatatattcagaaccaagtggatcaccatcttggtccactctgtgagaatatattctctctcccccaccatttttgaaaatttgtttttcttttttgttgcctttgttcttttattttctggccactgacctctttggaattgtctagtatgtattttgctttggttgtggttgctatttttgactctgctcactcatacagccaatctgcactggacaaaatgactagaaggaagaattcaccacaaaagacaaaccagaggtaatattctctgccacagatctaatggatatggatttaagtaaaatgtcagatatagaattcaggatcataaatataaatttgctagtggacttgaacaaagcataaaagactctagagaatctcttactgcagaaatgaaatctaactgagatgcagtctaaactggatactctaacagctagggtaaatgaggaagagtgagtgacatagaagataagatgatggaaaggaagaaaactgaggaaaagagagaaaacaatcaagagcctataaaagactctgataattaagtgataatttgaaaataataacatctgtatttttggtattctagagggcatggagagggagagaggaccagaaggtatgtttgaacaaatcaaagctgagaacttccctaattctgagggaggaaacaggcatttataaccaggggatagagaggacccctccccaaatcaacaaaactggtcaacaccctgacatataatagtgaaacttgcaaatttcagagataaagagaaaatcctaaaagcagctcaagacaagaaattcctaacatatagggagagaaatatcagattaacagtagacttctccacagagacctggcaggcctgaaagggctggcataatatattcagggtatgaaatgagaaaaacatgcagccaagaatactttatccagcaaggttgttgttcagaatagaagaagtgataaagagcttccagaacagatagaaactgatagaatgtgtgactaccaaaccaaccctgcaagaaatattaagggggatcctgtaagtgaagcaggaacccaaagaaacagagacaatcttcagaaacagggactgtataggtagttcaatgacactaaatccatgtatttcaatagttactctgaacatgaatgggctaaatgatccagtccaaagatgcagggtatcagactggataaaaaaataagacccatctgtatgctgtctacaagagactcatgttagacctaaggacaccttcagactgaaaatgaggggcagggaactgtttataatgcaaaaggacttcataagaatgctggggtagcagtcctcatatcaattcattaggttttatagaaagtctgtactaagagatgaagagggacactatatcatatttgaagggtctaatcaacaagaagacctaacaaatatgaatatttatgtctctaatgtgaaagaagccatcctatgaaccaattaataaccaaagtaaagagacacataggtaataatacattaataataggggacttcaacaccccacccttagccaaggacaaaccttctaagcagaagattaccaaagaaacaaggactttgaatcacacactagaccaaatgcatatttttatatcacaatgctttgaaactagaacttgatcacaagagtaaatttggaaggaactcaaacacttggaggttaaagagtatcctactaaaagatgaatgtatcaaccagaaaattagagaagaattaaaaatattcatacaaactaacaaaaatgaaagcacaactgttcaaaatctttgggatacagcaaaggcagtcctaagaaggaagtacatttcaaaacaagcctctctcaaaaaattggaaaaatcttgaatacgctaaccttacatctaaaggaactggagaaagaacacacataaagcctaaaccaagcaggaaaagagagataataaagattagagcagaactcaatgaaatagagaccagaagaacagtagaacaggtcaactgataaactaggagctatttttttgaaattaataagacaaataaatccctagccagatttattaaaaagaaaaaagaaaggattcaaactaataacatcatgaatgaaagggaagagatcacaatcaacaccaaggaaatacaaacgattttaagaacatattaaaggggagcctgagtgagtcagtggttgagcatctgtttttggctctgggcatgatcccaaggtcctggaatcgagtcctgcatcaagctccctgcagggagcctgcttcttcctctgcctgtgtgtctgcctctgtgtgtgtgtgtaatgaataaataaataaaatctttttttaaaaaaagaacatatgagcaactatatgccaacaaagtaggcactctggaagaaatggatgcattcctgaaaaactataaactaccaaaactgaaaaaggaagaaatagaaaactgaacagaccaataaccagcaaagaaattgaagcagtcatcaaaaacctcccaagaaacaaaagcccaggaccagatggctttccaggggaattctaccaaacatttaaagaagaactaatacctattctactaaatctctttcaaattacagaaatggatagaaaacttccaaacttgttctatgaggccagcattaccttgatcccaaaaccagacaaagaccccaccaaaagcgagaattgcagaccaatatccttgatgacatggatgccaaaattctcaccaagatcttagccaataggatctaacagtacattaagaggattatttaccatgacaaagtggatttatccctaggatgcaagaatggttcaacgttcataaataaatcaatgtaaagatcacattaataatagaaagtacaagaatcatatgaccctctcaattgatgcagagaaagcatttgacaaaatacagcatcttatcctaactaaaactcttcaaagtgtagggacaaagggaacatatctcaatatcataaaagccatctatgaaaaacccacagtgaatatcattctcaatgcagaaaaactgagagctttcagtcaagaacatgactgggatgcctgctctcaccactgtcgttcaacatagtactagaagtcctagcctcagagatcagacaacaaaaagaaataaaaggcattaaaattgacaaagaagtcaaactctcactcttcacagatgacatgctatagatagagaacccaaaagattccatcccaaaattgcttgaacacagacaacaattcggcaatgtggcagaatacaagaatcaatgcacagaaatcagtagcatttctataaactaacaatgagactgaagaaagagaaattagggaatctattccttacaattacacccaaaacaataggatatctaggaacaaacctaaccaaagaggtaaaagatctatactctaaaaaatacagaacatttatgaaagagaggaaaatgtaaagagatcgaaaaatattccatgctcaggaattggaagaataaatattgtgaaaatgcctatgctacccaggacaatttacacatttggtgcaaaccctatcaaaatacaatgtacttaaaaaaaaaaataccatgtactttcttcacagagttggaacaaataatcctaagatttgtatggaaccagaaaagaccctgaatagccagaagaatgttgaaaaagaaaaccagggattccttggtggctcagctgttgaatgtctgcctttggctcagggggtgatcccagagttcccgagattgagtcacacatcgagatccctgtggggagcctgcttctccctctgcctgtgtctctccctttctctctatgtctctctctttttttattattggagtttgatttgccaacatataaaatgacacccagtgctcatcccatcaagtgcccccctcagtgcctgtcacccagtcatcctatccccccgcccacctccccttccactatcccttgttcgtttcccagagttaggagtctctcatgttctgtcactctctctgatttttcccactcattttctctcttttcccctataatccctttcactattttttatattccttgtatgagtgaaaccatacaatgtttgtcattctccaattgacttacttcattgagcataataccctccagttccatccatgttgaaacaaatggtgagtattcattgtttctaatggctgagtaatattccactatatatatagaccacatcttctttatccattcatcttttgatggacactgaggctctttccacagtttggctattgtggacattgctgctataaacattggggtgcaagtgtctcggttgttctctctctctgtgtctcttatgaatacataaattaaatattttttttaaaaaaggaagaaaaccaaagctgggggcatcacaatgccagacttcaagctgtactacaaaactctgatcaccaagatgtagtatggtactggcacaaaaacaggcacataaatcaatggaacagaatagagaacccagaaatgggccctcaacgctatggccaattaactaatctttgacaaaacaggaaagaatatccaatggaaaaaagacaatctcttcaacaaatggtgttgggaaaactggacagcctcatgcagaagaatgaaattggccattctctttcaccatacacaaagataaactcaaaatgattgaaagatctatatgtgggacaggaatctgtcaaaatcctagaggagaacacaagacaacaatttttttgacctcagacacagcaacttcttgcaagactcgtctccaaaggcaagggaaacaaaataaaaaatgaactattgggacttcaagataaaaagcttttgcacagcaaagcaaacagtcaacagaactaaaagacaacctacagtatgggagaagatagtcacaaattacatatcaaataaaggactagtatccaaaatctataaagaagttatcaaactcaatacccaagaaacaaacaatccagtcatgaaatgggcagaagacatgaacagtcatttctccaaagaagacatacacatgaccaatacatgaaaaaatgctccacatcacttgccatcagggaaatacaaatccaaaccacaatgagatatctctttgcactggagagaatggctaaaattaacaagacaggaaacaataaatgttgggagaggatgtggagaaaggggaaaccttcttgtactttcagtgggaatgcaagctggtgcagccactttggaaaacagtacagaagttcctcaagaagttaaaaatagagctaccctatgacccagcaattgaactactgggtatttacccccgaagatacagaagtagtcaaatgatgagacacctgcaccccaatgttcatagtggcaatgcacacaatagccaaactgtggaaagggcaatgatgtccttcaacagatgaatagataaaaaaaaagatgtggtatacttttacaatggaatattactcagccatcagataggatgattacacaccatttgcttcaatgtggatggaactggatggtattatgctgagtgaagtaagtcagtcagagaaggacaatcatcatatggcttcactcatatgtgggatataagaaatagtgaaagggattataagggaaaggaggggaactgagtgggaaaaattagagagggaggcaaaccacgagagattcctaactctgggaaatgaacaaagggttatggaaggggaggtgggcagggggttggagtaactgggtgacaggccctgaggagggcacttgatgggatgagagctggatgttatactatacattggcaaatcaaatttcaataaaaacaaatgaaaaataaataaataaataaattgaatgcccctagcaagtgactctatatctttcattatagttccagaaattttatgatcctaggcctgttttacatcaatgttttactttggtttttttatagaagtaggaagtcaagttttatagtttcatttttatcagcaagacaggtattttcatttacattaatgaataaggaaaatgaaaccaaaaagacatgtcagaacttcacttgcttgtcaatgatgtgagcaactcttctggtcagtcagataatagttttctaatattggaagggtattttctcctatttttgtgctattcacaatggtttcaccacaaatgtgatatccgtctaagtttaatctaatccatcactttcttaagtctaaaccaagctctacaaactgcaggcaataggcctgccacctatctttgtaaataacactttattggaacatagccatgctcattaatttatatattgtcagtggcagccctagcaccacaatagcagaatcgaggagttgtgacagaaactgtatggcccacaagcctgaaatattttctatctggccttgaaaaaaatattgccaatctctgatttaaacaatcaaccaaacaggaagtcaagtcttgctgatttccatagtataaatattctcaccatagctgatttcaagttaccaacatgatgtcactgaaccaagagttcgaaagagatgctcgtagaacacccttgtatagcattttcaacatatacctacaacagttgtaaataatctcaaaagcatatacaatagtaacatgtattaaaataactaggaagtgagaattttttaatgtttcttttgcttttaatattatttacaaggttatatgatttaatttttaatcatggctgtgtttaacaactgacttgcaaaattcatgaaaaaatttgctcttgcaagcttctatgagctggctccagtgcaacactgctgatatgcataaaacaattctagcatctttggtgtggagtgtcatcttccaatatctgcaaaaaatattaagtttcagcttccactcaactgaagctggaatttccctctttgtttattgatatctgtagaatatttttcttgaatttttagctcttttttggtatattttattgtgataatcccccagtagtttcatatccttagtgtaggtagaagtacttcccaagagacctcatgttgcaacactgacaggtagcctcatttcttacattctaccacccattccctatgctgaaaattaatgttttaccctttgtcctagagcttcatttgctgacactacagatagaaattatgagggtttcctgacctggcccaatgaccaatgtcagacattaagatttcatgctactatcaagagacaaccactgaggttttagcacagaaccagagggacattctgggaagaagatagcaggttgaagttgagtttaaatgtgtatcaatcaggtccctggctggaataagatgggaaactcagattggttaatttgaggatctatttacaaagctatgatcatcagagtgtaggcaaaccatagagacagagaggtatcctgagctagggacagcaggagcaaactttcctcaagccctaagggatgaaggaacagtgacaaaggagccctggaggcagagagtactgtgtagagagccacctgataacatgtgtgaccttctagttaagtgaaacggccagcctcctgtggtctgctcagagttggaggggtgggttggtgaggtcagcccattttcctctcttcttccaatcctctgattatgctcctcattactcaacgcaatcaaggagataggaggtaattccatgtggatcagctgctagaagcacagagcaaggcagagaaggggggagaataaataaggaggataaattaaaagaactgtggtgaggagagaaccatggaacctgggagaaagagccacagattggaggtaatgcaaactcaaatcagtcatttgaatgttttctcctattttcaaaaggtcaggaaaaaaaagtgatttaggaaagaagcttgtcctacagtggctggatttcaggactatttatattaaaatgaaactcattgctgtttgtatagagacaaatgcctcccaatctttatctctctctctctcccctgcatgcacacataaggtgtaaagattttgaataataattcttcattcatgactcattctcatttgtctaagcttatttttatctgattttttattttcaataacataataagctgtggtgaatccaacacccagcacatgtatgagaaccttgacaataactttataataaatatatctaagtccattaggccattcttattgtgttatttaaatctatatcctatctcaattctctatgaggaattatgagccatatattaaatatcctagtacaatggtttggtttgtcatcttctacctgtatgttgtattttttattcttatcttggaggctattgtattagatgcacatatgcttatagttgctatgtttttcttgatacagtgaatgtttatcatcccatgagtccttctttcctacaatgcttttttactgaaaccttttcttgaagtaagctctatgcccaacatggggcttgaactcactcccatcaccttaagagttgcacgttctaccaactgagccagccagctgccctttccttaaaatttattttttgactgtaatatatccataaccgattttatttacttagtacttgcataatagatgtttttcattttttgcactcaatctctgaaatagcctttatgtttttaatcatagtctcataaataatatcacccaaatttatgtttttgtgatcaatctgtcaatctcttttaatcacaggtttagtccatttgcacttactgaaattaatgagatatccagaccttttataccacctcatgtttctcatttcattttctgcatgattttaatggcttgttttcactattcactcatgtctggaatccatgctagcatgtgtagcaagtcccaggctactgtctggggggtggttcttttttggtctctgccctgagacatgttttcagaatctgtttaagtttacatcgctcatttctagctttttgcttcatgtaggaattattattctatacccagccttttacagatattaagattctgtcctgctttcattatagcttgtctctgggccctaaaccccttgtttgcatgaagactgcatgtccttagataccacatattaatagagattctctgattgcttttattttcttttaagaaaacttctaaaaaagcaattatcaatgtccttgaaacattaacttgaaaaaaaaaaaaagaaacattaacttgatgtgttgttttcaaattaagtaatctactgaaaactatatgggctttccaaaatatacctccctgataatcctgtttgaggaaagtaaactaggttatgggagaggacttagctcttgcaggaggaaaggaactgtctgacattggaaaaagttgaaagacaaaatttgtggtgaaaagaaaggatgatggtaaatagcctttgcagaagctcattaatgattcgggagagcttggttcttgtctcatgcaaagaatgaatctcacagacaacgaacggagagtgagtaaagtgatagaagtttattaagcaaagataacagagaaagctctcagaagtgagaggggtcccaacagggttgccactgagggcttgtagaggcagtcttttattgagaactgactgggaagcttgtggccttgagattcttgtgctgtcttgatttgagtaaggaccagtgataacatctttaatggcttacttctttggggtctggttattctttgttggtcacagataactgtcataaaaagacaccctccctgcccacacctagggcagggtggtctggcttgctcccttacttatctctgatttccttatacttcagcattttgtggatttttgtggtcctgcttctgtgaccccctacctagcagtaactagccctgtttgtccctaactcattaataccacgaatacatttttctccaaccagtgaagagcataaggggaggcagcatcacttgtctctgtcagtccaagctactaataaccacaaataattataaagtagcagtagagggaggcagagagaaggtggagtgaatttccattcaaattaggaacagaggggtgcctggctgtcttggtcagttaagcctctgccttcagctcagatcatgatcccagggtcctggaattgacccccatgttgggctccctgctcagtgaggagtctgcttctccctctcctcctcagctcatgctctctctctctgtctctctcaaatgaatacataaaatcttttttaaaaaagcaaaataggaacagatatataacattgcaaggcattaatttgacaaagaaatataaaaattaaaatttttaattacaaaaatttacccagaagcctaaaaccaagagtaattgaagacatataccatatacacaaatgggaatatggtgttggatttaatgtattttcaaacgaaaggctggttcaacacccgtaaaacaatcaatgtgattcatcatatcagcaagagaaaaaccaagaaccatatgatcctctcattggatgcagagaaagcatttgacaaaatacagcatccattcctgatcaaaactcttcagagtgtagggatagagggaacattcctcgacatcttaaaagccatctatgaaaagcccacagcaaatatcattctcaatggggaagcactgggagcctttcccctaagatcaggaacaagacagggatgtccactctcaccactgctgttcaacatagtactggaagtcctagcctcagcaatcagacaacaaaaagacattaaaggcattcaaattggcaaagaagaagtcaaactctccctcttcgcggatgacatgatactctacatagaaaacccaaaagtctccaccccaagattgctagaactcatacagcaattcggtagcgtagcaggatacaaaacaaatgcccagaagtcagtggcatttctatacactaacaatgagactgaagaaagagaaattaaggagtcaatcccatttacaattgcacccaaaagcataagatacctaggaataaacctaaccaaagatgtaaaggatctataccctaaaaactatagaacacttctgaaagaaattgaggaagacacaaagagatggaaaaatattccatgctcatggattggcagaattaatattgtgaaaatgtcaatgttacccagggcaatatacacgtttaatgcaatccctatcaaaataccatggactttcttcagagagttagaacaaattattttaagatttgtgtggaatcagaaaagaccccgaatagccaggggaattttaaaaaagaaaaccatatctgggggcatcacaatgccagatttcaggttgtactacaaagctgtggtcatcaagacagtgtggtactggcacaaaaacagacacatagatcagtggaacagaatagagaatccagaagtggaccctgaactttatgggcaactaatattcgataaaggaggaaagactatccattggaagaaagacagtctcttcaataaatggtgctgggaaaattggacatccacatgcagaagaatgaaactagaccactctctttcaccatacacaaagataaactcaaaatggatgaaagatctaaatgtgagacaagattccatcaaaatcctagagaagaacacaggcaacaccctttttgaactcggccatagtaacttcttgcaagatacatccacgaaggcaaaagaaacaaaagcaaaaatgaactattgggacttcatcaagataagaagcttttgcacagcaaaggatacagtcaacaaaactcaaagacaacctacagaatgggagaagatatttgcaaatgacatatcagataaagggctagtttccaagatctataaagaacttatcaaactcaacaccaaagaaacaaacaatccaatcatgaaatgggcaaaagacatgaacagaaatctcacagaggaagacatagacatggccaacatgcacatgagaaaatgctctgcatcacttgccatcagggaaatacaaatcaaaaccacaatgagataccacctcacaccagtgagaatggggaaaattaacaaggcaggaaacaacaaatgttggagaggatgcggagaaaagggaaccctcatacactgttggtgggaatgtgaactggtgcagccactctggaaaactgtgtggaggttcctcaaacagttaaaaatatacctgccctacgacccagcaattgcactgttggggatttaccccaaagatacaaatgcaatgaaacgccgggacacctgcaccccgatgtttatagcagcaatggccacgatagccaaactgtggagcctcggtgtccaacgaaagatgaatggataaagaagatgcggtttatgtatacaatggaatattactcagctattagaaatgacaaatacccaccatttgcttcaacgtggatggaactggagggtattatgctgagtgaagtaagccagtcggagaaggacaaacattatatgttctcattcatttgaggaatataaataatagtgaaagggaatataagggaagggggaagaaatgtgtgggaaatatcagaaagggagacagaacgtaaagactgctaactctgggaaacgaactaggggtggtagaaggggaggagggcggggggtgggaatgaatgggtgacgggcactgggggttattctgtatgttagtaaattgaacaccaataaaaaataaattaaaaaaaatgtattttcaaacgaaacccatatgagaatgagaatacaaacagtagattggataaagtactaaatttagtgaaattgatagctatactctggtacatataaaaaagtcattttttaaggaaataaacagtgcagtgtttaaaggtaaagggccatatgtatacattttcaaaaaaatattgtgtatatatatatatatatatatatatatatacagtacatatttactattcttattctttcagtttttctgttttacatttttacaataaaacagaaaaaaattgggatccctgtgggcgcagcggtttggcgcctgcctttggcccagggcgcgatcctggagacccgggatcgagtcccacgtcgggctcccggtgcatggagcctgcttctccctctgcctgtgtctcagcctctctcctctctctgtgtgactatcataaataaataaaaattaaaaaaaaattatataaaacagaaaaaaattgcaaggttataaaatattacccctgtaaaataaaaataaaattctatgaaaagaggacagagaactgaaagattctaaaagtcattaaaaatgatgaatgggcaaaactaaccaagtacagagacccttgggtggatcagttagttaagcattggactcttgatttcagctctgatcatgattttgggctacacactgagcaaggagccaggattctctctctccctctctgtctgcccctccccccagctcacacctctcccttaaaagaaaaaatactaaccaagtacagcaattcctcttcttactcattactgcaactttactttttcattatctctcttctctatacactgttatattttcttttttttttacactgttatattttctaaaaaacaatctcattctctgattgcttcttttttcacagcatttcaaatctccctaagaataataattatttatttaagttgtttttcttgcctgcctcacctctaagatcttttttcccttttttttcattgatcttttctttatcatgttggatttcccaaaaatatcttctctgcattggttattagttcacattttgaaatgaggcacataaatgtggcttaagagactgtggcagtaagaggcttatgaaaagatgggctttgggcttacatggctgacaattcactggaaatatcataatgtgaaatttctctttttaggtgactcatatccaaaaagcaaacttacagtgtcttagttgggggaggcggagcaagtgtacggtaaataaatggctgcccatgttccattgcaagggaaggccaggggttcaataaagatgctaaaagtgctttcaattaattcccaaaatgtacaaaattttaaaagactaaataaatgaattatggtgcaaatatatacagtccttcaaaacaatgttttagaatgacacttcgtgacaaagaaaaattgtttatcatatgttaaatttaaaagtagttaaaattagcctattcaatatgatctcaagcctctaaatatctttctatttataactatatctacatttattgtcttcaaagcctagaaggaaaaaaattatcacttgaggatctgaaatacaataaaggtgatcttgttttctcctcttcctacttcaaatatcgactgacaaatctgttctgtttggctttaaaaacacagcaattaaatgaaatctgtgtgtggagctattagtcacaataatatacagaactcttaaagttgagtaaccaactattctgtccctttgttcatctccaccaggcttgtggtaccacttaccatcaaggcaacacaattacactttttaatttcatttgaactgctaaacccacttctcaatctttttatttattcattcattcatttttattttattttaattccagtatagttaacatacagtgttatattagtttcaagtttacaatatagtgattcagcaattctatacattagtcagtgctcatcacagtaaatgtgtttactcttaatcctctcatctgtttgacccatcccccacccacctgccctctggcaaccattagtttgccaactaatctttagttaagagtctgttttaggtttgtctcttttttcctttggtttttttcttagattccacatatgaatgaaataatatgatatttgtctttctctgattgacttatttcatctagcattatgctctctagttctatctatgttgttgcaaaggcaagatttcattctttttatggctgagtaatatatctcattgtataaatatataccacatcttctttatccattcatatagcaatgagcacttgtgctgcttccataatttatctattgtaaataatgctgcaataggcacaagagcgcatgtatcttttcaaattattgttttcatacctcggtctttttacatgttctttgccatcaacctttctagtttctctcaaatataatttaatactttaaaaattcatttaaaaaattaaaacaaatggaaggttgctgaaagggaggtggggggatgaagtaactgaatgacaggaacacacatgatgtgatgagcactgggtgttatactatatgtcggcaaattgaatttaaattttaaattttcttaataaatgttaaaacaataaacttatatcatatttcacttaaaaagtgagaaaaacagagacaatgaaaactctcacactttccacatgatctaaatcttgaacccataaagactagggtattcagaagttgcgatgggaacactgatgaggatagggcactctcttccatgggagaagacagttgtcagaagtatccacctcatgctgatgcacatacaagcccttcctctctcagctggaaatgacaacagttaattgtcttgctttgagaagacaagttttactagccacaaaggatgacagttcataaaatatgtacataagataaagataatttcaggtttctagcctatgcagattctgtacagtaaacattcacatagtcaagcctatgtgtgactgtttatttataaggtatttatttttatttactaggcatctacttaatagattccaggcattataataataagtactgagaatacagagatgtctacctagaccttgcccattagtgatcggcagaaaagaacttagcaacagtgcaaatttccacctcctggatgggggtgaaatgaaggaagatctaggcagacccatattaatttatctcttttgaataatggaagtggtgatcataaagactggcccaagagctataaaaggcagtgtcgcatgatggctaagcatgtccctctggaaccagaccgcctgtgtttgagttgtggcattcccatttactaatgttgcatcagcacacaagtgaactccccttcaccagtttcctcatctgtaactgtgaacgatgattatcatgtctcctcaaaagactgttgtaaggactcggtgagccaatattcataaagtatataaaaaggtattaggcatacaggaagccctcaataataaaaatagaataatagagacaaaaagaataatagcagtcactttgtactagagttctaccattccctagggtccctgagaaaataaattagcccccaaacaatctgggagacatctgtactcactgcccctaaccccagtcctatttccttctaatctactagtacaccatggaacctttgtcgacctagaaactgtaagaaacagctattcatcaatgggtctgaagtcatcactcattttcattgattagaccagggacatagctgggttttaaatgatttcatttgactctgatgttcatttgaccccttgtgcaagaactttgtcctggatttcccaaccggaaaacacattaagctcctgatatttatattcatttatttcttgcaaaatttactagtaccaggccacccctagtttgagatccatgacctgcttggtgacttcaagatctgaaatggtatctgtcccctcatcttactgctgatcctatcatctccctttgaaattagggcaatcatgtagaagaagcagggcaggaaagatacacattaacacaaaggcggttcctacaactactcccttccccaaaactctaaaacttaaagctaacattcaactctaacacctaagtaaagaccattgatagcaaagagactttatgggagctattttcaaaaataatggtttcctctccaaccaatgagagaagtaggtgtggggcaatatcatttgtctctggcagtcgaattactaagaaaatcaacaagaagcacagagctgcaattatggggaaacagctcataaaataaacatcaaaaatgtgtagaatcattagaaattatagacatctttgaggtcatatagtaaaaaagttactgaaaagaggttccatattctacgatttatagtacaatccaaatccactgagcttgaaagagttgactacatgaaattaaagaattatcaacaagtgtagatggacagaaataaccactatacttattttttctgtcaccacactaatcttttcattttgtaatgaactttataataaatactttacttttttctctgattattccttttatcatagaacattgtcttgttatgtaggtgtggaggccgagaaaaattaagaacattgcctttgtcaacaagggcccaggacccatgattgggtcctgcaaaggatccttggaaaaagtgagggaatgtgggacccaggaaatctaacaaaaatcccctacccctggacaagcagagcaggactaactccattctgtgctacacccgccatctcatataaaaccccccacagacctgcctattgtttaaggcactccctcaccctagtttagctattaagcacacccttatcagaaaccagcacacttaggaatgccttacctctgacctttaaccagccaaggaattaaaatccctcttttgcccgccaaacctgcgcgccaattctaaccagaataataggctagttcaaatggtcactatagggtgaatcgaaattcaattggccacctgcgtgtggaccaacatgaccgcgcaactttctgcgtatgttacaatctcattggccactggcccctataacactgctgtgtttcttagtctcgcggtccaagcccctgctctgctgtatggagtatacttggacccaagcacgagcttgtaaataaaccctcatgtacttgcatcggtgttggctccttggtggtttctcggattcgcaatcttgggcacaacagaggcaactgttacgtaaatgctactgaatatacagtttgggaatataacagagctattttttagcaccaagattagggcaatgatggcataaaggccattcaaattcagtggaatgtactagcccacaaacttgacctctctgatacacagagaaccttagaagccacaacaatgatgataaaaagttcttttgcagatgggaggtggcatcacatgcctctggaagattcaatctcaaagaaggcaaataagaaaaatatatttgtagaaacaggagagatgttgtttaagggtacaaacttgcaactagcagataaatatgtcctgaagatataatgcacagtaccgtgaatatagaaaataatattggattataatcaccaaacatgaaaaaaattgcagaatttttctagttttaatagaaatgaaaaagtaaaatattaaaagatgaaattaaatatatggagagaatcatgaaaaaattagaaaattcagtgaagttccatagaaaatataaataaatggaacaatatatcctgttcctagataggtttctagattatctctctgtctttatagctttaattatattgacatacaaccaactgctcgtatttaaagtgaataattccggatcatttgggtgattcagtcagagaatattccctcttggtttcagcttgggtcatgatctccaggtcctgggaaagagcctcacctcacatcaggctctgaactcagagaagggtctgtctgagaaatctctgtccctctctcactgcccctccccgtgctctctctctctcaaataaataaatcttaaggccatcactcaccatttggtataaagatgatcattctccctattgaattgcctaggcacctttgtcaaaagttaattgtatatacatacagaactatttctggaatctctattctgttccatttgcctaaatatctatctttacactcataccacactgtatggacatagctatctaaaaacatcttaggggtgcctaggtggctcagtcagttaagcgtctgcctttggatcaagtcactatctcagggtcctgggatccagccccacattgggctccctgctcagtaggggttctgcttctccctctttctctgcccgtccccctcctcatgttttctctctctctaatggataaataaaatcttttttattttttatttaaattcaattaattaacatataatatattgttagtttcagaggtaagggtgagttaattcatcagtcttatataatactcagtgctcattacatcacgggccctccttaatgtccatcacccaaaatccttttttagaatatcttataactaggtagtataaaccctccaactttattctttttcaaaattgcttttgctattctatgtcctttgcatttccatgtaaatttaagaataagctgcttaatttcttcaataaagtctctatggatctgaactgcaattgtgtcgaagttacacatgaagtagaaaagaatttatatataaacaatgctggggatccctggatggctcagcagtttagctcctgccttcaactcagggcatgatcctggggtcccaggatcgagtcccatgtcgggctccctgcatggagcctacttctccctctgcctgtgtctctgcctctctctctctctctctatatatatatatacatatatgcctctctctatatatatacacacatatatgtctctcatgaataaataaaatctttaaataaataaaaataaacaatgctgattcttacagttcttgagcatggtatgtgtctccatttgcttaggtatttaatttctctcagcagtggtttataattttcagtatgcaggttgtactcatctactgtcatttattcctgagtgtttatatttttgatgctattataaataaatattataagtttcaaatttttattgttcattgcaaatgtatggaaataaaattgatcacctttattggatgtgtatcctgcaatctgccagaatttttccttatactgaatttcttttatagagtctgtagatgttctatcataggaattgaatttaaacaagaagttgaaaagaaataaaaaataaataacaagaagttgaaataaatagaaacaaatgagcaaaggttaaagaaaaacaaaagagagatgcaaacctagaaactgaccttcaaatatagagaacaaacaccaggtgctcaacacataagtgcactccttaatcagtttgttgtatggacgtgttgaactggaaagttgaattcctatattgagcaaatgaaactaatattatactatatgataactgtataaaagtaaaatcttttaaaaaagaagaaattaacaaactatggccagtaaacaaatccaggcaactactattttttgtattatctatgggctacaatgtgtgtgctaaagatgacttttacctttttaagtggttatagtttggatgattgagtatcaacataatatccttgattttatctcttagaccacaaactctacaatattcaccatctggccctttacagaaaaagttagtcaattcctatttatagagtcaatcatgttacctgtaatataattttactctgttttttccaattggtatgacccttattccttttcttgatttttgcactagatagaaacttcaatattgactagaaatggtgagagcagaaattttgctttggttgcaatcttagggggaaagcatttattctttcaccagtaagtttcatgctagcaataggtttttcttagatgggcttgatcagattgagaaaatctcctgttattagtagcttactaaaaatttctatcatgaataggtgttggattttgtcgaatatactttttgcattaaatgaatggatttttttgtcgtttttgtctgataatatggtgaattgcattggttgatttttgaatgctatctaggttatactattttcttgagtgacttttggtagttgtatttttcaaggagttttcccatgtcatctaagtggtccaatttttaaggataaagcttttgatatattatttttattataattttaattttttataatctatagtgatggcctttctctcattcttgatatttgtaaattgtgtttctctctttccattctgatcagtctccctaaaggtttatcaagtttactgaccttcccaaagaattgtatttttgctccattgattttctctattatttttctgatttccatgccattgatttctactctgatctttatgatccttttgtctgcttaatttgtgcttcagtttatatccaattttccagttttttaaggtagaattgtagtctattgattttagatttttcctcatttctaatataagcatttaatcctgtaattgtccactgtattaaaattatttaggtgcattgcataaattgtgatttattatgttttatttcattcatctcaaaatactttcttaatcttcttctgatttctcctctgacctatggtttatttagaagtgtgttttttgctttacaaatatttggtaatacatttttgtatttatttctaacttaatttcattttggtcgatgaacaaaccttgaatcattttaattcttaggaattcactgatccttagattctccctacaaaaaaaaaaaaaacatttggcataattcaaagttcattcatttacaaaatcacccaataaaatagaaatgtgtgtgtgtgtgtgttctcctgaagaaaaagggagacaagaagggctcctgttttattaaaatacattgctattgtttaattttaaaatgtactcttctgataatttttaaatataaatttaaaataaaagatcactctttataaagcatcaggaatgaatgcattagattacgcagaagataatgaaagctcaatgtgaaaaagaatagcatcttgccctggagaggtttctttttttaaagcatgcaattttatggtagtgatctcttacctgttagaacgtaacgtgtaaaagactgagctcctcagtcttcaggcaaaagcaagctttaagttccgctccatttcatgcttccttgtttctcaaatatccaaaaccacatctcaggttgcatcatattttggaaacatagaaggaatgatcagggaaataagtgctggctaggcagccaccctcttggaaagaatgcatgggctttccgggtccaaatctatgcagctgagagggagaagggaaagccacagcttgccttggatttcttaaagtgcagagtctccacctgctggtatatgtgacccaaataatatacttctggctatcactcttctaggatggtttagagggatcttgaatttccagtacaatcaatatgcttcagcatctttttacatcaaaagaaaaacaagagggcacctgggtggctcagtggctgagcgtctgccttcggctcaggtcgtgattccggggtcctgggatcgagtcccgcatcgggctccccgcggggagcctgcttctccctctgcctctctctgtgtgtctctcatgaataaataaaaatatttttaaaaaagaaaaacaagatataaacctcaacatttttgaaatgttatttagttctctgagggtatggcaatgagagtttcaaatcatgccacagaaggcaaattttaaagtaacacccttaatagcaatccctttccccaatatccattcctcttagcttctgctcagattttcttctctctcctttgtgtctcttccatctccctatcccaaaccagctctcttacactgccttttctgcagcacccagcttcctgcataacctccttttctcttaattgctttctgccttctgatatttcaggtaagaaatttgcttcctgcctggttcctcttcttttatgtataaactatctgttagttagcttatttatttcttttctaaaagctatgagatcaatctttaatcatcattgtttttctttcacttctgatcttgtaatcaaacaatttcatctctacatatgtaactgtgtattttcattattcctgcttgatgcctttaagttgcacgaatcttacccattcaagactttacctcaggaaaaggttttctattatttctttaattatattctcgtctatatctattacacagcgattggaggttgttgtactgaacttccttaacatattttctcaattttgtgtgactcaaggtagctgggactcaggggtccagttttgtcttgttctctctctcccacccatctatatcttatgaccattacctgagcagtctaactacttagtccttttgcatctgccttaaagaatgctccctcattaacttcaagactgaaagcagtttaaaatgagaccatttgaatgttatcttattctttcttctctcctttaaggattccgatatacatatttcctttttcttgcctgtcctctgtatcaattgttgtatcactgtggcagatacactttggaaagatcaaatggctaaagaattcagtcccacaaagggccctctcagagcttctaagtgtgccttactactgcactcaaggtgttgtccctcaaaatgctcagcaggggtcaacgcagagaggtgattgacttgcaaagatcagtagatatgacttttgtctatggagtgaatttccataaaatccacaaagacatacaagttttgaaaaagtactgctgtgtggagtaaagggagaaagtacaaactgaaaagaggttatgaggctcccctaatgccactggcaggaagcagtctgatgaagctactcactcacaaacaggtgccaccgtccataaaaaaagaaggatgactcagaggacagaaccaagaatccagagagaaaaacaaagagccacagaggatcagtcagggaaataagcactgacagactgccactttctgggaaggaatgctggccttttccagtccacatctgtgaaagtgagaaaattgattattctcagtccttgaaatgtgatcaaggaattctgactagggttttcccaacaggaagtaagaattgtcatggattagtgacacctttttaacttccactttccctctcttcgaacaagaatacttatagcagctatcctacacctgcctcaccattgtaagatgggtgtagtggaggcagataacttgtctctagtttcacaggtccacgaatgaagaggaattgtaccctgggagttgtacctaatggattacagccaggggcctcatgttcatctggacctgatttagatgagatttggggatttgagctggtactataatgaaagaagatttgttattctgcatgtgggaggacattggaccattagagtcatactctaaggtgaccttcttgtacaacctcctcccttgaaagttaaaaggaattaggacttgcttctaaccagtacagtatggcaaaggtgaaggatgtcatgtctaaagacaaagttaaaattaggttatgttatatggcaaatgtgaaaggttggcattcccttgatttggatgttaccaggcaaaggtaatgggagatcaatttgtgattgtgttttgttgtattagacttcattttagcatgctggagaaagagattcctctttactggctttgaagtaaactccatgttatcagaggcccgcaagaaggaatatggtaatgaactgcatgcaggtgatctttctgaatggagagtggtccctaaccaacagccagcagtagattaattctgccaaaaacctaaataaacttgaaagtagatttttccccagtcaagcctccagttaggaacacagtctctgagaccctgagcaggggagcaggttagttgtgactagacttctggccacagaaactataagggaaaactttgtgtcattgtaaactgctgtttgtggtaatctatttgcagtagaaaaacattatcatcactgatacctgtttatctatcttatttcattatcattctctggactctatgccattttgcaatgtcctttgttgtgtttcaatttgaatatattatccatttgtaatttagtttttatttctaacatgatttcatctttttaaattattatttcctctcctgagttaactctcatttcatgatttcatgtttcccttccatttaattcctgggtctctagtttctactgtgaattttttttcaactcacgaatgcctggttcagcttgtggcatagcactacagttgtcttctgcttcactggtggtgatgatattctcgttctggttgtcattcttgttttagagaaaatatgcattatctgacagaagctttagtggagcatatgtgcagctacatgttcactctgtattgtctattttcctggaccaggaaaaacagttgtgtgtacgtgggataagaattctttttttttttggggggggggataagaattcttatggctttctaggtttcttaattcaagatcaccctgtgctgttagcacagtgaagtacattttcattaataccaggaatctttgggaaagagaggggttgacaggtctgactttgtgagtctcttttgttcctgaaagtaacttaattttccctacttgcttctttttttacctttactaccatgagtcttgggagcctccaagatttaaatcaccactttattccctataataacatcttcccaagactatcccccctttgactctcttcacattaaagtccttttctgtaggttccacagtatgtatactgtatctatatgctatgtcccagatttgttttcaaaatttccctgctcagaagaaaatgttatttttgcaataataactttctctctgtccattcccctaatccccactccacttttttttcttccagtcattctaaccattcttacatagtccccaaacttgactttgatagatatgagtatttatttccctgcttttattaagtcaaagtttatagtattttctgtgttctggttacagtgtaactatgggttacacatgattttcttgtctgccttagaacataaattatgagtacaattggatgattgttaacaaactgaacacactgcttggaccaatagtcacatcaagaaatggaatatttacctcaaactcagaattccccctcgtgcttcctttcagtgatttcttcctcaagggtagcgctatcctgattttttagcagtatggattatttttgcctgttttgaactttatgtgaatgaaatcaagtgctataactcacttatctctgagttctttcactaaaaagtatgtgagattcattcacgttattagttcatttattcttataaatagctattgtatttatattcttaaatttatgtgttttactcttgaaatttattttgatagtctccagtttgtatttatcacaactagttccattattatcattcttttagatgttttgtagtgagcatgcaaatacaattcttttcggtgtgtgcctagtattggcatcactaggttttaggttaggtatatgttcagctttagtagattttgcaaaagggaatttttaaagtatgcatactgatttatatatactcaccagtaatgtgtaacaattctaatcatttcacatatgtgccaaaacttaacatttctctttttattttccttatagaaattttggtaaacatagagagagatatcacattgtgaatttaaatattgttaaccaatgattactgtggatgagtctctgtttatatgtttattggccatttgaatattctgttttgtaaagtaaactttaagttatttaaacattttcccatcatgttttctgcctttttgagatggattcctaggaattccttatgtattctggatatgaaccctcttgttgaatatatgcattgcaaatatttttgctcaaaagagagatcagtttgtcattcatcttctggttgtttggggtttaatttgctctcttgctttcctaatttccaaaggtggaagtctatcttattgatgtgagatttgttcttttctgatagtgatgtttgcagctataaaactctctttaagcattgcttttgctgcacctgtttggtatgttgtgtttttgttttcatcagctttaatttcccttgtgatttttttctttgacccatgcattattttaaagtatgctgtctagttaccaaatattaagaaagtttctaattttgttctgttgttgatttttaacttaattccacatactttgtatgatttaaacccatttgtaaattatgaagactttttttatggcttagcatatgatccactctgaagaatattccatgtgcacttgagaaaaaaatgtgttctgctattactgagtggagttctctatagatatccattagatcaagtcaattgatagcattgttcaaattgtctatatccttgctaattttctgactatgtgttctataaattttgaaatttatctcagtaaagatactgagatctttaactattaatgctgaattgtctatttctccctccaattcggtcagattttgcttcatgtatttggggactatgttgttaattatatctatgttaataatttgtatatctccctgagaaatgacccttttatcattgtgaagagtctctcttcatctctagtaatatttgtaacaaagtctatttttggcttatgttaatgtagccactcagcttttcacgattattgtttgtatgaacatctttttccaatcatttactttcaaactatgtgtatctttggatctaaaatgtgtttcttaaaaaaaaaaaataaataaataaaataaaatgtgtttcttataaataccatatggttggatctttttttaatcagtctgacaatatctgccttttggttaaaatatttaatttatttaaatttaatgtaactacttaaatggttggatttacatctgccatatcgctatttacttttttatatctcatgtcttttttgttgctttgtttctcttttactaccctttttttctattaaatagatttttataatattccattttacttttgtgtttaaaaataactttttttaaagctattttcttagtgttttctccaagaattacaatatgcatcttgatttattgcaatagacttcagactaatactaactgaatttcagcaaaatactaaagcttttgtaccagtaaagttttatatcctctcattcttgtgtgatcgttgtcacatatattaccaacatatgttataaggccaacaattaagtactataagtattgcattataaatcttttttctattaaagaagttagaagaggaaaggaaaaatgtatttacaatttcttttacatcagcctacatattcactaactctggtattcttcatttcttcttgtacattcaactaaccatccatattggtcacttcctctaatatcgttctattcctacctctactcctttgtgctattgttgtctatatgttactttatgtgttaaaaacctagcaataaaattttataactatttttgtttgcctttaaataaattaagaaaggctgctagatatttacccaaaggatacaaaaatactgatttgaagggatacatacatacatgcaccttgatgtttatagcagcattatcaacaatggccaaattatggaaagagcccaaatttgattgcctgatgaatggataaagatgtgagatagaatatcaatagaatacaatagaatattactcagccataaataggaatgaaaccttgtcatttgcaataacatggatggaggtggagaatattacgttatgcaaaataagtccgtcagagaagagcaaataacatatgatttcactcatatgtggaatttgagaaagaaaacagaagaacatagagtgggggaaagagagaagcaaaccagaaaacagactcttaactgtagaaaacaaactgagatttactggaagggatgtgaggagatgggttaaatgggtgaggggtattaaggagggcacttattgtgataagcacgggatattttatgtaagtgttgaatcactaaattctacacctgaaacaaatgtcacactgtatgttaaataactggaatttatataaaaacttaaaaaaaaaaaaaggaaacaggtatatgaaaagatactcagtatcattaatcagcagggaaatgcaaattaaaaccacaacaagatatcactttacatctattaggatgactattatcaaaaaaaaaaaagttttgatgaggatgtgaagaaaagaaaactcttgtacattgttggtgggaatgcaaattggtgcacccattaccaaaaacagtaaggagattcctcaaaaaattaaaagtagagctaccatatggtacagcaatcctccttctggatatatattcacaggagttgaaatcaagatcttgaaatgatatctgcccccccaccaccaccaccaccacattcacaacgaccaagatatgaaagcaacctaaatgtccatcaatgtgatacaggaaagctaggttcttgtctcatggagtcaaagaatgaatctcacagacaacggagagtgagtaaagtgatagaagtttattaagcaaagatacaaagaaagctctcaagtgagaggggggcagccccggttgtgcagtggtttagcgccacctgcagtccagggtgtgatcctggagacccggatggagtcccacgccaggctcctgcatgaagcctgcttctccttctgcctgtgtctctgccactctctctctctgtgtcttaaataaataaataaataaataaataaataaataaataaatctttaaaaaaagaagtgagaggggtcccaacagggttgccactgagggcttgtagaggcagtcttttattgagaactgactgggaagcttgtggccttgagattcttgtgctgtcttggtttgagtaaggaccagtgataacatctttaatggcttacttcttctatggggtctggttattctttgttggtcacagatgactgtcataaaaagacaccctccctgcccacacctagggcagggtggtctggcttgctcccttacttatctctgatttcattacacttcagcattttgtggatttctgtgagcctggttctgtggccccctacctatctctccctacctagccttgtttgtccctaactcaaatggataaacagatgaaggaaatacggtaaatacatataatggaatactattcagcctataaaatagaaaggatatcttgaatttccgcaaacatggataaacctagaagacattatgctaagtgaaataaaccagacacagaaggacaaatactacgacaccaattatatgcataatctaaaatagtcaagtttgtaaaaacagagttgactggtagtttccaggggttagagagaggaagaaataaagaggtatagcctatagaggtatagcctatgactattagttaataatactatattatatactttaaaaatgtgttaacaagatatttctttttttttaaccagatatttcttatggtaaaaatgtaacaggatattttatgataagaaccatcagaaataatgacaataataataattattaaccaattaaaagggcagaaggaaacttttggaggagatgaatatgtttatgacatagattgtgttgatgttttcacaaatatacacttatctccaaactcaccacgttgtgtatattaaatatacagtctttgtatgtcaatcatacctcaataaagtgttttttgattttttaatttttttaagattttatttatttattcatgaaagacacagagaaagaaagaggcagagacacaggcagagggaaaagcaggctccatgcagggagcctgacttgggactcaatcctcatctccaggatcatgccctgggctgaggcagcactaaaccactgagccacccgggctgcccataaagtggtttttttttttaaagaaatctatgtatgtatctttataattacctttaccagtattcttgtttcatcatgtggattaaatttccatctgctgtcactttgttttaatttgaagctctttctttagtagttctcgtagggtggattcactagcaaaaaaattcagtgtttcttgagctaggaatatcttcatttcaccttcatttctgaaggatagtttcattggaaatagaattcttggttgacaggttttttttctttcagcacttgaaatatatcaactcttattctctattggtcactaattactgatgaagagttagttgttaatattattgggattcctgtgcatatgtggagtcatcttactttgttcaagattttctttacctttgactttcaaaggtttgaaacagagatccctctgtttattttacctggatatgtagatatcttttataaaatttgtcaagatttcaaccatgatttcttctcttttttctttctgtttcattacatgtatgttggtatgcttgatgacaccccacatgtctctaatgctatttttcttcattctttttagtctctattcttcaaattggataaggtctattgatctatcttcattactgattatttcttccaccagatcagatctgctgttgaatttttcattccagttacttttcaactctagaatttccgtttggatctttttttatataatatatatctttttattgatattctctatttaatgagtagttttcacgttctttccttaacattttaagtatgactttagtcctttcaacatatttataataacttctttaaagacttcattgagcagcatctagactcgctaagagtctgttgattttttttccttgtattccttgcattttgtatttttttgttgttgaaaatcaaaattttagataatatgctgtattaatacagaatattaattctgcattctgattccccaccctccaggagtgagcgttcttgctatttgtttattttctgttttagtgacatgcttgggctaattctgtagtctatttccccacaatgtacagactatcatctccctgctcagtttcttttataattcttgtttttatttttatgcccaccttactaggatcacttttgggtcattataacttaataggaacaacagtttatcagaggttctgcttaaataccttcagccagtaaggcatatacactttggtattggatctgagtgtgacttggggaatgttttcaaagttcaaggagtttacaaatatgtcctagtttttactttctgcattcccaaggcctcatattcagtcagggttgagttagcttcctaggacactatctggttcctccttagcatgcataacctagcttatgtgcagactttcagatcatcaggcataagtgggattttagcaagattctctttggctatctttggaaccccctgtaaaatttcttttttttttttaagattttatttatttactcatgagagacacagagagagagagagagagagagagaggcagagacataggcagagggagaagcagactccttgcagggagcccaatgtgggagtcaatcccaggaccccaggatcacgtcctgagctgaaggcagacactcaaccactgaaccaccctggtgtcccaccctgttacatttctgactgctctgccattttattgcttgttccaaccagtattgtgactagttgatatgttcatcttccctaattatttgctcctaaggtcttggctgttattctacaacatcccaagacattgatttttcttcatgctctttcccaaataatgtcagctccctccagtgaagcagaggagttgccacattccatggcctagctgcctccctagtagaaattctgcaccatcaattggagttgggaggaggtgctgtttaaagaagcctctagctaaaatactacagacttctactgttgttaggattcagtttaaattcccttgttaagtgtttcccaatttttgtcctttggtaaatttccagagtctgataactttgttcagttttatcattgttttttaaatttatttaaagttattgaagtgttttcagtgtcaatatatgtgatatattttggtgtgttttccatgtgaaattggaaacaatgtgtaaataccagttgttgggatccctgggtggcgcagcggtttggcacctgcctttggcccagtgcacgatactggagacccgggatcgaatcccacgtcaggctcccggtgcatggagcctgcttctccttctgcctgtgtctctgcctctctctctctctctctctctctgtgtgactatcataaataaataaaactttaaaaaataaataaataaataaataaataaataaataaataaataccagttgttggtctatatacacttgaattatatgtcttttgatgtattggctctttcattacgaagtatctctctttatctctggtaatatccttataaagttttctttgactaatattaatgtaaccattccattttcttattagtagatgcgcaatatttttccatcctttacttttagtctgtctttatacttaaaatcccttttttgtgggcaacatatatttaaatgttcttcttgtgagaagccttgctttttaatccaatatagcaatctctgcctcttgattagagtacttgatgatatttgtttgatgtaattaatgatatggttggatttcagtctaccactgtgctgcatgttttattttttcccatttctactctttttcttttattcttttttgtctgcctttgttgacatattcattttatctcttttaatagcagttgaatagaaatgtcagagcttgagtctttaacatttgtgaaacttaactggaaaatcccagaaaggagaaatacaacaaattcaacaagttcaaattctgctttgaaaggaatgtggcttcctctttgagtcttcgtccattttgaaattctcttctgagtttcaatcaacttttcagcaccaaactctgacctatgtcttctcattctgataagactgtatgtttttgtttaagctatattcccccagcttctctttcaaaccaagaagcatcctccagggaagatctgagtaaatgttgagctcacctaactttatcttatgtccctttgctgaaaaattatctcctcatttattccacctacattgaatgatcttcagttctttcaagtagcttttaagaatcattcttttagttagactttataatttttatatgtaaaacagctagatgtagatgtatggttttcaatataagtaggtaactgttaaaataagagtagatatatttctgtgtatgtctacaaatagagtctgagatttttgacatctcaatagcaatgagtacacctaacacagaaatattgctttctagataccattctctccaaaatgaaccagagttccttggaaatataactgattctagtgctgaggaaaggaaaatgcaaatgttacacactgtaaatctatcaaccctcataaaaccttaaggggtaagttagtactatttttcccctttgtagatgagacaactaaggcacaggagaatttaaaaactctcccaggctcaaccagtaagagtcagagcttggatttaaacccaggcagcttagctccagaagggacactttcagttaatatctcttatgtcagacaaagatttgtaaacacttcaacaatgaataagtgtttcgcactctgaaaaaaacaaacaaactgacaaacttccacaacatctctcaaatctaatggacccatgctgtcaggattaaatttaagactcctggtactggctctttttgggccacatggccaactttgagggaagccttcttgagatgcagtctggggccagagactagaggtagcaaggcagccaaacagggacacttactctgtcttcctcactgagtcccttgaccaattctcttctagttgagtttacagtgtatcctgtgaagacccaacccctgcagcaccacaacctcctggtctgctctgtgaatggtttctatccaggccacatcgaagtcaagtgcttccagaatggccaggaagaggaagctggggtcgtgttcacaggcctgatctgtaatggagactagaccttccagactctggtgatgctggagacagttcctcagagtagagaggtctacaactgccaagtggagcacccaagttcgataagccctgtcaccatggaatggagtgagaagctttctgacctcataagttcctcaccaaggagggaattttgcttattcctgagtgtcagggttctctctcattacactatattttcatttgttccatgctctcttctcttcagaacaggtcattggagatagcctagtaattgtttccataaacacttaacttcctggaaggtaagatgcttggaagacagaaagaggtcatccctgttttgaacccacctgtgatatcacaggtcatggttcccccatgaccctgggcaccagtgccggcctcaagatgggcttcttttctggcactgttgctctgagtcgttcattgtgatctaaaaacaggtacatcatctataatgtagggaccttcctgacataagggaagtctgaggtaaacaagcatggagtttgtgggtaaagatcctgaggcaaatgcaggaagagcctctaaatgaaactacactgaatttgtgtgacagaaacttcatgggtcacattcctcacttcctattctcctctccaccctggcatcatgtgatgtgggttgtagtgttagagaagtctaagcaggggctctgtggctggggatattgtatctgggaacagacttgcttccacacttttaagcatatatattttccctttcttttcaggccactctggacttcagccaatgggtaatgctctttagtcctttttagagatagccttggtccctagaactgatggtagagacagcaagccaggtgacagaaataacaggactggaatgtgatcaggtggtttgcagtaaagcttcttttcaccacttaataaatggtctctaagatagcactggctcggggagacctaagaatgttcttcttactgcagggctttgacatgaggccctgagagaggggagaagctgcttgcagaggtgggtctggaacaatactctgctctgtcttctgcaggactcctgagctgaagtggagatggtgaccctcaagaaaaaaccttcctttccagcttcttctcagagtccaaaggtttccagcttggctcttattcttccacaaatacagcactttctcaggatctggtttgccctggcttcagtgaccctgcacagcctgtgttccccgatggctccctcttcctcgtccttgacctggaaccctcagtgctgactgcagtaccttatctgcattctctccttcctcttcctatgcagcccttatgtttcccttgcatgggaactcacgttctgctcacatttcgttatgagcttttctcaaataaacatggggttgagtgcttgcctttagctccgagcgtgatcctggagtcctgggattgagtcccacatcggtctccctgcatggagcctgcttctccctctgcctgtgtctctgcctctctctctctgtgtctctcatggataaataaataaaatctttaaaaaagaagaagaaagaaagaaagaaagaaagaaagaaagaaagaaagaaagaaagaaagaaagaaagaaagaaagaaagaaagaaagaaggaaggaaagaaagaaagaaaaagaaaggaaagaaagaaagagaaagaaagaaagaagaaagaagaaagaaagaaagaaagaaagaaagaaagaaagaaagaaagaaaaagaaagaaagaaaaaaagaaagaaagaaaagaagaaaagaaatgcaggttccacttcaaaatggtgacatatgaagatcctgaacttacctcttcccacagacacactggatctgtagctacaggtagagtcttttcctctgaaaagaaaaaagtaggtaaataagactggcagacccctttacacagggcaaatgaaagggaagccacatggaagcaggtaggagaggttaaggcatactctcaccataaaccccactaccaagcaggcagccacagtagaagagaactcaaaatccaaagtttctccctgaggagtgaagggattcataccccatatcagacactccaacttttaagaccagagcttgagagacaaacccccaaagcatctggttttgaagactgatgggactaaagctcatgagacccaaggagctgtagtaaacggagtgtttgaaggtagaagtgagacagtaaatttccctccaaactgaggaggcactttgagaccaggaaaatgaggcaggtgactccatacaatttatgcaatttattcagataacttactgatgagggatcaggcaggcaatgatccaggtgctatgcagctcttctctgcaatgtctggatcttagcccacaggttttatagagcaagaggatgttcaaaggagggccaaagaagtggtcaagtattatcagcactcctacagaaggaacaacttttaaagggcccatgcagactcacctgccccagggccccgcacagaaatagccctttgaaacatgcccagactttatgtgaaagagactcatttttaattttaagcattagtctgagggacaggtatgtgctggaacactctctgagtacagatgcttatgaacaccatcttcctacactacctctgccttgcgaaaaagctggcaggtacaatatttttttatttcctctttccttttttatttgccttttttttctttttatgttttcttatcattttcttttttttcttatcatttttccttcttttcttatgacagttcctatccttgcacccccctctgctttgcttttaccaatggacatcatctttgtgctctccttctgccatgttctacagcactaatatctccccaaggggagcttctacatacgtctagtgccctagtttttatgcctggtgacctggtttttgcagctaccacccaaagaggtgccccttaattacctgcttctaagagcagtgggacttgtatctcaggtttgcacaggaccaagagacagttcttaacagactgatacttccagggcactgcatagatagcatattgaaacacaccctgtctttcagacaaagagatctatttttcttggcttgtaaatttggcctgaggggcaggcttctggtttggcactcatatacagtactacagaggtgctctcaggaaacagagaccagttgatgcaatctttgtgctctacctcatttcattatagctcaccagtatcttacagaaaggagcttatacccttctttggtgccctattttttgctgctgccaccagtggatacctctactttatctggctctggtgactaactggtcttaagcttgcaggtaccacagaactgtaacagagaaagagttctcaagtagctcctaccctcagggcacaacaagaggcaggaacccaagagctcaatttttcttcaaaacaggtgtattagtttatcaccatagctgtagcctaaggagcagatttctaattaaacacacatctaagggttgacttcaaccttccctgagacctaaaagggcaggcattatccttgtgctctccttctcacctccaaatagcctaagggttttggggccaatgaggcttacacttgcatgtacaggcctgtatacatttgcattctataaaagctactatctgaggagctggcttccaatcatcctgaatctagatgctgactgagatcctccctttagggacatgggttggtcttggcacaccctcaactactaggagctattaaaaataaaatagtctgcttgtacaatcacaaaaatttgcaagacaacctagagctggggaagagttgaacaatgaggtttacttctacataaggccaacccctcaagactaggggagaaggctttttcatctaatgcacggaaaccaacacagagagtcaagcaaaatgaagaagtatgttacaaacaaaagaaaaagataataactcagaaaaaaaaccttattgaaatgaaaataagtaatttacctgaaaaaacaatgcaaagtaacagttataataatcctcattgaacttgagagaatggctgaacacagtgagaaaatcaacaaagaaatagaaaatataaagaagttccaaacagaagttatagaactgaagaatataataactgaatgaaaaaaaaaaaaaaaaacactaaagaggtccaacaacagactagatgaagcagaggaaaggatcaatgagctaaaagacaggacagagaaactagcctgatgagaggaggaggaagaggagaagaaagaggaagaaaaaaagaaataaagaagaagaaaagaaaggaaggaaggagagaaggaagatagcttaaaggatatgtggcacaacaaggatgctaactttcacattatgggggtcccagaaggagaagaaaaagaaggaggcagaaaacttatttgtagaaataattgaaaatttctctaatctggggagagaaacagacatccagatccagaatgttcagacagttcctagtaagataaatccaaacagccctacaccaagcatgttataattaaataccaaaagttaaagacaagaagagaatcttaaatgcaataaaaaataaataaaataaaaattaaaagcttattaccttccaggaaaccttcataaaactatcagcagatttttcagcaagaactttaaggagggaagggagcaatatattcaaagtgtcataagaaaaaagatttccaaccaagagtttccactcagcaaagttatcattcagaattaaaagaaaaaaggagccctattagtaacaaaacaaacatgaaagtataaatctcactggtaaaagtacataaatagcaaaagcactggattaatacataatttatgaacctagtgtagaggttaaaagacaaaagaagtaaaagaaaaaacctataattacaataattagttaagggattcatgagataaaagatataaaatataacatcagaaacatgaaacgtgggagaagtataaaattgagacctttagagtgtccaaactgttataaacttaaaatagactgtcattatatatacaaggagtagtggaaggggaggtgggcaggggggttggggtgactgggtcacaggcattgagggggacacttgaggggatgagcactgggagatatgctatatgttgccaaattgaactccaattaaaaaaaaaagaagaagaagcaaatgagcaaaggaaaaaagagacggaaagaaaccaagaaatatattctttaactccagagaacaaaccagtggttcttagaggggaagtatgtgggggcggggggggggggggatgaaacagatgaatgagattaagagtacagttattgtgatgagcactgagtaatgtatagaaccgttcaaccactatattgcactcatgaaactaacataacactgtattttaactatactagagttaaaatttaaaaataaaatcataaaaaagattgttaaatttcttaacttttccaaatggtttttttattttatggttaatctagaatcatgatggtgtgtctcattttgacaggaaaactcaggttttttttcaggtcatccctcatttattgagaattctatagacaagaaggcctgtgattgcctctcctgccttatcttccccctcccacagcacactctggagcccaaccctaagagatcaccacaattcactggaacttgatgaaaacaaagaagtcttcctgaaggaactagtgggcacaagtgcagtatcaagccaaattctgttaggaacagatcatggaatcttactctcttagaaatcacatatgcacaattgaccaataatgaattgcagaaaatgtgcttttctatggacaccagagggagaccatgaaagtctttcactgacaatctgtcaaaaattatgcctccaaaataagggcaaaacacttaacagtagaggcaaagtaagactgatgtgatctacactgctgcttacctcctaaatcagaatataaaagatactggagactcctgtaaccaaactaatgtaactggggcccaggggtgcatgtgttgcggcccagaaaaatcaaggccattccacctcaggtttagcgttagcacaagtacagccaccccaggcccctgtgaataagagctgaaatttacattactagagttacaggaagaaaacagcttacagcttaacgtcctagaaagcccctattagaataagaacagagcccaagccaagggcaggaagccactattagaataagaacagagctcaatgcccttgaaagccccatatcaaaatgtaaacagaacttgagaaattcctccaccccttctgaaaaaaacctagaccagcctataaaaaacccagctgtaacccactttggggtccaagtccctgctccactgtgtatacttggacccaagctcgagcttgtaaataaacccttgtgtgtttgcatcagtgttggctccttggtggtttctcagattcgcaatcttgggcacaatacacgaacacttggctccagggggtcccaaatagaccaggttcagccaattgccactgacaaaatccaccgggagagagactagtggtggtgaaacaagaaaggagtttatttcaatgaagccaacatgggaagacagtggactggcctctcaaagacatctccaaagtgctgaaaaatacttccaggtttatgagagaagtgtggggcaaaggttggtaggtacaaacaggtgggcagcagaggtcaggtcaatcatcgtactgggggcagtcactgcagtcttgctggctcaggctggcccttagtggttgaagaggtagttttggctctcattacatgatgctttgcccacagggtcttttgcctgaattaagagataaaccagaaggaagtacttaatcagaaaatttgaggtcaaaatggaggaggttgaagtcctctttcactaatgttgagttcactccttggtctgttacaaatacagactacatcaggtggagttgtcacacaaaggaaattttatttgcagcaaaccaggagcttgtgggggataacttcaaagtcaagactcttccaagaacactgagaggttgttgtttttttaaggtttaggatgaatattcagaaaagaatcttcatcatcacatgtaaaggcaggcttgagatgctctggcatacttaaaaaatgtgtccatacctgcatcctatgttatgttaatgagatttgtgcccctcctagggacaataagcagaggtaactcagacaaggggaggcagagagtccaaggagatgtgatgacaagcagaagtcagaatgaagcaattgctggagaagcaacaagtgaagaactcaaggtggcctctagaagcttcaagagacaagaaagattctcctctagagcctccagaaggaatgcagacttgctgtaccttgactagtcccatatgacctatttcaggcttataacctccaggactgccagacaatgagtttacattgttctaactcacttaatttgtagtcattttgttacaacagaaataggaaacagttacatcttgtaattgagaagcaatagggctcagagctcaagttctggagtcaaagagatttgagtttttatcataactacatcacttcctattcatatgaacttgggtgtctgtaaacctctctaagcctctattttctcaccagtaaaatgggactgcccaataaagtctctgcctggaaagagaaaatagagaggcagtgaggtctgctgttcttcataacaagcctgatacctgatattttaaaccatgtctatttataactttgtttaaaaggttaaatgatttctggggccccagggtggctcaggcagttaagcatccaactcttgatttcagctccagtcatgatctcaaggtcctagaatcgagaccttgtgttgagctctgaaccatggtgagtgtgatgcctattcaggattctctctacctctttctctgtgctccttctccccttgtgttcacaaactctgtctttccctcaaaagaaaaaaaaaaggttaaatgagcccaatatattaaaatacttagggaaatatagaggggggggggactttcatttctattttctttttttttaagattttatttatttgagagagagagagacaaagatagcaagagaaagcatgagcagagagaagcaagctctccactgagcagggagccaaatgtggggctcgatttaggatcctgggatcagagcctgagctaaaggcagacacttcacccaactgaaccacccaggcgcccatcatttctatttcctaaggtgaaaactctgatgcatttcatttttaaacccctttttaaaaaagtaaataccgtacttgtgagattcatagaaagttgcatataattaatattaaatatacctgaatatatgttctatatcagaatttgtctgctacacatttaattatggtattacattaaatgtcaaaaatatcctgctaaattatcgctgcagctgtgtaacttaagaaagtttaggaaattgtcagcaaaggaaatggaacctgacttctccttttctgtgcaacaaaaaagcaggtgaaatatacaagattctgagtgttcatcatacaattaactcaaaacaattctaatgtcattctaatatactaagaaactggcaaatgtcaatcactctactggacagtaagctatataagctaagaaaatcacaagttctgacagcagaagaaagcaaaaatttaaaaaaaaacttgtcaaggatagaaataagtgcaaatggatcatttgagttatagaacatttggataataaatcagatcctttttttttttttttgaatcattcctaaagttaaaccccattataacttttgagtgcttcatatttttttgtatatttttattggagttcaatttgccaacatacagaataacacccagtgctcatcccctcaagtgccccctcagtgcccgtcacccagtcaccccaacggcctgctcacctccatttccaccaccccctgttccttctccagagccaggactctcattttctgtcaccctcattgatatttcccactcattttctctcctttcccctttattccctttcactattttttatattccccaataaatgacaccatataatatttgtccttctccaactgacttacttccctcagcataataccctccagttccatccacgttgaagcaaatggtgggtatttgtcgtttctgcagctgagtaatattccatcatgtatatagaccacatcttcttaatccattcatctttcgatgacactgagcctcctaccacagtttggctattgtggacattgctgctataaacattggggtgcaggtgtcccggcgttgcactgcatctgtatcattggggtaaaaccccagcagtgcaattgctgggtcgtagggcaggtctatttttaattctttgaggaacctccacacagttttccagagtggctgcaccagttcacattcccaccaacagtgaaggagggttcccctttctccacatcctctccaacatttgtggtttcctgccttgttaattttccccattctcactggtgtgaggtggtatctcattgtggttttgatttgtatttccctgatggcaagtgatgcagagcattttctcatgtgcttgttggccatgtctatgtcttcctctgtgaaattgctgttcatgtctcttgcccatttcatgattggattgtttgtttctttgctgttgcgtttaataagttctttatagatcttggatactagccctttatctgatccgtcatttgcaaataccttctcccattctgtaggttgtcttttagttttgtggactgtttctttggctgtgcagaagctttttatcttgatgaagtcccaataattcatttttgcttttgtttccctttccttcatagatgtatcttgcaagaagttgctgtggccaagttcaaaaagggtgttgcctgtgttctcctctaggactttgatggattcttgtctcacaattagatctttcatccattttgagtttatctttgtgtatggtgtaagagaatggtccagtttcattcttctgcatgtggatgtccaattatcccagcaccatttattgaagagactgtcctttttccagtggatagtctttcctgttttgtggaatagtagttgaccatagagttgagggcccatttctgggttctctattttgttccattgatctgtgtgtctgtttttgtgtcagtaccacactgtcttgatgatcaccgctttgtagtacaacctgaaatctggcattgtgatgcccctggctctggggcatctttttcaatattcccctggctattcagggtcttttctgattccacacaaaccttaagatgatttgttccaactctctgaagaaagtccatggtattttgatagggattgcattaaatgtgtaaatttccctgggtagcattgacattttcacaatattaattctgccaatccatgagcatgcaatatttgtccatctctttgtgtcttcctcaattcccttcagaagtgttctgcagtttttagggtatagatcctttccctctttggttaggtttattcctaggtatcttatgcttttgggtgcaattgtaaattggattgactccttaatttctctttcttcagactcatttttagtgtatagaaattccactgattcctgggcattgattttgtatcctgccacactgccgaattgctgtatgagttctagcaatcttggggtggagtcttttgagttttctatgtagagtatcatgtcatctgcaaggtgggagagtttgactttttctttgccaatttgaatgtcttttatttatttttgttgcctgattgctgatgccaggactacagtactatgttgaatagcagtggtgagagtggacatccctgtcttgttcctgatcttaagggaaaggctcccagtgcttccccattgagaatgatatttgctgtgagctttttgtagatggctttaagatgctgaggaatgttccctctatctctacactctgaagagtgttgatcaggaatgaatgctgtattttgtcaaatgttttctctgcatctattgagaggatcatatggttcttgttttttctcttgttgatatgatccatcacattgattgctttatgagtattgaaccagccttggatggatggtaaaatccaatccttggatggataaatcctacttggtcaaggtgcataatcttcttaatgtattgttggatcctattggctagtatcttgttgagattgagtgctttattaatggaaattatatccacttgaataaccttaaatgtaggcttgaccctcaaaaaacatggagggtttgtcttaaagaaagctcaacccaatggaacacttcaggaatagatggtacaatacatgacaagacataccccagataataaagaacaaaaatactgtgtatccaagtacacataccacatacttaagaaaaaaaggctttaggaatataaaagggaatcaaatgtgtgcactcatcacaaaactaaattgtatgaaggaaaaaaaaaaaactaaattgtatgagccatagaccacaagaagtgcttatgtacctgaaatagtaccaatttgtattgaaaacctgaaaggaagtaaatatatgaccgagtccatgttcaaagctgtatataggcattaaatggaaagactatagcccaactgataatcagtagaaaaggtagctgtaagaaaagtataatccaagttaatgaagtacatatctagagtactaagttacatagttcagaatccatttaggacaaaatgctcagaaaagtaagaatagaaaggaacttcgtcaacttgataaatagaatctacaaaaaattttacagctaacatactcagtggtgaaagactagatgctttcccccctaagactgggaacaaggcaaggatttctttctttttttttttcggcaaggatttctactctccactctcattcaacggtactgggacttctagccagtgcaatagcaagaaatggaaataaaaagcatgcagattgtaaaggaagaaaaaatattgtttttcttttcagacgacatgattggctatgtacaaattccaatgaatatacatataaactactagaattaaaaattgaattcagcaagttgtatgatataagataaacataaaaaaaatcaattgtatctccatatactagcaaagaacacacaaataccaaaattaaaaatataataccattttaaatcacttaagcctttctggagatggcccataagagcatgcttcttgcagaagatctccaaaagaaaagaggaaacacaaaagaagcacttggcaaagagccccaattcttactttatgggtctgaagtgcccaggatactataaaattactacagtctttagccacgcacaaacagtagttttgtctgttgaatgttccacagtcctctgccagcctaccggagagaaagtaaatttatagaagataatccttcagataaatgaagcactaactcaccctgaatcaaggtgagtgggaaatcattccaataaacacattatagatttgaaaatcactcagaaatgaaatgtgtaggtataattctaacaaacatacaaaatttatatgttgaagactacataatactgttaaagaatatctaaataaacagagagacattagatatggacaagattatgctaaagtttatatacaaaggcaagagaattagagcagataaaaacaattttgaaaaaaagaatgataatgggaagaatctctctgcctaatttcaagactgattttatagttagagtaatcaggactgtgtgatattggcagaggcactcacacatagattgatggaacagaataaagagcccagaaacagacccatgcaatatgctcaacagatttttaaaattaaaaaaaaaaaaaaaaaaaggatcacagactaatgtgtaaagtgtaaagccataacacttttagaaaaaaaaacttcaagatctaggactaagcaaaaagttctcagactagacaccagaaccatgattcatacatgaaaaaaatacaaattggatttcatcaaaattaaaactttgttctctgcaaaagaccctcttaagagaatgaaaagacaagatacaaactgggaaaaagggatccctgggtggcgcagcggtttggcgcctgcctttggcccagggcgtgatcctggagacccgggatcgaatcccacatcgggctcccggtgcatggagcctgcttctccctctgcctgtgtctctgcgcctctctctctctctctctgtgactatcataaaaaaaaaaaaactgggaaaaaatatttgcaaatcacaaaatatttgcaaatcacataactgactaaggactagtcctagatatgtatgaagaattctcaaattcaacaataaagggatgcctgtacagctaagtggttgagtgtctgccttggctttggtcttgatccccgggcagtggagtttcacatagggctccccacagggagcctgcttctccctctgcctatgtctctgcttctctctgtctctcatgaataaataaaatcttttttaaaaaataaaaaataaataaataaataaataaataaataaaattgaaggagattaatttcatatataaaaagagcaacagaaaacgactgaagctgtatcttttacaaagtgagtataaatatgaagagaatatggaatggaataagatccttgcagacagagcacaccagaaaaatcatgccaccaaaaacactaaactataacctatttcaaaacaacctgaatgtcattaggaaagtgttagaagatgtgaaatagcaacatagatcagaattagaagatctcaatacagacaataatattgtattataagatgtactataatgatgtactaagtattgcttcagtgacaatcataccacaatatataggtatatcaaaataacacactgtacatttgaagtttacgaatgtagcatatcaaatttatcaaataagaaaataatattttttgggatccctgggtggcgcagcggtttggcgcctgcctttggcccagggcacgatcctggagacccgggatcgaaccccacgtcgggctcccagtgcatggagcctgcttctccctctgcctatgtctctgcctctctctctctctctgtgtgactatcataaataaataaataaatttataaaaaaaaaaagaaaataatattttttaatttcagaaatatgatgacagtactcaggagataattagaaataaaatccacttcagaaatgaagaaaaaaaacccagaaaaacaaatagacataatggagaaggcctcaacagaaagaaggcaaaaagaaaaaaaaatttaaagaaagaagaaatgagaggtaaagaggatccaaaagaaaatgacaaatattgaagatatgcaaaaaaaaaaaatctaatatgcaaatgtaggagtttctaaaaaaggaaaaccaaagaaaatataaaaaatatcactcaataaaacattcctaaaataaaaaaatatttgaacaatatatagaaagagaatatggtgggatgcctggatgactcttgatttaagctcaggattgtggtatacagccctgagtctctttttctttctttcttctttaaagattttatgtatgtatgtatgtgtgtatgtatgtatgaatttggggtgtgaatagggggaggggcatagggcaagggagagaatctcaagcagctccctgctatgcacagagcccaacacagggcttaatctcacgaccctgagatcatgacctgagctgaaatcaagattctgacacttaaccgactaagccaccccaggtgcccctgaaaaatctgtttaatgtctcatttagtaatgactcacttggtcataaattcttctacactcggtctgcaccaatatgttgtttggttaaaacacatacagaaaatgtggcctcactcagatggaaagaagggaaaaattttaatagcctttcagctattgtgtatattctttgataagatggtaaaactcaacaaatggtagatttttacaaattagttgcagtgtggaatctgaaatcttatcaatggtcttttcatgttctgttatgttaaaattcattgatctaccttgcactttgaatggaccctttatgcttggtaatttagcagtaccatgaattgatcatttggaaaggggttcacaggattatgcagatctccaaaacgttgacacagttcactaaatatgaaaaaagcatatttggtaatatcaccatcaatctcatccaaaaaaatatttattattaggaagctggggcaaacacaagttttcaaaaattttaatttttctctggaaaatatgactttcactgtcaatatcattttctttgaagtgaccggcttcttttgcttatttttgagaaaatgtctaccaaaaatattaaataaccacagtgtgtctgtaagtcactctttgaaaaattgcagtccattagaaaaagaagaggtgactagttttatctagacgtcaagcaattacacagtaattttccacaatataaatgtgtttccatcactttggagaagaaatactaattttgccacactgtgtattaaaaagatgcctacttgagattcaatatttagtaaaactaatgatttttattgcttcaccaaagctctctttaggtaaaactgacattcttgaagatttttcactgcaagtacatggcagccaagaacaccatgactacttgcagaatttagtgtcactgcctggattcgtgctacagcaccaggagttttacccactgtagattttgcatcatcagtacaaatacagtgaaaagggcaagtaagagcttattattattacaaaaatagttttgaccttgcagatcccccaaaagggtctcagtgacctccaaggagtccacagaccacaacttgaaaaccactgcactggagagacactgacacaatggaatagtagttagcattaaacacgttattattcacagaactaagactaaaaagggagcaagtatcctctgtaatggtatctgatccattaatttagatataggacaactataaaaaggggaatgatgaggagaacaaagcaaaggaatattaactattttcagtcatcattttggtggttacagtatgggtatcactatcctcagactgccatgtgcgttcatttggtaaaagcaaatgagtacgggtggatattctaattgtatgtattcccatgtctttgaaaaccagaattgttgatgtggaagaaaggaaggagacacaaatgtaatacagaagagattgattttttatttatacatatataaactttatacttctataaatatgaatattgcacataaacatttatatttccaccagaaagacttgatatagtgatgtctttatggttttagtgacatttcctattaaaataagccagggctttctaaaacaatggctgattgcagttctgggcaggaaacatacagaataaacctggaacatcttgtcatataacagaaaacaaagaaactaccaaagatttgtgtcaaaaggacttgggagccacttgaagaagtttccgtgcacctaagatgatactattaaactcattgctaaaaactaccgtgagctaaaagccatcaaatacattcaaatctttgaatttataatgatacaaaaaataaaaataaaaagtaaaacctagctgctcgccttaggataacagtaggaaccaaattcattaacttgaaaatgaataaagggaaaaagttaaacactgatcttttctttccactgtatcactgggcaacccaccagtaaatgaagggaagtgtctccttacagaagcaataaagcatacaaatgaagaaggaatgacagaatgaggatatcctcattctgcagacccagtgaaggaaagggtctaggcaaggagcactaacagtgacacaactggacagtgtgtacctcatgatgaaaaaacacactgccacctgcagacttgccaaagagattaaatctaactgtatccagcctctgcatccagttgccaacttgcagaaaatgcagagaatggaaggacatgctaaactgcaccaggtgcgtgcaattggtaaaatccagactgtgggaaactctgcaggtcaaatgctccaggcttttcaaaatattaatcatcccaggcggaaagggatgcaggagaaacctgtaaagtatgaaacataaaagacaactaagctatgctatcatgaattcatacctgagtgaatagggaataaaataatacaagtggttagtctgacagtcagaataggattgcttttgagaggagggtgaggggtttgatgggtctgaggcacatgcagactcttgcagggctggtaagttctatttcttgatctgagtggtgatttcagggtttttcccttcaataattcattaaattctacattttgtgtggttatcttcatttccgttttattaacaataaaaaaattcattaaaaaaaacagtcaataggaaacagtgcctctgagcatttgtcttctagagtggaaagaggaagatgtgaagataactcacagggttagggttggaccacaggaactatgcagtttggggctctcaggagccagctctggggggaatttctgcatgctgtccttggaaacagagattaatgacacaagaggaagaaggacagaagagtgagagaagcataatctcagaacacagaactccagaatctggtcaggactctccaaggcctcgtgcaagctgctccagaaccttgacctcatgagtgccccttatgtagtccagggctcaagcctctcagtactacttcaggctccggggcaggaagctttggttgggaacctagcatggctatggtgaaggaactgctcttgagatctgcagggacagtgatcagagtctcaggagggcccgcactctcccattccagagactcagcacccagtgacacccagccacggccgccctcacatcctacccccaagacatctccctctggctaaagcactgggagaacaatcagccatccaaagagaaggaaaaagacattacctcatcaccagaaaactgagtctccacatatcctagaatgagaggaaagaaacagaatgcccttgttagaaccaaatgttgtgattatcctgaagggagggtgatgacctgaaatatcagaatgccatttctgcagaccccctgaaatatctctggcttcagaaaagactatcctggtgatccctgagaagtacaatcagctttccctgtctcatatctttgaagttaggggaagtgggagtgggagaagccacagggcaaggggcaggatactcctgagaggctcaggtacctttctgagccctgaggcagatgacagtccccaccagaaggaagatcaacccaagcaggaaggctgcaattccactgagcatctttctccaagaatatgtggactgagctcctgtgggaaacagtcttaaaatagtaaaaaagctcccatatttgatgtgccttcctgggattccgaccctgtactgtacactaagtctagtgctatctagagaagaaatacatttagaaatggttctttgaagccaaggtttgcccccatggaatttctgttactgaatcttgcagcccacaagaatggcccctaacatactaagacaaagtattagaggatactacttctcacagctggaaataagtgatgaggtggttagatctccttctttcggaagatacaaggatagctatccaccatgtcttctcctcccctaacccaaagaccccaatttccatgactccctcaaatcaggggaaagaagcaaaagtgttgggaccaagatgaatgcagaggtcacacaaggccctgtgctaagtcatcattactctgagtcgaacccagagagtacaagaatctgattctcactccactccacagaaacagggctcagcaagctgggatgattaacaaggcaggtgtagacatctccaagttcaggagtcatttccagcatcaccattgtctgaaaggtccagtctccattcctgataaggccagtggacatgaccccaactctctcctcctgcccattccggaaccacttgatcttgatgtctcctggatagaaacctgtcacagagcagagcagcagattgtggtgctgcatggatggggtcctctctggatacactgtcacctctggttgtactgggaaaggagaaaaaaaatgagacactgtgaaggaaaaccaccatgccaggacaggagttctttgagagactacctctgcccctaatctccttctcacaccacccaagtagaaactggaaaaggtaaggaaatgtctgcccccaagagtcagaaactgggtatgtcaggacctcaaggaggagttaggccttatcagatactcccacaattaccccttctatttgagaccccactggtccttaacattcttgagaactttgggggtctgggaccaagaccaaagtgacctgacctgtgaggataatgagtgaatcgcaactggggacagaacatatgcccagaatcccctgctcataagtcatttattctgaagctggaaattgcctatcacaggaagtaaagcccatgatcaggttcatgtgtgggagattcctgaaccccaccagacttcaccttccacctcaccttttctccccacagtgaagggtgcaccgagctcgtagttatgcctgcagagtaaatccacagaagctctactcctctccaatatacccggctgactgttccagagctcagcatcaggcttccccagctctgtcaatgccacaaacattcccacgtggctgtcaaaacgtgcatactcctccaggttaaaaatgaatctcactacaaactgcaccttctctgttccattgatgaagtaacagtcagcctttgcctgaatcacaaaatcttctggaaaacaacagcaaaaaaaactataaaccaacctccacctttaagaaacccatacatagtaaattatgccagatcacatggatttgagaggaggccttttgacctcagtaaatagttcaaagtatcctcttctctcctgagtcccactccagttccatttagcaaaggcacacccattgtggaaagaagcctgacatccatcctaccaggccagccaaacagaagacatgtaacccaaaaaaggcaagccaaagagggagttccaagagacataaatattcattccacaaagatttcttgaccattgttttgctgacactgtgctggtttctccaagccaagttttcagaaacccaaggtttttacttccctttgttatcaagtcagaaccatccatcccaaaatgaaataattcaacggtactcttgtccttagcaagttcattctatacattccatctggagtgaagtgaaggagtgatgggggtagggggttgaaaagaaatacagactaggtatacatttgatgtgaaattaactcccatcctacttttcactcactatgggttttctccaagaattcctttatttttggacctttccctttgcacttttacttaaagagctcacccctctgttggctaaggtaatgatttcattagttttgttggtgtgaagtaaaataatactaacccatggctcaaagattaatattatcatcagcatcattggcactatacctaccattccagtagctacaacaacatggtgactgggaatacctggttagcttaaaccttctttgggggtttttacatgaaacatggccactacattgtccattatgattttctactttcggagcaccttactaatgttgatagggattagtttgagctatatatttcttcatagtgtctactctgcttatgttcttcaatgtaatttaacactcaaaaattatgtaatctgtcctcattggtaagaaaaagtataattcttattcactgagtacacagtctgagtgtttgggcccctccccgcaaattcatgtgttgaaatcctgacccctaaaggtgatattatcagcaggaggtgcttttaagaagtgcttgggtcagcgggttggagccctctctcatgaatggggttagctcttataaaggaggctccatagagaccccaagcccctcctaccacatgaggacacaggaagaaggtaccaccttctccaagaagacagtcttcaccagaacacagccatgctgatgccttcatcttggacttcctagcctccagaactgtgaggataaatttctgttgtttataagccatccagtctgtggtattttgctacagcagccagaatggacagagacacaatgatatctgtcatagatttgaagatctgaaaaattctaagtgacaaattggtaaatggtcctgggttaagtttccattgatcttagttctagttttatatctagcagttttacacagagccacttaccctccctgacctgctttcccttgcaaacaacactgaagctgagctcgaaagcatagtgttaagtgacaaaagaagcagaatttggttcaatgtacaatgacatttattaaaattttaaaatacacatgaaaaacaattctgaatatccttacaggccagcctcatagttaaagttacatcagacacattagaatggaattgtaaggaaaggagggagtggaaatacagaccaggaaagaggagagagtcctttcttggaccaacaaatgattgcaaagtgctgtgaacccactgggtaagactgacgcaattctctgtatgcactcgagaacaacaatactaaaaggaaactcaaatgggttgataatgtaggttggtcagaaaagatctccctgaagaagtggtatgaggataatcgttaacgaccccgagttgtaaatttgctttcatttctaaattcagaggtctcctccaggaactaatgagctgagcgttaaggactactacagcatccttcctggatcagcacttagcagctaaagtcagctgtaacctccaatgttcttccttctaacagtttaaatcagaaaaagaaaattatctgggtgtcagatctgtgtatgtgttaagacctgttctttaacggacattgtaagctcagagaggtttctattctaggagaataaccatcgtctcctacccaccctgccctcccaggtttgttcctcttttgtgtttaatgagaccttgacattcaaacagcctctgtttttaatgcattatatcctgttttctactgataagtatgttttcagggtgtaatactgtctcatattcgtgcagcccatctccttggctagaaaaataacagcaataaatacacatatccaggaacctaaggaaggcataatgcattgaacttctcttattactcaaagctggggttaataaatgccaaaagaataaatctttgtatccaatttctttggtccacatgtatctcagttggatagacataaaaagagttgcaatcatcagagcaactcctgttggaagaattatgactattctcagactgcccccagtttatacagttcttgagactgacactgatattataaggaccctaagcaagacaaaatgtttcccttcttcctgctaccctactccttgaagctgaggctctgctgcaggatgttccctttttccagcagtccattgtgtgtggtaaagagggaaggcatatctgaatttcaaaaggaataacactttgaaaccagaagccagttccagtctgggctgcagcctggacctacagggaaaagcatccatcctccatgccaattcttgcatacatacctgggaaaaaattgctctgctcttacctggagagtctctgccttgagtcatggaagaatccaatccagttacattcactaacagagccagcatccatggaacccacccagaacccattctggaaggaaaaacaaaaaattaaacagtaaagtcatcaacttcttcaaaatggggcttaccccctcaaaactcagtcaaaaatatttattaagagtatgaatacctttctggcttccccaggattggaaactcttcacactgataaccaatcatgatagaagagttttgcatcattaggtgctgggtagactactctcataaagtcatgtataccactcaagaattgtttacctgcagaattactgatggtagtttaatgtgtgtgtggaaaatgggctgtgagacaaaaatgttttaaatagtgtacatagtatgtggtcctagaagaaccatgtagattgtttactatgcattctattttttaaccaacaagcctcttctatggttgacattgccaacagagtgtgcaaataaagaagaaggtagacatgattctgaagcatttgcctcaaggggatttaatgaagggattatcagagaagatatagaagagattgagaaccacctggagagtatgatttcctataaaccaagagagggccacagaaaagaaaataaagagaagattctcaacagaataaaatgctgcaaaaatgttcaagaacattgaactcaatgtggttcagtcagttaagcatctgcctttggctcaggtcatgatcacaaggttctgggatcgagccctgagttgggcttctcactcagcatggagtctgcttagattccctttctccccctacccctctcacttgtgcagtctctctctctctctctcaagtaaataaataaaatcattttttaaaagagttcatttacttattcatgagagacacggagagaggtagagacaggcagagggagaagtaggctccctgaaggaagcctgatgagggactccatcctagaaccccgggatcaggacctgagccaaaggcagatgctcaagtactgagccatccaagtaccccaaataaagtctctttaaaaatgttcaagaggaaaaaaaaaatgttcaagaggataaaatataagaagcattattgtgttttataattagtggagcaccaacaaccttcagtaggacattgagtatttgaaatgaaggcagcagatataaacagcccttcaagaatgtgaagtgaagcagcacctgggtggctcagtggtcgagcatctgcccttggctcaggttgtgatcctggggtcctgggatccagtcccacatccggttcccctaaaggagcctgtttctcctctttctccttctgcctgtgtctctgcctctctctgtgtgtctctcatgactaaataaataaataaaatctttttaaaaaagaatataaagtgaaaacaagggaaaagatggtatttaccttgaatgaaaagccacacaaaagtaaagttacctttaagaaaaaccttaacagggatccctgggtggcgcagcggtttggcgcctgcctttggcccagggcgtggtcctggagacccggatcgaatcccacgtcgggctcccagtgcatggagcctccttctccctctgcctatgtctctgcctctctctctctctgtgtgtgactatcataaataaataaataaataaataaataaataaataaataaataaataaaaaagaaaaacctcaacagcgaaatgggggatgggtattaaggagggcacttgtgatgagcactgagtggtatatgtaattaatcactaaattctgctcctgaaaccaatattatactatatgttaaccagctagaattattttttaaagatttatttatttattcatgagagacacagagagacaggcaaagacacaggcagagggagaagcaggctccatgtagggatcccgaggcgggactcgatcacagtattccaggatcacgacctgagccgaaggcagatgttcaaccactgagccactcaggcaccccactaactagaatttaaataaaaccttgaaatagaaagaaaaaaaaaaaggaaggaccttaatgagtttctcagtcaagtagaaggcatctgtacatgggagaaattgaagataaaaaagagaagaaaagagaaattacctccagaattcctaatggaatccaaagagattgtcagacctggttataaaaaggagcacttgttcagcaactagactgaagacagggggattggaagcaagaaagaggggagtgaggaagttctagttgtatgacttcaatggactccagttaggacaaggcaaaaccttctgctagaaaggagttggaagaaaatctttttaaccaaagtagtctataagtacatttttatttatttagcacacagtcatctatgaccaatattatgggttatgcagtaatgacacagacatgttccttgttctcaagaaatatatagcctaagcaaagtgacaaggaaacaatccactgtgatgtcagaaggaatgagatgaatttggcaatgtctgggtacataaaaagagtacattttagcttaatatagagttcatgataaagttgatagttgatacaagtgacataacaagcagagatttttagaatttggaatacccagtacatgtggacaaatagaaagcagataaacagtgaaacaaaaagtttatctggattctttcaaattcctaattgtctgcaataagtaaatacatgcatactacttcattgaataggaacagatagggatgcctggggggctcagcagttgagtgcctgccttcagctcaggctgtgatcctggagtccggggatagatcaagtcccacatcaggcttcctgcatggagcctgcttctccctctgcctatgtctctgcctctgtctctttctgtcactctctctctctctctctctctctctgtgtctctcatgaataaataaataaaatatttttttaaatgggaaaatatatggggttttttttttcatttccttaagagaacacacatgctttgatgggtatgtaaggtaggattatgatggtagttgaccagaacacccaggaatacttgagttatgctttgccaaatatgcttggatgccctcaggaaatctctacccataagtagtaataccaacttgtaaattaaagactgactctattgttaattggtcaactctctaataccccaacagaaggttttatggtaaacttctctgaagcatgaggcccaagtaagttctcatgttccctcttaaatcccacttgtaccactagccagctataaattctgaaggactaagaactccccaacataagagtaatagtttgggtcacaaaggagctctgttcaagatggcaaaaataggattcagaaaaaaagtgaaatgtaactacatacatttaagtactgtggcccttgcactttgagtaaatatgccctgtcctggaatctgaccaatcaaaataataattccttctcctggaaaaagatgaggaggtgtggaagacatcactagtgttcaccaatatcttctacttcctgggcacatggaaaattgtatttcctagtttcccagaactatgtgactagttctagacaatagttagtgaataaaaaggttcttagacaaagattttagctacccttgcatgacttttctctttttcccttgccaagtcaaccaaaacaaccttgtattgaaatagtagaatcagaatataaaagcaatgagctaattagcagagttatcataaagaggagaagccctagagaatcacccaaacccacaatggatgttatatgaatgagaaaaaagttttgcttgtttaaggctctaagggctgttaccacagcttggcctaacttatcctaactaatataggacgagaataagattgttgacctgcccctccacatccctcaggtatacttgaatattcatgagttagaggcctgagcacaggcaaaactgggagactctgtccacagagtataggacccatgactgtgggtacatcttctagaggtgaatggttgtgttgctcccatttgtgagggcacatgtagagctgattgaaaaggtgacaatcagaggaagctcaagccacagagctttaacttcctctcttcttcttactcacaccggccttagtctttcccatgttattttatctcatctggaagtggagaaaaatattttacttgaagctaagtgaatgagactctgacatggagattatcagaagcagcaaaggcatgagacggcatgctgccactgaggcaagaatgctcctcccagggcatgagaaaagagacggtagtgtccatatagggttgccaacctaattttctaagcttttgaaagagggacacctgggcttgtattttggaatacttttgaaagctcttttaaggtataatttgtgtaattgacatgcaacaaagtgcacttatctaatgttaacaatttgataagtttttacatgtataaagtcatgaaactacattgtgaaaatcaatttatctgtcacccacatttactttgtgctcatataatctctgccttctccagccttccaggcaatcattaattttctttcctttacattgggttagtttgtattttctataaggcattattaagtatatggttgttgttgttttttttctgtacttgttttgcttcattctgcatgcttattgagattcaacgatgagcttattatcttatctgcaggcaatactgtagttggtcttcagccctttctctcaaggatgagagagagatcttgaggagagaagaaagagtgaggcctagaaaacacagataaaaggtgtgcttgtctgtggatttagaggaagagaaagagttgatagatggcaagagatgctgaggggacactggaggatgtgaatgctgaaccaaaaagttaggaaggttgttcttttctacttctggtgtgaacatgtctaaggctcataaactctaaaatctgacttaactacatcatgatcataatagctaatatttattgatcatacattgtgagtcaggtttttttaattttagaagatatttatttatttatttatttgagagagagagagagagagagagtacaagcaaagggagaagcagagggagaagcagacatccgctaagcagggagcccaacacagggctctatgccaggaccccaggaccatggccagagccaaaggcagacacctagccaactgagccacccaggcaccccatgagtcagttttctaagccctgtgaatgtctgtgtcagtgcatggtgatggcgaggtgggtagagagaaagagaaaaaagggaagaatagagagagaatcataataataacccttcacagagatagtgaaggctccttgcatggagcttgcttctccctctgcctgtgtctgcctctctctctcatgaataaataaataaaatatttttttaaaaaaatataaccatcttaaaaaatttttattgatatattgataataatacaataatattagaggactttaacaccccgttcactgcactggacagatcatctaagcaaaaaatcaaccaggaaacaaggactttgaatgacacactagaccagacagacttcacatattttatcctacagtaaaagaatacacatttttgggcagccccggtggcgcagtggtttagtgccacttgcagcctagggcgtgatcctggagacccgggatcgagtcccacgtcgggctccctgcatggagcctgcttctccctctgcctgtgtctctgcctctgtgtgtgtgtgtgtgtgtctctatgaataaatatatatatacacacatatatatttaatatatgtatatatattatatatatacacattcttctatattctatatatagaatatatatattctatatataattatatatatatatatatatatatacacattcttccagagtgtgcatggaacattctgcagaatagatcatatattgggtcatgaatcaggtctcaactaataccaaaagattattccctgcatattttcagaccacaatgctttgaaactggaactcaatcacaaaaggaaatttgaaaggaacacaaacacttggaggttatagagcattctactaaagaatgaatgggtcaaccaggaaattaaagaagagtcttaaaaattaatggaaatggatgaaaatgaaatcacaactgttcaaagccttgagatacagcaaaggcagtcctaagaggaaagtatattgcaatacaagcctttctcaaaaattagaaaaatctcaaatactcaagctaaccatacatttaatctaaaggagctggagagggaacagcaaataaaacttaaacccagcagaagagaaataataaaaattagagtggaaatcaatgaagtagaaacaagaagaacagtaatacagatcaacgaaactagaagctggttcttggaaagaattaataaaatcaataaatccctagccagacttattacaaagaaaagaggaaggacctaaattaaaaccatgaatgaaagaggagagattgcgaccaacaccaaagaaatacaaacaattttaagaacatattatgagctgtaggaggggcacgatggcggaagaggagggtccccaagtcacccgtccccaccaaattacctagaaaaccttcaaatcatcctgaaaatctaaaaattcagcctgagatttaaagagagaccagctggaacgctacagtgagaagagttcgcgcttctatcaaggtaggaagacggggaaaaagaaataaaggaacaaaacgcctccaagggggaggggccccgcgaggagccgggctgaggccggggcgagtgaccccaggacaggagagccccgtcccggaggagcaggagctgcaccgaccttcccgggcggaaaggggcccacggggaggtggagcaggacccaggagggcggggatgccctcgggctcccggggacactaacagacacctgcgccccgggagagtgcgccgagctccctaagggctgcagcgcgcacgggggacccggagcagctcggggggcttgggggcggctccgcggagggggctgcggggcgggagcagctcggggggctcgggggcggctccgcggagggcgttgcgcggcccgggagcgcgaatcaacagcgctggccccggagcacaggacgccaggacacagcccaggatccggcctcccccgggacaggcagagtccgggagggtccatgacagcgaggacgctcctgccccgagctgagcagatcagcggccgccgcccaggagctcccaggccctgcagatggagagctccggagttactgggggagctgatccaggggctccagaactgggcgccgccactggggttgttcctcctggggcctcacggggtaaacaaaccccactgagccctgcacgaggcagggggcagagcagctcccccaagtgctaacacctgaaaatcagcacaataggcccctcccccagaagaccagctagacggacaagttccaggggaagtcaagggacttaaagtacacagaatcagaagatactcccccatgtgttttttttttttttctttttgatttctgattgcttcccccaccatttttttcctttctttctttttctttctctttttcttctctcttttcctttttttcttccttttttcttttttctttttctcttttctttccttctctctctctttttctccttttcccaatacaacttgtttttggccactctgcactgagcaaaatgactagaaggaaaacctcacctcaaaagaaagaatcagaaacagtcctctctcccacagagtttcaaaatctggattacaattcaatgtcagaaagccaattcagaagcactattatacagctactggtggctctagaaaaaagcataaaggactcaagagacttcatgactgcagaatttagatccaatcaggcagaaattaaaaatcaattgaatgagatgcaatccaaactagaagtcctaacgacgagggttaacaaggtggaagaacgagtgagtgacatagaagacaagttgatggcaaagaaggaaactgaggaaaaaagagacagacaattaaaagacgatgaagacagattaagggaaataaacgacagcctgaggaagaaaaacctacgtgtaattggggttcccgagggtgccgaaagcaacagagggccagaatatgtatttgaacaaatcctagctgaaaactttcctaatctgagaagggaaacaggcattcagatccaggaaatagagagatccccccctaaaatcaataaaaaccgttcaacacctcgacatttaatagtgaagcttgcaaattccaaagataaagagaagatccttaaagcagcaagagacaagaaatccctgacttttatggggaggaatattagggtaacagcagacctctccacagagacctggcaggccagaaagggctggcaggatatattcagggtcctaaatgagaagaacatgcaaccaagaatactttatccagcaaggctctcattcaaaatggaaggagagataaagagcttccaagacaggcagaaactgaaagaatatgtgacctccaaaccagctctgcaagaaattttaagggggactcttaaaatccccctttaagaagaacttcagtggaacaatccacaaaaacaaggactgaatagatatcaggatgacactaaactcatatctgtcaatagtaactctgaacatgaacgggcttaatgaccccatcaaaaggcacagggtttcagactggataaaaaagcaggacccatctatttgctgtctacaagagactcattttagacagaaggacacctacagcctgaaaataaaaggttggagaaccatttaccattcaaatggtcctcaaaagaaagcaggggtagccatccttatatgagataaactaaaatttaccccgaagactgtagtgagagatgaagagggacactatctcatacttaaaggatctatccaacaagaggacttaacaatcctcaatatatatgccccgaatgtgggagctgccaaatatttaagccaattaataaccaaaagtgaagaaatacttagataataatgcacttatacttggtgacttcaatctagctctttctaccctcgataggtcttctaagcacaacatctccaaagaaacgacagctttaaatgatacactggaccagatagatttcacagatatctacagaactttacatccaaactcaactgaatacacattcttctcaagtgcacatggaactttctccagaatagaccacatactgggtcacaaatcgggtctgaaccaataccaaaagattgggatcgtcccctgcatattctcagaccataatgccttgaaattagaactaaatcacaacaagaagtttggaaggacctcaaacacgtggaggtgaaggaccatcctgctaaaagatgaaagggtcaaccaggaaattaaggaagaattaaaaagattcatggaaactaatgagaatgaagatacaaccgttcaaaatctttgggatgcagcaaaagcagtcctaagggggaaatacagcgcaatacaagcatccatacaaaaactggaaagaactcaaatacaaaagctaaccttacacataaaggagctagagaaaaaacagcagatggaccctatgaccagcagaagaagagagttaattaaaattcgagcagaactcaatgaaatcgagaccagaagaactgtggaacagatcaacagaaccaggagttggttctttgaaagaattaataagatagataaaccattagccaacctgattaaaaagaagagagagaagactcaaattaataaaatcatgaatgagaaaggagagatcactaccgacaccaagaaattcaaacgattttaaaaacatattatgaacagctatacgccaataaattaggcaatctagaagaaatggacgcattcctggaaagccacaaactaccaaaactggaacaggaagaaatagaaaacctgaacaggcctataaccagggaggaaattgaagcagtcatcaaaaacctcccaagacacaagagtccagggccagatggcttcccaggggaattctatcaaacgtttaaagaagaaatcatacctattctactaaaactgtttggaaagatagaaagagatggaatacttccaaattcgttctatgaggccagcatcaccttaattccaaaaccaaagaccccaccaaaaaggagaattacagaccaatatcaccgaagaacatggatgcaaaaattctcaacaagatactagccaataggaccaacagcacattaagaaaattattcaccatgaccaagtaggatttatccccgggacacaaggctggttcaacactcgtaaaacaatcaatgtgattcatcatatcagcaagagaaaaaccaagaaccatatgatcccctcattagatgcagagaaagcatttgacaaaatacagcatccattcctgatcaaaactcttcagagtgtagggatagagggaactttcctcaacatcttaaaagccatctacaaaaagcccacagcaaatatcattctcaatggggaagcactgggagcctttcccctaagatcaggaacaagacggggatgtccactctcaccactgctgttcaacatagtattggaagtcctagcctgagcaatcagacaacaaaaagacattaaaggcattcaaattggcaaagaagaagtcaaactctccctcttcgccgatgacatgatactctacatagaaaacccaaaagcctccatgccaagattgctagaactcatacagcaatttggtagcgtagcaggatacaaaatcaatgcccaggaatcagtggcatttctatacactaacaatgagaccgaagaaagagaaattaaggagtcaatcccatttacaattgcacccaaaagcataagatacctaggaataaacctaaccaaagagggaaaggatctataccctaaaaactatagaacgcttctgaaagaaattgaggaagacacaaagagatggaaaaatattgcatgctcatggattggcagaattaatattgtgaaaatgtcaatgttacccaggcaatgtacacgtttaatgcaatccctatcaaaataccatggactttcttcagagagttagaacaaattattttaagatttgtgtggaatcagaaaagaccccgaatagccaggggaattttaaaaaaggaaaccatagctgggggcatcacaatgccagatttcaggttgtacttcaaagctgtggtcatcaagacagtgtggtactggcacaaaaacagacacatagatcaatggaacagaatagagagcccagaagtggaccctgaactttatggtcaactaatatttgataaaggaggaaagactatccattggaagaaagacagtctcttcaataaatggtgctgggaaaattggacatccacatgcagaagaatgaaactagaccactccctttcaccatacacaaagataaactcaaaatggatgaaagatctaaatgtgagacaagattccatcaaaatcctagaggagaacacaggcaacaccctttttgaactcggccatagtaacttcttgcaagatacatccacgaaggcaaaagaaacaaaagcaaaaatgaactattgggacttcatcaagataagaagcttttgcacagcaaaggatacagtcaacaaaactaaaagacaacctacagaatgggagaaggtatttgcaaatgacgtatcagataaagggctagtttccaagatctataaagaacttattaaactcaacaccaaagaaacaatccaatcatgaaatgggcaaaagacatgaagagacttctcacagaggaagacatagacatggccaacacgcacatgagaaaatgctctgcatcacttgccatcagggaaatacaaattaaaaccacaatgagataccacctcacaccagtgagaatggggaaaattaacaaggcaggaaaccacaaatgttggcgaggatgcggagaaaagggaaccctcttacactgttggtgggaatgtgaactggtgcagccactctggaaaactgtgtggaggttcctcaaagagttaaaaatagacctgccctacgacccagcaattgcactgttggggatttaccccaaagatacagatgcagtgaaacgccgggacacctgcaccccgatgtttatagcagcaatgtccacaatagccaaactgtggaaggagcctcggtgtccatcgaaagatgaatggataaagaagatgtggtttatgtatacaatggaatattactccgccattagaaatgacaaatacccaccatttgcttcaacatggatggaactggagggtattatgctgagttaagtaagtcaatcggagaaggacaaacattatatgttctcattcatttggggaatataaataatagtgaaagggaatataagggaagggagaagaaatgtgtgggaaatatcagaaagggagacagaacataaagactcctaactctgggaaatgaactagggttggtggaaggggaggagggctgggggcgggggtgaatgggtgacaggcactgagggggacacttgacaggatgagcactgggtgttattctgtatgttggtaaattgaacaccaataaaaaattaatttattaaaagaaagaaaattaaaaaaaagaaaaaaacatattatgagcaaataaatgccaacaaattaggcactctgaaagaaatggatgcattcctggaaaccaccaaaattgaaacaggaagaaatagaaaatctgaagagacatataaccagcaaggaaattgaaggagcaatgagaaacctcccaaaaagcaagagtccagggccagatggcttccccagggaattctaacaaacatttaaagaaataatacgtattgttaagatgctatttccaaaaatagaaatggaaggaaaacatccaaactcattctatgaggccagcattaccttgatcccataaccagacaaagatctcatgttcctgatgacatggttgccaaaacactcaagaagatactagccaataggatccaatagtacattaaaatgattattcaccaagagcgagtgaaatttattcctgggcttcaagggtggttcaacattcacaaatcaatgtatgatataccacattaataaaaggacaagaatcatatgatcctctcagctgatgtagaaaaagcatttgacaaagtacagcatcctttcttgattaaaactcttcaaagtgtagggatagagggaacatagtatcataaaagccatcactaaaagcccacagtgaatatcattctcaatgggggaaaacagagtttttcccctaaggtcaggaccatgacagggatgcccattctcactagtgttattcaacatagtactagaagtactagcctcagcaatcagacaacaaaaagaaataaaaattcaaatcagcagagaagtcaaactctcactctttgtagataacatgatactttacaaggaaaatccaaaagactctatcccaaaattgctagaattcatacagtaattcagcaatgtggcaggatataaaatcaatgcacaggaataagttgcattcctatacactgagactgaagaaagagaaattaaggaatcaatcctatttacaattgcactgaaaattcataatatacctaggaatatgcctaaccaaagaggtaaaggatctgtacactaaaaactatagaacacctatggaagaaattgaggaagatacaaagaaatggaaaaacattccatgctcatggattggaagaataaatattatttaaatgtctaagctaccaagatcaatctatacatttaatgcaacccctattaaaataccatcaacatttttcacagagctggaacaaatattcctaaaatttgtatggaaccaaaaaaaaaaccccaaatagccagaggaaggttaaaaagaaaaccaaaactggtggcatcgcaatgccagacttcaagctctattacaaagctgtgatcatcaagactgcatggtactagtgcacaaaaagacacagagatcaatggatcagaattagagaacccagaaatggaccctcaactctatggtcaactaatctttaataaagcagtaaaaagtatccagtgggaaaaagacagtctcttcaataaatggtgctgggaaaattggacagccacatgtagaagaatgaaactggaccactttcttacaccatacaaaaataaactcaaaatggatgaaagacctaaatgtgagacaggaatttttcagaatcctagaggagaatgcaggcagtaacctctttgctctcggttgcagtaacttcctgttagacacgtctccaaaagcaagggaaacgaaggcaaaaatgagctcttgggacttgatcaaaaaagcttctgcacagcaaaggaaacggtcaacaaaacttagaggcaacctacggaatgggagaagatatttgcaaatgacatatcagagaaatgactagtatccaaaatccacaaagaatttatcaaagtcaacacccaaaaaacaaataatctagtaaagaaatgggcagaggacatgaacatatatttctccaaagaagacatacaatgggcaacagacacatgaaaaaatgttccacatcacttgtcatcagggaaatacaaatcaaaaccagaatgagataccactttacaccagtcagaatggttaataggacaggaaacaacaaatgttggtcaagttgtagagaaaaggggaccttcttactactgctggtgggaatgcaagctggtgcagccactctggaaaacagcatgaaggttcctcaagaagttaaaaatagggatccctgggtggcgcagcggtttggcgcctgcctttggcccagggcgcgatcctggagacccgggatcgaatcccacatcgggctcccggtgcatagagcctgcttctccctctgcctatgtctctgcctctctctctctctgtgtgactatcatgaataaataaataaaatctttaaaaaaaaaaaaaaaaaaagaagttaaaaatagagctaccctatgacccagcaattacactactagggatttaccccaaagatacaaatgtagtgatccaatgggcacctgcaccccaatgttcatagcagcaatgtccacaatagccaaactgtggaaagagctgagaggttcatcaacatatgaatggataaaagagatgtggtgtatacacatgatggaatattactcagccatcacaaaggataaatacttaccattttacatcgacatggatggaaccggagcgaaataagtcaatcagagaaagacaatcatcatatggtttcactcatatgtggaatataagaaacagcacaggagtcacaggggaagggaagggaatctaccattcagggaaaactgaatgggtagtcattagagagggagaaaaatcatgagagactcccaactataggagacatactgagggttgctgaatgggaggtagctggggaatggggtaattggctgagaaggaggatgggtgatgtaatgagcactgagtattatacagaactgataaattcttgaacactatatatgaaactaatgatgtactctatgttggctaattgaatttaaattttaaaaaaagaatttggggtgccagaagcaaatttgtgatcttagtgagtaagaatacatttgggaatgaggaaccaaaagtctgggtctaatcagcttcttctttgatattactgctgacggtgtggatccacccaatgtattaatttgtgctttagtgtcagtatttctcctaggatggttttgtctatcacattatgctggaaaagtgaatgttggtggcattttgttttgcttatttgtttatttgaactcattattcttaggaaatatccactaaattataatattatgaactttaaaaaggctctgtgaaacaaactcaaccctattttgaggtgttttttttccaacttgtgctagattctgttgtaaacagaatattgtaaatatttttaagaatttttgtatcaatattaataagtaaattcatttaggttttttgttctctcggttttttttttttaagattttatctatttatttgagagagagagagtgcacaagagagcatgagctgggggagaggcagacggagagagagagagaggcagactctgctgaacagggagctcaaggtagggctcaatctcaggacccagggaccatgaccctagctgatgacagctgtttagccaactgagccacccaggtgtctctcatttatagtttttatttttgtgcactgtcatagtttaacattgatattatacttacttcactaaaagaatactgttggaattactgctcttgaaccatttatttaggattagaattctctctctttttttcctttaaagtctttattgcattgccctaaatatctgtacctggagcttttactggggtagctcttttacaatttttcctgtttcttcgttggaaatattctatacaaatagtctacctcttttttttttaaagattttattgatttattcatgagagacacagagagagaggcagagacataggtagtgagaaagaagcaggctccccccagggagcccaatgtgggacttgatcccatatcccaggatcatgccttgagccataggcagacactcaaccactgagccacccaggcgtcccacaaatagtctacctctacagggattggttttggtaaacttttcaagacaattcatttaatccaaattttcaagtgtatttttataaaattgaacaaagtaatctataattttcccctgttcatgtattaattttgtccttgtcattttttattttctctactttttcttgattaggtttgtcagtggtttattttactgaaatttcttaaagcttttgaatttattctatttttccattttctaactctttaatttctgcttttatttttatgacctgtgattcattgtattgttcttttcacttaatcttggtttcattctttcctttaatcaatttaagcaattaagtccatgaattctctgctgagtactgccttagctatatcccatgacttttgatatatgatttttaattataattcttctagaaatttttcatgtttgtttttctctctgatcaagaaagacacagtttctttaagtttctatgtggagaagtatttctctttcctgatttttttttattgttatctggcttgttccattatggtcagagaatagtatttatatcatttctacttttaggaacttactggggctctttgtaccatagtatgtagtccattttcattaatgttttgctggaatttgaaaagatgtattctctacttttaatgaagaagtctttttttttttttttgttcatgatagtcacacagagagagagaggcagagacacaggcagagggagaagcaggctccatgcaccgggagcccgacgtgggattcgattccgggtctccaggatcgcgccctgggctaaaggcaggcgccaaaccgctgcgccacccagggatcctgaagaagtcttaatatagatccatgagatctaattttatactgttggaatatcttctgtgatcatacttatttttgttcactgagaaaagcaaattaaagtcacctaatattagtacatttctgaatgttttccttgtatctcccttaatttcaggttaatgagagttacttatgtgctgtctgaacttaaatgcacatctcttatgctcttatatactcattatgaattttacattttacattaaaaagtgccttcttgtctcactcaattttttccgtttgaatttcgcctgttataacaatggtgttgttacctctgtttctttcttgtttgcattcttttgttatgcctttcccatgattttattttttgaataaacaaatgaaactttctgagtcactcttaggtgtgttttttgtatattacaaacagtagtttttctttcaatctaatctaaaatgatttttattttatatatcagttaagcccatttgcaattttagcaaagaaattcagtgtaatttgtgatttgtaagtgatactattttctgttaaatataccatttatatgagttttttttttttttagaaaatctttcattgtgcctcgtgttttctaaattgcagtttttcagatattttaaaaggtgtatattttgggattgtcctgataattttattcttcatttagtttcctctttctttagtttctgttagttatgaacatgataaaattgacagcttaaatcctctccttttccatttttttgtgtttacctttgtactcttaatgtgttctaaatgctaatacttggcttatccattttgtgagataattttagactcccggataattatagacaaagtcaccaataggtttatcctacatccttactcatttttccatttaatctgtaattattgagaaataagtttctgtttgtcaatttcttcttataattccatctatattttcctacctattttgtatgtatattttgtgctattttttgctacgtgtaaactgatctgttttaatataatgttctagtaacttcttaacattattcaatgatcatctttctactaattcttttgatgttagactacatttctaggtatcaaagtaactacaaacattgtcttcggttggtgttgattgtttatatcttattgcatgttttgattttaaccttttcctgtctttaggttttctttgtgattaatgggaagtgtgtaactggactttgtgatccccttactgactgcttcaccttcagtgatacatggttattgccacccacaagtcaatgatcctcctcctgacatcagaaggtcagaaggtcagtagtctaatgctaggtcaccatgctcacatcatttgcctcacttcatctcatcacatagtcattttatcatctcacatcatcataagaagggtgagcacagtagatgagatattttgagagacagaagcaatatataacctttattacagtatattgttatatttgttctcttttatttttagttactgttgttaatctcttattgtgcctaatttttaaattaaacattatcataggtgtgtccataaaggggaaagcaaagtatacatagggttcagttactatctgtggtttcaggcatccattgggaggtcttggaacatattccccacagataagagcaggacaactgtattggtaatccaatctgaaaacctcttttaacttcaaatttaatctatttattgggattactaaattttctggatttgcttctactaatactgtgttttctattttgttatgctctttctttgcttcctttttttctccatcacatattaaattgattacatttttaagtattctctattttcctcttacaggcatagtaattttaaattttaattatattagttaagagttacccctacatttaaaacttttttaaatttaaattccatttaattaacatatactgcattattagtttcagaggtagaatttagtgattcaccagttgcatataacactcagcactcatcatatcaagtggcctccttactacccatcacccaattacctcatccccccacccatctccctccagtgaccctcagttcatctcctatagttaagactcttatgacttgcctccctctctgttttcattctattttatttttcccttctttctcctatgatcctgttttgtttcttaaattccacatgagtgaaatcctgttgtatttgtctttctctgactgacttatttcgcttagcataataccatctagttgcatccatgtcgttgcagatggcaagattttgttcttttgatggctgagtagtattccattatatatatgccacctcttctttatccattcatctgtcaatggatatctgggctctttgcatagtttggctgttgtggacattgctgctataaacattcgggtgcaagtacccctttggatcactatgtttgtgtcctttgggtaaatccctagtaatgcaattgctgggtcatagggtagctttatttttactcctgcatttttaacgtcactgcctaaattagcaatatccgaagttaaactctaccctccttccaaataaggcaaagacttaatttttttttaagattttatttatttactcatgagagagagagagaaaggcagagacacaggcagagggagaagcaggctccatgcagggagcccaacatgggactcgatcccgggtctccaggatcatatccctgggctgaaggcggcacttaaaccgctgagccacctgggctgcccaagacaaagactttagaatgttttactttatctgcctcattctcatgctgtgatcattccatcatgtccttaaatttaatagtcataattgttggtgatttttatagacatttttcattcctcatgcatattttaggcagatgagttgttgttgctgttgctttgtatatgtgtgtgtttctcatctttgcttcctgtgtcccaatttttcttgctgaatttagtatccttatgtatgtggtaataaaagaaaaacaaatgacaactatcatatgatgtcactttctttccgtaagattgacaaaatctaaaaagttaacactctgtgttggtgagaatatggggaaacagataaacttatattgctggtggaactgtgcatgaatataacctcagtaaaagcaatttttcaacatatatcaatattagtaatgtatatacacttggactcagcaactccccctttaaaatttgatcctatggatattcttgcacatgtgtattataatgtctatagaaggcattgcttatattagctaaggacatccaaccgcccaactacccatcaataggagaagacaagctaaatgaaatatgatacttccataaaatagaatactatatagccatatatttctgagtgtaaaaaataaagttcagaacagtggatctaaggacttgctctttgtaaaaatagggaacaagagcatatatacatatttgcttaaatatacatgaaatttccctagaaggataaacacaaggcttacgcatgagttgtgtatacaaggggtcttggtaaaccacgagaaggatgggagtgagggtttcctctgcatacctttttgtggcttttggattttaaatcgcattagtgtattgcttatttacataaatgatatcttttaaaaagagaatagtaggagagtaagcagatagagggagtataggtaactcttttgaggagttttgtggtaaagctgggcagagtccatcttttccaagctttgtgacccaggcaagttagtaaaagtgcctaaatctccattttctcattctcagaactaatacagtaatatctgccacttaggattatcttaaagtaggaagatatatgtcaggcacttagcatagtacctgaatgattattgtcattaaagttattacaattcataagtacataaaactctagtttcaaaacctactatttgctaggatcattagatggacaccagactcaatcagatgggtgcttttattgctcacttggcaccaaaaactgggaagatctttgttttcctcactccctacttctccaagattctgacaactgtactcttcctcctcttgaatcacaactaccatgtggactacaagtggctatccgactcagctagggcataacggacttggaattcaacactatttccacatggggcaaagtagatggggtgggaggtcatctgggagttccaaagaaatccatgagactttcctaaggtttcccctctccattcatatcttcctttggaatgaataaaatatgacctaatgggaaagatgacaaaggtacataaggaggagaagttaagtggtggacagatgaaatggtgttagatggtaggcagggtgattactattatctgtggttacaggaccagagcacacttgttggtatttgcctaagttccacactttgacctccagggaacattttcagaatgtatccctgatataggacatacttaggaatttccctgaggtaaccaactttccagaccttaaggtcctgagatttgccacatctttctgaactgccccactggatgtctgggttttcttcccagctcgatcactgagtagccatgcgatttcagtccagtttctctttttgtaaagtaagatttgactgctatgttacttttaagatgccttctgggcttaaagtattaggagtctatgggtgtcattatactgaggatatcaaagaattttaacagaccatcttccatgagggcaacagtttccattaggttgggagatacaggaattattattcccatcatatacatagaggaaggacgtttggttgaggggggaaggaattaggccagatttctctctctccaaatgggtgaggggatgggataagtaggtgatagacatgaaggagggcacatgatgggatgagcactgagtgttatataagattaatgaatcactgacctctacctctgaacctaataatatattatatgttaattaattgaatttaaagtaaaaaaaaaaatgaaggaaaagaaaaaagtgggtatttcacggtaggtgatattcaagacacaaaaagcagactgaagcaaaggttgatctgcataagaagctccctactctgaccccaccctattcccaagggttgccaagcaggaaaaaaaaaaaaagcaaaacagcagaagttctggctagttcgtttgagaactggaaagtacctgctgtctctgggaatgtgaaactttctctttcctagaataggaaccttcaaaggtaagtccctcccaaaaggcagtaatgaacacagccttgaatcttcagtggttggcatgtgaagggaggactgaaaagctttactaatttgtgtggtctactatgaatcgagccctgtgccaggtagttgatataaagcttaataagatatatggccttcctcccaggagctcatggtctagtgaaagaacggaggggtgggaagacaaagagtttaatccttgaaagaggtaaaccccggagtgatagaagagcctggagaggacactttctccagactgagatcaggaaaggcttccttgaagacctgaccccctgagttcagtcttgaaggacttggggtaaatcggaaagggtggttcaagaaatggcaagcgcacaccataggcaaaggcacaaagacatgaggagggcagggaatttaccacagctggagcttaatgcaacagaaagggtgctgcaagtgagctgcacaacctcgtatgctctgaggaagatgtgagcagaaaggaatgaagaacacttgaaggatgttacagaagtgacgttgccctatgtgtctgctagaaagaaaaatgacttcacaaagaatggccagaagaggtgaaccaatggaggggaaggctctttggagatgagattgtctaagactaaatgaaagttataataacaacagaactagagagaaagcagtgatttcagagctatttgcctgatctgattatggattcgagactatgaacacatgatacaacataatttattggttaagattgtggactcaggggtcaggcctagattcaactccaactccaccactgtgtaaccttgggaagttatttaatctctttgagactcagtttccttgtctgtaagatgagataaccaatctcacagggttgaggaaaaggactaaaatgtctgaaaagcattcagcatagttcctattcacatgaaaactctatagacagatgttattaatgttttattaacactattaattaggaacctgctctacccctccataccttagcctcctccaaaatatcagacatcagtgtgaatggggaaagacacagaaaggcaacctcacaaatatttatgtcacaatggctaatatctatctcaaagaacacataagacacaagatagctggcaaaatagtagctatagcgacctctgggaaatgaaacaagggttagttttacttttcttgatgaatacgtgctatttacataataaggaaaatatttttaaatagatgtatcatgccacaatacactatgcagcaccagggaaatgaggctcttggacacagaaagcaccaccacctctccccacctcgactgccagccgtggtaggagcacacgtggtccaaacttccatcatgccccaagctccaggagcaactatccaggggcacaagcccagggaaactcggagcacaagctcctctggatcatgcagatggccaggagaaaggccctagagccctggggcctcagtcctccagtagctgctgcaccaggcgggaatagaggtcttgcccctccaagatctgtgcatgctctagcagctctccctccctgagcaccaggatctggtcagcactctgcacagtctccagcctgtgagtgatcaccagcaccgttcggtccccatgagatttccaatcctgcagctgaagagggaggatcataatacctcagagagataggaacaggggcacctgggtggctcagttgggtaagcatctgcctttggctcaggtcatgatcccggagtcctgggatcaagccccagctccctgctcagcagggaatctgcttctccgtctccctctgtgctcaccctgcttgtgttctccctctcactcttgctctctcaagtaaataaataaaatcttaaaaaaaaagaaagaaaagaaaggtaagaacaggatgggcaccatatcccaattgggcaccatctcttgtagcatcaggtaaaggaggtgtgaaagatgaaagtcaggaagagtagatgatagagtctaccctgcacttctctatcagctgtccaactgcaggaggcaggtagtaaaggaagctgtggaagaagggtgtttccacaccccatgtcctccattccactccctgccccccggggaagcacagatacccctccaccagtgattaccctccaccagtgagccgttcatcttctctctgcccagttctgtgtaggctgatccttcaggggtgctcctcaggcgcccactgcccccaccctcccacaccagtactcacggcgggctcacactggacatccagggcactggtggcttcatccaggatgaggactcgtgggtcccgcacgagggcccgggcaatggccaggcattgtttctgtcccacagccaactggttccctttctcccctacatctgagaaaaccgagaaatacctttcctcagacacaagtggcctcgacaacatcctccccaggagcagggacaagtgcacaccagcagttccactagcacccatcaggagtgctcacaagagagcaggggcagggaggacagggcctgctaggctgccctcagagagggaacactactaccaatggctgtgacgctgtcaggaacaaaccagatgggcaacttgagaacttctggtgctggagaaggtggggaagtcggagccaaacatcgggcaaggaaacagcagatagagtcacagggacacaacccgcgcccccacaaagcagctccaggtcctccactgactgaagttacctgtatatagtccatgttccatctcctgtatgaagctggatgcgttggcagcctgggcagctgccagcaccttctcatcactgcagctctgcagcccgtaggcaatgttgtctctcacagaacctgagaacagcacaggctcctgcccgactgaagccacctgtgcagaggagatgggagcatgggactgcgcatcaacccccgtggcagggatccccttctcctcttggcctacctctctcagagtggactccctgggtttcttcccactgacccccccttcccatgctctctgcacacgcttcttccctcctctcttctatccctcctcctcctctatgaccacccacctgtcggtgcaggtagccatgctcatactgccagaggggcttcccatccagcagcagctgccccttggtgggctggtacagattctgcagcagggcagccacggtgctcttcccagacccattgggccccaccagcaccgtcatctggccaggacgaagggtgaaggtcagcccctggaaaggccaggaaagggttagaggcttacctcagttccctacccttctctctctgtcaaaggtaagatcaacttctcagaggccttgctgcctgagagccacgggtccacattccctccttgtggcccctttcaggcaccttgaggacagactggtcagggcagttgggatatgcaaaggagacatcctgaaattccaccaggccctgcagagtgggaggggccagcgtccccggaggatgcaggtttggctttcgttccaagtactgaaacaccttctcagcagcccctatgttgctgagcatatccccacacatgtacaccagggtctggaaaagagaattgaaggagtcagctaatcaaatgttgcttcaccagaaaccaactccccagctttcacacactcccaggccacactctgcccaagccaggcttctccttccctcatccaaaaaggattgcctactttaaatgtgcaattggttttttttgtttttttttttttttatgatagtcacagagagagagagagagaggcagagacataggcagagggagaagcaggctccatgcaccgggagcccgacgtgggattcgatcccgggtctccaggatcgcgccctgggccaaaggcaggcgccaaacccctgcgccacccagggatcccttaaatgtgcaatttggatggaatgtaaaggcaactcaataccccagtgtgccaatttgcaacacaaaggatagagaggtccatactcctgttcagcgctccttctatccccagaccttccaattactgttctgtattacttgtgcacagtaagttctgttttgcctaactagacagggagctccttaaaaccaggcactgtgggcagccccggtggtttagcggtttagcactgccttctgctccaggggtgatcctggacaccagggatcgagtcccacatcgggctccctgcatggagcctgcttctccctctgcctgtgtctctacctctctctctctgtttctgtgtctctaataaataaataaaatcttaaaaaaaaaaaacaaaaacaggcactgtgcccaccttatctttgcagccaacagagtacctagcacagttctccatacataaaagacatctcacaaatatctaggaaaattataaaataaagaccgagatgaagtaactatttttgaaatctggtaaatatagggaaaaaactaaatgctattccacctttcctactcagactgtaccactggtttaccaaagagtggatgaagagaagtctcctttcctggatagatgtattccagtgaataaatggaggaatggtaaagtgtcactgtcttgcaacccctaataatggatctaggcaatgaacattgatggctgatgctaccacagacatacatgagagagataaagtgtaatatatgcagtgcataactgtatacatatgttacatgtatcagacaagtggaaatataaacactgtatttgataaattttaggaattactgttttgaacttttttggtgtgataagggcttcatggctatattttttaaatgtttatgttttagagacatgtatgtaccgaggcttttatagataaaactgtatcttgaatttgcttcaaaataatatgggtaggggtacagttgaaatagattggccatgagttgataattttaaagcaggtgatgggtacatgcaggctcattataggttttctggtctttttgcatatgtttgaagttctccataacacaatcagttgggattttgtttcatttgtattatatttttaaggggagcaaataaagctcaaggctcaccagagagaaaaatgggggaaaaaagagtatgcccaggctcctgactcacctgcacataatggcccaagtcctcctggtagagcagaaaggagagcagcccaccttgggtgaggtccccagcctggatctgctgccgtccacaattcagcatcaacacgtgcatgcccaagtgcagcatctggagggcaaaaagaaaggcactgaaagagtctgcattctttgccttctccactcctaccacactgagcagcagggtccccaggacgccctgaagtttcccatcgctccccctgccccacactgggtcctcctgccagccaccagcctctcaccctctgaaagagtaagtagagggcacgttccaggtctcgttgccaccgcagctgccggcatcgctccaccgccttcttatacagacagacctcgtgctcttcggccccaaaactgcgcacagtctgcagccctccaactgcctcctgcaccacctgtcctgcttttgccacagcattctggatctcccgaagcactgcctgcaaaagcaggccaggggatgcaaggggctgatgtagcagaagacaggagacccccatgtctcatccctgccctggggatgctccactcattgacctaaaaatatcaaactgtcctctttcctccttcctcacatttctttccagaaagactaatgagaagagagggaggaaagaaaatatgatgagttctcagtgctggatagggcaggggatacaggctttttctgctccttcgtttaaggtaattcacaccaccctcactgtctgaacgaagaaagaagggataattttcctaaggagccacagctagctaactgggacagggacaaggtgggaatgacactcaaaatggatcaaaaacctaaaccagagctaagactcttagaggaaaacatcagggcaaagcttcatgacactagatttggtgatgatttcttggatatgaacccaaagcacaagcaacaaagagggaaaaaaaaacagataaattggtcttcgttaagattaaagaagatttgtgtatcaaaggactctatcaacagaaaaggaaacccacagaataggagacaaaatttccaaatcaggtatctaataaggagctaatatccagaatactgaaagaagtcctacaactcaacaaataaaacacaacccaatttttaaaaaatgagcaaagaacttaaacagacatttctccaaaaaagatacaaaagtggccaacaagcacaggaaaagatgttgaacgttagggaaatgcaaatcaaaaccatggtggaaataaaaatcacctcaaaaatataagaatcgctattattctttaaaaagcagtgcataaatgtatacaacagaatttcactcagccataaaaaagaaggaaatcctgccacttacaacaacacggatagactctgagggcattacactaagtgaaataagccagacagaaagacaaatactgtatgatctcatttatatgtgccatctgaagaaaaaaaaatcatagaaaaagagatcagatttgtagttaccagagaccagaggcaggggtaggggattgattggaggaaggtggtcaaaaagtacaaacctccagtcttaagtaattacaggggaatgtaagaaagaagaaacaaacagaagataacaagtattggagaaggatgtgaagaaactgaaacccttgtgtattgccagtgggaatggaaaatggtgcaggcactgtgaaaactagtacactggcggctcttcaaaatattaaaaatagaattacagtcagatccagcaattctacttctgggtatctatccaaaagaactgaaagcagagactcaagcagatatttatacaccacgttcacggtagaattattcacaagagccaaaaggtggcagcaacccaagcgtccagaaacagaagaatggataaacaaaatgtggtctatacctccatggaatattagccttaaaaacgaagaaaattctgatacatgctacaacatggatgaacctggaggacattataccaaagtaataagccaatcgcaaaaagacaaatactatacagggatccccgaacatccccacatacctgatggcggacattgtacaccttttcagcagttattgccagaggcaccttgagcagagagaggagggcaagtcgaggtgacaggctcagcatgaagccatacaaccccaccactttgaccagacttctcaagagcacattggcattaagaggaagccagcagctcatcaatttggtatctgagctcagtcttgaattcagctcccctgtagaggacagtgccagtgaggaaaccaggtataatgcagaaccccagggactccccgtcacaaccttccccattgacagagcctccacttccaaacacccccctcacttgcagagaccagtggaggccacctcactcccctgtcccaaaagagagcacagaagctccttgccctggcaccatgggtacaggtgggaagagaggctgtttatgggtggaggtaactaaaggacaagaactgtccaggggaatcctagacctggactccaggccccacctgtcttagtctcctggaagaaaccaaggtcctggcgcagaagggaggagaaaagctgctcccggacccgcacattggttctggacatgatgaaagtgaagcagctccctcggcagccagcacacagtgagctgtggaggaagaaggagatgggggaagaaggggacacaggtgcagagaaggagagaataagcgagagaagcagaggagaaagcacagaatgaaaagaaatataaggttggagaaagtgtaccatgagaggcagaagagaagcagagagagagggagacaaggggaggggcaggaataaacagagggaggagaaacaggccagggagagctggatgtgggaacaaaatcatgacatgtacaaattcacgagtttttatggagctcactccatgctagacatagggaagactataatagaaattaagagatgttatcaagagaaacaacctatggctggcttccatctggtctcttcagattgtccctccagtctttcccctctgtcttggtgtctttccttcccaccccaaagtccttcttcctactttattgtaggaattgcagcaatgaattcccttggccaccccttctctggagccccagagacatgctattccctcatctctaccgtccctggagctgaggatttctcttagaccaaccatttttacagcaaaacttaaaggaaaaatgtgaaagcagagaagcaagtatttcacaaatatggtttctatgtttagaaggctgttggcacagtcagacataaaatgaggagggtttgaactccggcaatcacagagagaatggccagaaaagagccgcaagagaaataccttgaaagcagaaaccattggggctagtgtctaaacatcagaatggcatcaacatgggtgttatactatatgttggcaaactgaatttaaataaaagaaagaaaatgaaagaaaaaaaaaaaaagaaagaaaggcatcaacaatactgatgcttggagcctaggaaactgattgtttccttcgtgggaataaaagacggggccactttcaagaagaccagaagggagtattaatacatttgaagctctgggtatgtgcggtgtaagttaagagtgggttttatccaatgagaatgtcaaggaggcaactggattacaggattggagctgggtgtagaaatatggatctgcagagaaaatcaaagaactgagtcatgaggaaaggctgtatttaagggtccagagaaggagaataagttttgcaggggcggtagattggattggcaagtagaaagggagtccataaaaactaaatgaagaaagggatcaataataataagaggctattctaaggccgaatgctacaaagaagcaaagagaactgaggactgaattaaaaaaaaaaaaaaaaaaaaggcagtgaattgatcaatgggaagtacacttttgagtaactgctttcagcaaacagcaaatatggattggaagcatgatttggtaaatacagggattgaaagaatgaatggatgagtgtgtgaaatagaatggtgaataaacaattcacacgtattttaagtattttatgcttggtgtacaaaaaggatctgaaaacagagctaggaaacggacagccctgtaaagatgaggcgctagcaaatgggtccagctgagcatcacctaccttccaatggagaagaggcacatgaaaaagatggcggtggcaaaggcgtcagggttgaaatcacctctcaggatatcaatgacacgaccagaatagtaagggatgaccgtctcacctgagagaggtatggaggagaacagatgaccgtgctggcaccaagggcccttgcccacctccggtccccagtgccctcttcctgactcacccaacacagcgacaacaaggaagaagaaggctgcgacgaggtaaggcaggtctggccaggagagcctcagcagcctccacatcaagtctgtgttcttctcctggccctgctccccctcccgggcttccggggagctcagcagagcccacattgcccagctcagccacgcagccccgtaccccaccagccgcccgctccagggggctgcagccactccgactaggggggcgctcaggagccctgggaccagggccctcagggagaggaacagcggagtctccaggcagagcgggggcagcagcgctcccacctgccccagcagtcctcccacttttagcagccaccagagccccccaagccgcagggtcccctccagccacaggcctggaagcccccggggaaggcgagcgcccagggtcccctgaagcagccagagcagagcccagtcagccagcagcaggaaggcccagggtctcaggtcagggaaccgcatggtgttatctaggggaagaagatgagcaattacagagctggggtccccatctttgcccttatgctcaccaccccgactaggcccagcctgtccctcggctcctcattttacccagtcgtaccccaaaaggtccgcctgcgtccccggggcccatcagtacgtcccgcttatgacagaaggcacccggcctacggagggagcctcgtcccgcatcaaattcccgtgaccccctccccgcacgcccctgccccgcccgccgccgccgccgccgccgccgcgttccgaggagccgcctgcgctccccgcccggcggctggcgctgcccgggggcccggagagggggccgtgggggcgcccagcggatgcgtgggtccgcgctcgcggcttccggccgcaccgacccacccgcggcttcgggacggcagctccggagcgctctccgctacgtgccgagcaccgggctctgcaacgcgctcgccgggctcaccttcgtccccgccggcgacactcggcaaactggggcgccccgcacccaacactttcactttcgcttccccagccggggccccggttcccagcagggcgaccagcgggggacgcgcgacacctgccggtcgccgaagcccagtgcggagcccgcgctcgctcgccacgccgggccgggccgggccgggccgcgagcctccggcgcttagcaacagttactccggaacagaaagctcctgcaagggttttaaattgttattaagtgaaataaagctatttcagggattgcaatgttttgtgattggaggacaactgggttgtcttgcctcaagctctgattctcaagctcttactgcctcaggctctgatcctgtgttgagaactgcctcttcctccatccaggcgccagtgttagggtctgggatcaaaacagagccagattctgagcgagaaacactcagatctctcctagatatagggttccagacacgttcaccagggcctaagtgggtttccacttgcacagattttgagctgaaaggccctgattctttttatcttcatctgctctcctcaatacggcaccttgagcagagcacgtgttcagaatgcctctaggtcgtttcaaattatgttctcggagcacctctgtcatatgaggagaatggactttgtttcctggtctattgtacattaagccctaaacaggattctatagttcctgcctgacccacagcccatctatggaacatgctggtttgtttatcccagaaatagctcttcagattgaaactacctccccaaaataaaatctttaaaaaggtggagtgtggtacctgggtggctcagtggttgagtatctgcctttggctcaggttctgatctcagggtcccaaaatcaagtcccacatcaggctctctgcagggagcctgcttctccctctgcctatatctctgcctctctgtgtgtgtctcttatgaataaataaataaaacctgaagggaagaagaaagaaaagaaagaaagaaagaaaagaaaagaaagaaagaaagaaagaaagaaagaaagaaagaaagaaagaaagaagaaagaaagaaagaaaagaaaagaaaagaaaagaaaagaaaagaaaagaaaagaaaagaaaagaaaagaaaagaaagaaaaaagaaatttgcctctccaactcaaaatatccccaaaggaaggatcacttgaattccaaaccacccttttgaaatgttactagtatgtttaccagtgagttccttctagtttaaaggcaggggtggaggggtatttgaagtagaggattattaaaatttctccaaccttgccattctgggattttaagaatctcttcaaaatggggggtggggtgggggtaggaagcaagctctgtattcagctgctaactactttcaagttttttctttgcctcactctccctaagaggtgacattgtctgtgctccttgcagctccagcatgattcagaaaacctcattatgtctgtctcattttcctaacctgcttacttttccctcatatctccctcctcggggaggcagtcctcttcctcttcaatcatggtcttgtcatcttgcaattgagcatgacacatcatgaaattgaacccctaatgtccaactttgcattcaatatccagtgtccccaaactattatttgaagtaaatgtatcatgcttacaatcaccatagacatgtgaaatagaagctttttcagtggactccacaaactcaaagacagttggtctagcactctactcccagacacccaaaccattaataatggaccacacaggagtcttcaggttgtgtccctataaggagaaccctgacctaaattaaatggcacgtatgtgtccacagatcttgactgaccttcctgagggcatggagaaatgagctcggaaggaaaacccaagagaaatatttggtgaggccccatttcgtaggttggggttcaagtctcttctcagggaaagcctttctatctcccatccccttcccacaatcccagccccaaccccactcacccaagacacaaatgaatttataaccattttcctttattctacttagtggggcacccagagggtggggtaggggggagctacctgaaacaagagaacacacaagaaggtaaactctatcctacccccactggcccctggttctttccctcagggctcagattaggcttccctttgctctggggtataagccaacccaagcccctgagttgaccaggttttgccagaaaaggcatgcccagccacccctgttactgattggcctcttggtattggtgcagtagttcattgacatctgtactttccactttcacccaaccatcttccttcatgtggtacactgtaggcaaatgagaatgaacatggagtcacctttcacttcaagttcctgtcaatgatgttatgtggaagatgacaacatcataggcccaaacataccctcaacacatactttattactgacacttcaatgcccctctttggatgccaaaaacctcctcctcatgcctgagtggttcagtccgttaagcatctgactcttggttttggctcaggtcatgatatcagggttgtgagttcgagcccctcatcaggctctgccctcagcgtgggttcaacttgaagattctcaccctctgccctccccgcccaccactctcacacatgtgctctctctctctctctctctaaaataaataaataaatctttaaaaagattttctttctttctttcttctttctttctttctttctttctttctttctttctttctttctttctttcctttttaaagatttatttatttatctctaccactctgcctcctctaactctcccaatctcaaatcccccttccccacccaggagggtggtagcattggtttcttactgttgataataccgccagaatagctgtctcggtgggtggcataagtaatagccctgcggcccagttcataggcctcttcagggctgagactgggctgatagccactatccatgaccccataggcataagtgctcccactgccagtggagaacatatttcctgagagccgagtcccattttgatccacatagtagagtccaggaccctataggaagcaagaagtttccaagttggagtagaaagggagtttttagtaacttacaggttcaagtgtgagccataaaaagtggataaaagaataagaactacccaggaacatttgaactaggagagcactttagtaacaaccatagaactttagggggaaaaagttggaatcagctatttcaaaaaaaggaacaagcttacaaaacaatggtccatatctggacccagaaatagtccatggatatgctggaacaattctatgacccagtgttctatgtgccacccatcctttaagcgaggggatggaagtgtatcatggggaatctggtccctcatcagttgagggggaatatgaagaatggagagcacgtaccttcttatcccagccacagatcatactgcccatggagaggtccatgccccggtactggtacaccatgttggagagcagtttggaggctgctgacactgagatacgctccccgttccgcaggtagtacagcctgggtacaacagggtggtgggggcagcagattcagaggtggcaggagaaggctagctgtctgagcagcccacttgatgtgcaggaaataattaaagagacaagcatttaagaagaatggttttgggatcagggagagatctggaatttaaagaatctaaaccacataaagaaatcctagtaaatgacactgtcccaccagggttgatgatgtcagtgctaaataactgataaattatctggcttattggcaagagtaagctgagatctgggacaaggtttttaatcaccaaaaggctcttttgtgaaatgctacattagtaccaaaatgctacattagcacaggggcgaaaggatgagcagcagtgatctggaggttccaggatccaggactgaccactgggcttaggagagcaataagaggcctggcctacctgcactctttggccagcagacgctcccagtactgacagtctgcagcacagccagacatggtgccaagcagggaagggttaatctcaatcaccttgttaacccttgaggagcctgcaagaagatggagttttgagagaggtagattgacccccacagctctccctgtgtgtccaaaatcagtatcttcttctgctttggtgtagatgttgggttcctgctgagaggcgccccagctccccatattctaccggggggaacacacacactcactaatataattcccagcagtagcccgagaatccaccgccacaatcactccatgctggaacttgaaggccagtgtggtggtgccatggaccatctccttccgaatgttcttttctccattctcaccaagggactggaagaattcagtgggctaatgagagagaaaaagcagagaaatgggcactgcaaacttctgaaacacagggctctaagaaaggataaggatttactaggatttgggagtgagaagataggcagaaattctccaaccattaacaaccggaagagttaataacccatctctacaaggatgtgacttgggaaaaggaaaagaagcagcaggtgacgccagccttttccatcttccaactcaatggataagaaaggaaataaatgttaaccataactaaacattttaaggccgactttaatgctttttttttttccattcataggtcatttaaccctcacaacacgtcttattaataatatccccccattttacggaagcgacgccccagacctaaatgaagtgattgagccaagacacacaacgttgagtggctgagagaggccaacagtcaaagttccccggtccgaggcactccacagcccctagagcaaaggaaagccccaggagaaaggcttggcgattctggtctccctctggtctccctccaccacacctccaactctttgtcctaatcttttctaaccctcaagcggtcagccccaattcccacgtggcctcctccctggcaccgggttctggaaggttctccttcactaaaggatgccccctcccctgggttcccggcgtctgggtggtctcaagggcgaccctccactcctctgcgccctcctccccgcctgctaacacacacacacgccccttccccgccccggtttgcttcggagccccgacctgcattccccgggggacggcgagctccggagctcggagggagaaactgtagtgtccggggtccgagcgcagctggcttcccaaggcggggacagcgcaagccttccgcagccctcggggggctccgcacacctccagcagcgccattgtcgccgaaggcccagaaatcgtcggagaaggaagcgaaagcgaaagccccgcagccctaaggggagggaaccagaatttcttccacatccccctgccctttccaagaagaggccagtgggcggctggagaccaggggtatcatactgggaacaggcttctctctccgcccttacggaggtcggggagcaaagcgtgatagactgtcagaagaagaggagacggggagcgagcggctcgagagccgccttggcgcggagatcccggtgggcacaccagcacgccaccgggtgacccctggagcggctacgacgtggggtggggctgttaccgccccagcgcttagttagcctggaccagaaagctgcgagtcagcaagaagctgggggcactttcacctccggggcttggggcgttcgtaggaccatcattttataaaagtcggggaaagaggagtaggtgggggcagtgagtcttgagggcaggttctggggcaaccggcagcagaatatactcgcaatgtggggaaggcggcaccagggcgaggacgcagtctctgaatctttggacttggtccttcagggcctctcctcgtccaacgggctccctaacctatggccacccgcaagaaccgccctccgtgcgcgcacctcctcgcaggactctcgctcctctgagcgccaccgaggaactcctctaaacgccgcccctccttgcaacccggctgggcctaacctacccggcaactgttgacgtcacacaccgaggccctcccagaatggacgagactcactagacaaccccgcccattatgctgaaaggacccggcaggtgtcacttctgagaggggcgagcactccggggaaaggaccagggcgggggaggtggtaaagtcagtttctcggtcggcgcgcttgcacttcctctagctacgctcactccatcttctacttcagaaaggccagggctttctgcagctgcagctgctagtgcctggagggtgccatgtcccactctggttcatcctaagggcagacgtgggggcatgggaaagtggtgggggcaaccgtagtaaacagaaaacttaagggaggagatggcccacttaggactgtgaacagcattggggctgctgaaggagggcgacaccagaaaaatgcattgcagaagctgatgagccatttggtatggtatgttgatgagccatttggtatcctgaacacatgagaaaccacagtacgaaacaccagtatcagttttattataaatatcaagaatccagagtgtgttatgggtcagcatatgactttagccatattggaaagtagccgatcttcccttctctgtacctattaaagttcttattttcggggttctatcaacaccaaaatcctggctctacactcagttacactaaggtgttctagatcctgttttcttccaagaaatctgcatcatcaagagttgtttggagagggcgcaacactcatggcagaattttaggtatcagtttatggagctgtgctctaggatgtcactcctcctagaagcagctgcctcctgtgcagctctggtaagccctttgttcccaaattctccatcagagaggtgaaaagaagggagggagatagcctatgcaggtctaagcagtctttcattccggaacacctgacccgccaggagcctgcatcatggtccagaagcatcccctcctctccatgagttgccggtaggttcctgcttcacagatggtgcctccttccagaaagaggatttggtcagcctgctccaacaagctgagacaatgggtgataagaagcacagaccgaaagcgccgctcaggacttttgtacaggagctgcttcacctgagaaaagacacagactctgtcaagagcccagggagacacctgtgttccagagcccagacagctctcaccagcatcactgccacctgtgccaacagccccaaagaatcgaagattcttgttctgaatgcttctctgtctgacttttgacttattaaagactatttacatgaggtggcaacagtagaataaaagttaagagtcctaagatgaaacccataagaaaagagggaagggtatcaaatagtctctcctctctatgtataaactgggaattttatattctgttgtattttttttatattctgttttaaaagaaacataactcagtggcaaaaagaatgagcattcaggtcaggcaggcttgactctgggtccatgctctgctactcaacaactcaatgacattgagtaggtcattcaacctctttgtcccctttttatcctctatagtatgaggataacaatgccccagctcacaggcattcacgatgaataaatgaatgagatagtagaaagaaagggcttagcagcatgtctggcacacaataaaagagtaagagctcaactgacattaatgttattaggatggtcaggatgcctgggtggctcagtggttgagtgtctgccttcggcttggggcatggtcccagggtcctgggatcgagttccacaccaggcttcctgcagggagcctgcctctctttctccccgtgtctctggctctctctgtgtctcttatgaataaataaataaaattaaaaatatatatatatatataattaagatggtcttcttatgtttggcttcagagatttagaatctttagacagtctctttgaattggatcttggggagcagctattgggaactgaggattgcaaggattgattgagataattatgctagtacaaccataagtgaaggaaggaagattggggaggtagggatatagtagtcactaacaaaatgtctctcacccgcaactggctgtttgcatcaagggcactggtagcatcatctaggatgagtacacgtggtttccggatcaatgctcgagccaaggccactgcctgtcgctgaccccctgagagctggctcccagcctcgcccacctctgcagagacaagagccaaggtgagggctggataacccacacacctccacatatacactcacacatatacacaccaaggactgatggatacagctggatagggaaggttctgggaaggtgaacaagttctgagaatgaggaagcccataggaacaagatcctacagcttcaaagtgatgtcagggggttggaagaactacagaataaaagttccagcgaagatgtctgggaggggatatgagctgaaaaagcacctgtgtcatagccctgcgggagttcagagatgaaactatgggctccagacaccatggcagcagctatgacttcctccatagttggcttctggaccaggccataggcaatattttctctaaaactccttccaaatagctgtggctcttgtcttactgcagccacctaggacaaaatacatgaagagtcataggggcagcccaggtggctcagcagtttagcgttgccttcagcccagggcctgatcctggagatcccggattgagtcccatgtcaggctccctgcatggagcctgcttctccctctgcctgtgtctctgcctctctctctctctctctctctctctctctctcaatctctctctgtctctcatggataaataaataaaatcttaaaaaaaaaaagagtcatagaacaaggaacataagagtatggttatctagagattgacaactcaaaatctttattgaaagcatatcacaaaattactctctctctcctgacaccccatctccacccacggtctgtcattcccgggtcctcctttcagagtgctcggtgagagtgttcagtgagagttctcatttgatgtcccctgccctcccctctgccatcttcttgctcacctgtgtgtgcaggtagcggtgctcatattggggaaggggctctccatccagcagcagctgccccttagtgggctggtacagattctgcagcagggcagccacagtgctcttcccagacccattgcgccccaccagcgctatcacctcaccaggacgaagggtgaatgtcagcgcctggaggccagagaatcaaaaaataagagacacagtaaagcctttaaccttgaggcttcattgtcttattacatggcatgaggtcttacccctaggaagaaagggggggaaattggaaaaacatagcaattcctactctcccacaggcatagatttctgttcctcagggatgatggctccccaaggagtatagatggatggtgaggcaaaggccagagcaaagaccaagcaccactatgtcacacccttgatatcagatgtcatgagaaaacagaaagaaaaaaaaaatcccattctaaattacaaatggaaagaaaaggaagagatagaagatgagaggcagattttgctttagcagtttcttgggatgtaagactcttctcccggagagcctcttctcccgtccccccttagaaatccaagccattctagagtttggggcagttgtatggagtagacggggctcatctttgcctttgaggggttaggaagttaggaaggatctatctggaccttgtgttaggcaggctgaagacaggaccaaagtttaggatggtagaggtgagagtgaggctggtggaaaacaaggattggtaagttgtacctgcagcactgggacatccggatggtttgggtaggcaaaggagacatcttgaaactggacaaggccctccaaatttaaagaagtcaagacaccactggcaggacagcgagggatccggcccaggtattcaaatatttcctttgaggagcccacagccttctgtacactggggtaggtggagaatagtgcctggaggagcggtacaactactgagaagaggaaaacaaatctgcttgccagatttatgtgatatgacaaggataaagaatggaaggaaggtgacacagacggtgacgagacccaggaacgaaaaaccctgggtagtgacaatggaaggctctcacctccacagctgaggtgaactggatctggtagagaataaacgtgacaaggctcccgctgcttatagtcccatttgtcaccagctgcccacctatgtatagaattcccaccttcagcagcatccctgagatctgtggaaagaccacgggggtggggggaggggagggattgtggttgaaaaatctagaagggggtgcaaagaagcagactcattagcattatggagatatcaagttcttttcccccaggtaacagcaggaggcaccacaggggtaaaggaagcatgcaccagtggaggctccatggagtcttgctcaactatgactgtcctccccatcactgctgtcgtcttgtgtgaggagcatgtggctcctcacaaaaggcttttattaatgtaatgtcatctactattcatagcaagaatcctacaaacaaggttatactattcccacttttaaaaatgagaaaacatgggcacctggggggtgcagtcggttgaacatccgactcttggtttcggctcaggtcatgatcccagggtcctgatatggagctctgcattgggctccccactgagcagggagtctgtttgccctctccctctccctctgccccaccccgtgcttctctctctcaaataaatatataaatcttttttaaaaaataaaaataaaattaggaaacaatctcaagagaaaataagttactagcccatggtcacagagctagtaagtggcagcattgagccaggattcctgaatgctgctctcagactctttcaatgatgtaacagatgtccctcacccttggcttctgctattcccatggctctcactagcacatccacatagtcccagcatgatgctggcacaggtacaggaatttatgattccccgagttctgcctgagaggcaaagggaagccctgtgactggaagatagggcatctccccaaaagatggcgcggggtggattcagtgtaccatggtgacatgaagccatccagcgggtctaaaaaagagggaggcagttaagaacactaggtagggtaattgagctccagcctgctaggatgagaacaccaaaccactgccggggtgtgtggagcaggattaatggaaaagggaatggagtcgaggcatctcagggacaagggaacaggcattcttctccaggtgctcacactggtgatccagaggttgactgcataggccagagcctccttctgatggagggtattcattttctgcagcttttggctaaacttctgggcctcacactcctcattggcaaagctccggactgtgggcattgctgacagcacctcaatggccacctggctagactctgccagagatgtctgcacctgtgtggccaacacctgcggagacatggacaagaactgtcacccagggttggcaagccatcagggacactactagcacctgagttgcttagtcggagattaaaggtgagaagaggcaggtagatgaaggaacgagaaaggggcacagttatacctcctggatactgaagagttacagtggagaggaaatttttactgagaagggtcacagggaatcataatcttgagagtggtgatcatgttcataaagatggattgtgggcagaagttagaagacacagagagtatggagcccaacactgagcaatctggggacatggactacggggaaagggagtcccatggagatggggaatcacttgagggtgccaggaaagaaacctcagaggagttaaatccacccaatctgggaaatgaaggactgcaactccctcgacatacctggtgccatcttcctagcttctcaggcagaaggaaaagcagaggcagggtgaccacggtgaccatggtgagggacagtgactcccagagcatgagccccaagagacacagcccccgtaccaggtaccacagcaataggctcagcttctcactcagagactcactcagggtggatgtgtcctctgtcacccgagaagtgatggctcttaccaggggtcggggagatggaggaggaggagagagggggtagagggggtgggaggaacatggtgttctgaggaggctgaggaggacaaggtaaggggaataggggagtttagggatctccatgcagggagaatgagtattggagaggaaaaacctggccaaagactttcgttttaactataaagaaattgattcctatgtgaatttccatttctctgacacatctctgttccttaaagatgtataccccatgccgcacacgagggcgagctggtcacataacaaagctggacaaaaaacagagagtgctgctagaaagcagtccagaaaactctactgagctctgggctgggaatcaaaagatgggttctgtcaagctcatctctatccatatgtgaccataccaatttcagcatttagggtctgggcctcaggttccttctctgcaaaataggcaattggactctgtgatctcaaaattttccaggtcttaaattctatagtttctatctaaatatacgcacagggatatatttatggaaaaatcttagatggaaaaattaggtttttctgaaggtaaagaacataatactcttgaggtataccaagaataagaaatgacaatgtggcaatgtgtgtgtgtgtgtgagagagagaaagatcatggttataagtaaaagatggtatatggggaatataaagagtgtacagatgtgtaatgagtttcatgaaacacctgtttggttctgttggaaaaactctgtttcctggcgcaggacagcctgaaatacctctccctgcacctggctgtgcacacgacccatgatgctgttatagactccatcacccaagaactccagcactgcactagagagagatggggagaagaaggatcagggtgtattcaggggacagagagaaggtcccagagaagtgcactctgggcagcatcaccaacttccagctccctctttttcagggtcccccatcctcagcttccagctgcagcccccagacctggtggtggtgagaatggacatgagcgttatgtttcgtgtgaaagcagaggccgtctcatcttgtaaaatccagtcagtgaggtggccagtgaagaatggaatggccatttcccctggaggggaagaggagggaggggtcagtcacaaatatcaggtctaagcagatcagttccaaccagactgtctcctcccccatccgactctttcacctgtcaccagtatcctggagccggcagaaagagcacactgaggacccagccctgcaccctggaacccacaaccctgaaccccagccccaccagaccttcagggggttatttaggaagaccagcggtcatagggcatgctgcccagaaaaaaggacttgcccagggtggctagtcctagaagacactggagtggtcttctcacgaccagagcccggccgccttcccctgatccacatttcccagaacccacaccaaccgatctcactgccccttagtaggattcctgcccaggctcctgtggccgcccctctgcccctgcaccctcttaccaagactggagagaaccaacagggccagcaggagcgggaggcggcgcatctctgagcccaggcagcctagaagccggcggaccgcgtcccctgaacccccccgccttcccggcgcccagagtccgctgagcttatgccacagggcggctgcggacaacgctgccaagtaactgagggcgaacacatccaggcgactcccccagtgcaggagcctggggctgtcggaatcccggggggctctccacgagcgcagctctcggaacaaggcaaggccgggcagggccaagcccagcgccgccgccgcgggctgcagagccgccagccatcccccgagtcccgcgctttcgcttccggagcccaccgccgcctcgagcacgccgcgggcgcccagccacagcacagccgcgcggctcaggcccaccacccaggccgggagcaggggcggcgccgtggggaccagcacggagcagacggcgggggagcacctcccgggagcagcgcccagtcggcgagaagcagcagcgccacccccagccacgccaggcgagctcggggcgcgcaggggcgcccgccgggactggggggccctgagccggccatggggtcgcgccacggcctgggagtctccgtcgtccccgccgggccggaggctcgcggtgctgcccgaggctgtgcggggagagggcgctgaggcccacggccgggagcggggggcagggcgggcggcggcggggtctcggaaagtcccggcacccgcgggctctggccgcgccgcctgaagcctgaggtttcgcggaaagggaaaccgaaagcggccgccggctcgggaggtccgccgggctgcagggggaggcccgcccagactattttgggagagaaggcgtggaaaatagatctgaggttctggggagcagccttgcggccccaccttctccatcatgcacacccgtccttcctttctttgcttcctctggcgaattccacttgtcgggcttctcccccccccgccagcctccggaccgtgttaccccagccccttccgtcacccgtctccgggcagatctgccccgggcaggttagcgccgggcgcgaagcctcacgcaggacccaggcgcccctagcgggcggggcgaaggcgcggggctggagcgggcgcgctgcccgcggtcccgggagaagagcagcgccgcaggcggcaggcagcgcggcgccgggatgctgcgggcgggagaagtccacactggggtgaggagtctggctggggggtcagcggagaggtggaggaaggggagagacgggggggccccagaggccccgcggggtgaacgcggggaccaacagtgaggagggagtttgcaccagccagtgctggcagaggtgccccgcgtcgaacccaggcgtctctgttctggaggggctccggcgggagtccgcggaggcgctgcgcgcgcgacgctgggggcgggggtgcaggcgctttggctcttagcgcaagcagcgagggaagctgctctaaagcgctttcgctttcacctccggactatagagaggggctgaataaatcaagggaggggggtggagaaggtgcaaactgatgcagaaatggttccctgggtgaagtagggcagcactcgggcgagggcaatgtgggcgctgattgggaggggacagctcatcacacacacctttgatacactggccgctgggttacccagagccacagcccagatagcgggggttccttgtgagccggtggtgcccttgcccatcctcgcccaagaaggctcccgcttggctgcccaggggctgccatgctctcttccctgtgtcctgccggcctgcccaaggctgcctggcttctgctcccaaactcctgccacaactgtccgcttgggggtggctttactttagagaatgacctctggagtggggctgccctttttcaatggccctcaattcatggtgaatcagtctgtgggaaagcactggcagggcaatggccctggagcctggacccacagagtgatgaggattcactgaaaccatttgtcaggtgagcagtgggaaataggaagcagaagtcaaaacaagagatgggagttagacctgggcgttagtcccaatctgctattaattctaggtgaccttgactagtcagtcaccctcctccatgattcagtttcttcatttgaaccaaggatctttaaggctctttgcaactcaaagaggagtagaaaacgtagccttatgcctttcaccttccttaattcttttccttaatttcttttcttggcctgaaaagtcaactcaaactccccaggcaaatcctctctcgtacagagctcttcccctggctactgagatgcacattgacctcttgatcagaaatccttaaatgaggggtgcctcggtggctcagtcagttaagcaactaactcttgatctcagctcaggtatccatctcagggtcctcctgtgttcaagctctgtgctgggctctgcactgggcatggagcctacaaaaagagaaaggagaggagaggagaggaggggaggggaggggaggggaggggaggggaggggaggggaggggagaagaaaagaaaagaaagaaaagaaaagaaagaaggaaggaaggaaggaaggaaggaagagggagggagagagggaaagaaagaaagaaagaaagagagagagaaagaaagaaagaaagaaagaaagaaagaaagaaagaaagaaagaaaggaaggaaggaaggaaggaaggaagaaagagagagagaaggaaggaaggaaggaaggaaggaaggaaggaaggaaggaaggaaagaaagagaaagaaacagagagagagagagagagagaaagaaagaaaaagagaaaagaaaaagaaatccttaaatgaaaccattttttattttattttaaaccaactcatgtgttcctaggctgcctccttccttccttaatgcctgaccctgctaaccaccataccacttgttgattctgttacttaataaactggttaaggagtatgggggtggagaattagggccaaaaaaaaaaaaagacatgagcttgtttcccaaggtcagagtaaccttccctgtgttggggctgaccacatctgcagcaacaagcacatgtggtggtcattcacttgtggggctgcctcacccaccagtgattggaagcaccccatccctcctccccacgccccgagccaaatgtctacctctgcaaacctcatcctcacctctctccttatggtgggaaggattctacttaggaaggttggggcctagagataggattctttctatgttgttgccaccaccaggctctgacattcccctgcagttgggagaggagatggagatagtggagagatagaggggatatcctatactgggagtcggctctggcctaaattgctaaatgatcttgaatcggtgacctcctttctctaggaatgtttcctcatctgtaacatgagggaatcaaagctcatcctgctatgacattccatcctctgtgtctccacagacaaccatcatggcggtagagtttgatggaggtgttgtggtgggttctgattcccgggtgtctgcagggtaagtaccagtcaaggtgaatgcttctggaaggaagccaatggccccaagtacagattttttcttacccattcatgaagttattagtaaagcggagcttcgcagaaactgagttaaccttttagaaaggcccctataatgagatactgggcaagtgcttgggtccctaaattcatggagaatctggggcctaaaagcttatgtggcctgtccctgcagggatgggtataaaacgatagggtatgagaagaaggtaggatgcaaagatttcaggggcctgccttccttttatgtttagagatagagaagacggctctgccaggaagatattctggtttttcatccagcacatgttgatctggttctgtctcctccattctggccagtttccccctatgcaaaatgagtatatgggattaggtcaatatcacttactttacatcccatagaacacaaaactttctcaagatggatagagcaaagaatttcttaagaatattattcttaatttactatttttttgttttattattaaatctaagcctgaaaataagtctaactttgatcattactttctgtttcatttatttgagattatttttttcttcctgttttaatccaagtattaaatatcatggactcagggatccctgggtggctcggcggtttagcgcctgcctttggcccagggcgcgatcctggagtcctgggatcgagtcccgccttgggctcccggcatggagcctgcttctccctcctcctgtgtctctgcctctctctctctctctctatgtctatcataaataaatgagtaaatcttaaaaaaaaaaaaaaatcatggactccagtgctcttctcttgtcaaataaatttgggaaacactgattaacctaaaaaattctggcgttgctaatgttgctgcctgctgactccttccctgcagagaagcagtggtaaaccgagcatttaacaagctgtccccactacaccaacacatctactgtgctctctctggctccgctgctgatgcccaggccatggctgacatggctgcctaccaactggagctccatgggtatgaagctttggggatcttcaagtccacactcactacagttctcccaaccagcaaaccctgagacagtgtcattcctgttccaggaacactgctatgaaaaatgaaaatttctcatttgggctcctgtttttattagctttgaactggcacttgaaacctggtttccacatctgtaaagtggagataattaatagtacctaccttacctcaccggacagttttgttgagaatcaaatgatctatatgaaaatggcttgaaaattgtcaatcactatcctactagaaatagcgagaaagaaaatgatggtgtgcccaccatatgccaggcagttactgtgtgagagaccaaggtcattagtgcagaagtaaagcttatttggttttactcacacgggcaaggcccttgcagctcagagttatataactgggagagggtgggtggggcagtaaaggaggagaacgttgaaatctccttaccggtcaggacgagtgcgagactcggcctcctgtgcatgtgggagaggagctggagtttgaactattgcagctctaggtttcaggtttcacatgtcacctggcagggacaatggtaatgggcacaggaggggggaacttcaggaaactctattgacccctattactaatatttcttttaggttggaactggaagaacctccccttgttctggctgcggccaacgtggtgaggaacatcagttataagtaccgggaggacctgtctgcacatctcatgatagctggctgggaccgacgagacgggggccaggtgagggtcttcccacgtacaccctcccttggtgttcctcagtaccctacagagggcgatcgaggttatatgtcattccagcaatgggctccaaagaccccgcctctaaaagtgtagtataatcgcaacccatgggggtaggagaccgtggggcttcattgcagaacacggagacacgctgactgtctcagtggcaaggagaggattgacgcttccatggtctaacctgaggatgccttccccaggtgtatggaaccatgggaggaatgctgactcgacaacccttcgccattggtggctctggcagtacctatatctacggttatgtggatgcagcctataaaccaggcatgtcccctgaggagtgcaggagcttcaccacaaatggtaactcaccaaggggaagggtacctgggggggatttttaaacatgagaaggaagaagagtatgaggaatatatgggtgaccattcaatttaatgtccaaactggaacactttgagtgtgaaaggagcaggacaatgctaaactaattgggacttcagaaccaaaggcatcaaccaggactgtcctgagtatattcagaaatatatatggttactataagaattcaaattcaaattcaaatatacggttactataagaatcagtggtgtgctggagctgacttgggccagctcatgagagccaattgttaaatatccaatggttcctgagctgctcatttagctgtttataacttgaaatcaatcacggtaggagttttgagtttggataccaggagatgtaacacataaagggttttgtgttgttgttgttttttttaagttgatttactagcacattacttgatgtgtgttccaaagagatgggttttgaggtctgagagtggtagtaagcatatgagcgggagaggaatgtaaagatttctgaagttaagttattttctctccccctctctaccctgaaaccctctacagctatcgctctggccatgaaccgggatggctccagtgggggtgtcatccacctggtcactattacagctgctggtgtggactatcaagtaatcttgggtaacgaactgccaaaattctatgatgagtgaatcgtcctcccttcattattttgtaataaactctttcagaccagaacctggtatggtcaatggaaaatgggtgctcagggggatgaagtttaggtgggggcttcttcctcccagatgttagatatcctttcacaatgccttcattcacattagagatcaatacaagataaatgcttaaaacttagggatttgtacatttcaaaggatgataacaatagccaaaacactgactaaggcattagcttaatgcttataagctttatctcttagaaacaaacaaaagacctttatagcttatactactatatctatttacagacagatgaaggcttagaaaaagtaagtcccttgaccaaagtcacagtgaattcaaagctgaaaactgggatttagttgggttttttgttttttgtttttttatcatatgcccttcctctcccattacataaaactttcattccctcaagcttcatgtatcatgtcctcccttgaaatctgcgataattagcccagcacagtagttgacacttaggaagttacgagcagatgcctgagtaactgttttaaacaggccaaattctggcccccaatctttaccaggcacttctcaagtgagaggacaaattatttcctttctgtgagctctcatttctgtcaaatgaaggtattgagcaacttctaaggtggcttacagctagaacattcaatgccattttcctaaaaggtaaacagttaagaggtatatttaacagcaatcatagtgagatccccagggagcctctgtctacttttctttctggatctcaggcttaacatataaattcaaaagtaccgcaaacaaacctatgtccttgggagcgtgtgtttggtttggagggggaaaatcgaaaactgtagagacttgacttctttctagccaaataaattggttagttctttctaatcaaataaatttaaatgatatttaatttattttgaggtttaaaataatagtttaagagccgatttcagggatccctgggtggctcagcggtttggcgcctgcctttggcccagggcacgatcctggagtcccgggatcaagtcccgcgttgggctcccgggatggagcctgcttctccctcctcctgtgtctctgccctctctctctctctatgtctatcataaataaataaataaataaataaataaataaataaataaatcttaaaaaaaaaaaaaaagagccaatctctcccatggatcacaactagaggaactctggaaagcagacaaaaagcaggcgctgaaggattccagaaagtagacaaaagcaggtggggtataaggagagccaaacttggacaagcaacactgcccaggggtggttttccatttttccccctctttcatctcccggctttgccctgagaagtcaggcctcaggtgcaaagctgcggtgccctaacttgccaagagaaacaccaaagttggttctggccagaggaatggaggaagcagacaaaaggggcccaggaggtgggaaagcgtaggaggtttcccacatgagggaactgatgaaggggattccttaactctaggttggaactctcacaagtaccggtgacccctgagctacacaaacgtgaggcacacccaaaacaccacagcgtggactttgagagctgaactaaggtttaagccttttaaaattaggaatctatctttttatttattgaccagagtcttatccttctgtcccttattccaaagagtgcttgtagcagctcccagagacaggcacaatttaaaaagaaagagaaggggatccctgggtggcgcagcggtttggcgcctgcctttggcccagggcgcgatcctggagacctgggatcgaatcccacatcaggctcccggtgcatggagtctgcttctccctctgcctgtgtctctgcctctctctctctctctctctctgtgactatcataaattaaataaataaataaataaataaataaataaataaataaaaagaaagagaagaagaaactgggcaaactgaaaataaagctaagaaataataaagccaaggtgccaaactaaaatacaaattaaaaagattttatttatttatttgagagagagaacactcacagagcgagggagaagcaagctccccgctgagtagggagcccaatgcagggctccatcccaggaccttgggatcatgacttgaaccaaaggcagacgctcaaccaactgagccacccagactccccacaaaataaatatctttttaaaaatggagtacgggagctggctaacaagagcaaattgtaaaatatttggtaattttggttttttttttaaagattttatttatttattcatgagagacacggagagagaggcagagacaggcagaaggagcagcaggctccatgcagggagcccgactcaatcctgggaccgcaggatcacaccctgggccgaaggcaggcactcaactgctgagccacctaggcatcccatattcggtaattttgaaagagagttgttgaccacaggtaccttcacgttggccttgatggaagtatttattctacagaaaccaggaatattacatgtcagaattgttttgttttttttttccccagaaagccggtttaacaggacatatatttatcacccagctacagctgagtaagaaaacagttggctctgagttagaaggtagtgaaagcacagaggaaaaggaaactaggtacaaggttcaaaagattcattttaaaagcacggcatagggaatgtagtcaatgacactgtagtggtgttgtgacagacggtacctatacttacagtgagcacagcataacatagcatataaacttgtggtatcactatgttgtacacctgcaactaatgtaacattgtgtgtcaactatacttcaattaaaaaaaaaaaaaaaaaggattcattgaaaagaaaacaagccaatggctgctgggtggcttagctggttaagcacctgactcttgatctcagttcaggtcaggaactcagggttgtgtgactgagccttgaatgggagggtccgtactcagccgggagtctgtcaaggattctctttctcccactgcctctgcccctccccaccaagtaaataaataaatttttaaaaagccatccaacaaaaacaactcctctctatagatgtatatttttcacatcacacagcggattgatttgctaaaacagaatatgcattatgccataaagaaaactacaatagatttcaaagtaccagtatctttgaaaaaaaaagctacattttgtagtcatgttgtaaaaaattagagttttattttaaaaaacgatacctaaaattcagtgtgcaaacagaaaatattgataaattacatggttttctaaggcagtcataaaggaaattaacatatttagaactaggtggtaaaaatgttgcatatcaaattttgtgagatacagttaaagcagtattcaggaagaacatttttttaaaagattttttaaagattttatttatttatttatttatttatttatttatttatttatttatttgacagagtcagaaagagcacaagcaggagaagtggcagacagaaggagagggagatgtggactcccctctgagcagggagcctgatgtggggctctatcccaagaccctgggatcatgacctgagctgaaggcagacacttaaccaactgagccacccaggtgccccagcttcataaatgacctaaaagttctccaaaattttgaaaaagagcaattgagcaagcttaaagaaataagaaggaaggaaataataaagataagactagaaagcaatttaatagagtacaaaaactatgtagtaaaaattcacaaaaccaaaaactagtgacttaaaaaaaaattgtaagatattcagatttagaacaagactgatcatgaataaagcagagaaaaaaatgaggaaacaaaatacagaatggaaaggaagggtataggtacagatataacagatacaaaacataatacaagatgtaatgaacaagtatatgataataaattttacattttttgatgagataggtaaactcctagaaaaacttaatctaatgcaattcacataagaagtaaaaatttaagtacagcaataaacattgaagaaatgaaaaatgttgataatggcatctgataaaaataattttttatatgcccacatggtttcatgggggagttacaccaaacatccaaacattcaaggaacatacaactcttatcttatgtggttttttccccaggaaatagaaaaaacattaaagttgtgtagctaattttatcaggctagcataatcttgatttcaaattgagataggaaattcaaggaaagaagacaataggcccatctcactttgaacatagatggaaaaaataaataattatctattaactgagttcaactgtattaaaaataataatacacactatagaaaagaaactgatggttactagaggagaggtgggtgaggggatgggttaaataagtgatggggattgaggtgtgccctagtgatgaccaccgggtgttacatgggagggttgaatctctatatttattatatacatgaaactaatattatactgtatgttaactaactggaatttaaataaaaactagaaaaaaaaataatatattgagatcaaatgagaaatccttagaatacaagaatacttcaaaatagtaaaatattttactataattcaccataatcatagactaaagaggaaaagatcatctgcttttcttaatgcataatttataaagtttaatttacaaagttaaatatccgtttatgatttttgaaaaaccagtcttaacttgttccttagaacccagaatcatataaaactttcttatcattgtgaagtttatattccaaaaaatatataacaagcagtctgcataatggaaaaatcttagatgcccaagaccactcactataattactagtaaaatatagcactagagttcagactggtgtataaggaaagaaagggatgtgagtgaagcagataaatttgcagatcatatgatactctgctcagaaataataacagaagcagcaaactattaagataacaaaagaggccagcccgggtggctcagcgatttagcacggccttcagcccagggtgtgatcctggagacctgggatcgagtcccgcgtcaggctccctgcatggagcccacttctccctctgcctgtgtctctgcctccctctctctgtgtgtctttcatgaataaataaataaaatcataaaaaaaaaatagaaaggtggatcctgacctactaccacatacaatagcaggtgagttgaagcctcaaaagggaaatgtgtagctttaaacataacagaataaaacataaaaattatctttgggactagagacagggaaggacttccttatataacctctgaaaccatcatgacaaatattttattatttcattacatcaaaagtgaagacttttttaacagacaccatagacaactctaataaacaaattgcagaatggcagaggatatttacattatctgaaaccaattaaggataatatctagaatatacaatgaaatgcaaaaagtaacaaaaaagcatcaataccctaggaaaaaaatgcacaaaagacataaacatgaactttatagagggagaaacaaggaagctaatgagtgtttaaagagataatcaaactcgataaaaatcacaataaaacaaatttatacattactttatacctattagactgggaaacataggagtttgctaatgccgaatattgatgtacaaatagggaggagggaagcctcctaccctgctagtgtaaatgcaaactggtgcagccattctggagaaaattctgcactacttaatcgagtgaaaaacatataaggacccaacagttccactcctggaaatacatctaccctttgcaactgtttccctgaggagacctgtaagagggagttctttataagtcatttgtgatagcagagagctagaggatcttcgtgtctcccagagagacaataggacaaatgctatgagtgcacatagtaacgtggattggtctttgaaccagaggactaaggagcaaaataaaacctaacagaatgagctttaagcacaaagcaactcactttgaataaaaaaatacacacaaagccatacacatttttcaagaatacgtataacaaaaagatagatacaaagcacatgagaagggttgcctttagtgaaaggaaaggaaactggaatttgggaaatgtacatacaaaggaataaataataacaaacatagaaaagattttgtatggaccaatgatgaccatgcaccatgaactgaggaatatgattttttagttaatgagtcaaagaaaaccatatctctgagagcaatttattctatatttccatgacaggtattagatagttccctattttttccatccaactaaatagatatagttaaagtgttcagtttggagattaggatttagaaagggaggatagaaattagaaaatctgagattattccctacatttacagcatctctctccaataatatgcattacttgtttattctaaatcttttggaatctaataaacatgttcttttttatataatgagcctatatgaatgatctttggtcctctttaccaaattcttaattctgcaggttacagacatacattgtaagaagaaaaatgtcttaatcccattgagcttattcagaagcactgggaattggttcaacaatattcagttttacccagcaatgtttatgacagagttgtatgtgtactacaagcatgtatgatgcagacgatacgttctcaaaaactcagagatgaagtatatccatactacatcaatttttatcgaaactctgtggacatgcaagagagtggatttctctgggaagtgccttcactaggaaatgtaatagggttctccagaaaaatagaaccaatagtatgtatatatggagagagacttattttaagaattggctcatgtgattgtgagtactggtaaattcagaatctgcaaggaaggttgggtatgtaagggagagttgatactgcagcccaagtccaatggcagtctggagacagaattccctctttttcagtgagcctcagtcttttcctctgaaggcctccaacagattggaagtcccccacccatattatggagggtaatcagctttactcaaaaatctactgatttaaatatttctcatctttaaaaataccttcacagcaatatctacactactacccaaatatccgggtaccttagcctaactcagttgacacaaaatcagcattcacatggctcaaggcgaaacttcaagataaatatggcgggagtcctgaggaaggaaatggactccaaactaacccattagggcagtgaaacatcactgaagtgtcggactaacctcacatcccaagtaacgtgcaaccaggttttagattaggagaggtaccagacaaatgctgggtgatttccttgaggctttttgtccctacctttataggctgactgttttagattgccctagagagcatacaaagaaaaaaagagtaaattaaaagcttttcatccaaactcaaaaaatgaatgagaaatttttaaaaaccactgtagcggcttcttctataacctagcacaggtatagatgagggtcatagagctattaattgtataaacccatagggtattttatgctaagataaggccactagttggagtggatttggactctgagatatgaaatggagacatatgaacagacacagggaagtcagacaactgtgaatcaccaaatccctgaatatctttgctagaagaagcagacccattgcattagctatcaccctgtcatacccactgtattggttacaatacaaacatttactatggggcattattaggactataggagaaatttgaatgtggactgtgtatttgataacattgtatcaattttaagtgtgttgggggtgatggtggtattatggttatgtgggagaaatgtccttgttcttaaaacacacatgcccagggatccctgggtggcgcagcggtttggcgcctgcctttggcccagggcgcgatcctggagacccgggatcgaatcccacgtcgggctcccggtgcatggagcctgcttctccctctgcctgtgtctctgcctctctctctctctctgtgtgactaccataaataaatttttaaaaaaaaacaaaaaaacacacatgcccaaaagccaaaaacaaaaacaaaaaaaacacacgtgccaagctatttacgggtgccttgtcataatgtccacagattattttcaaacggtttaacaaaaataattcctcaacaataaacagataaacaaaatgttgtatattcatacaatggaatactgtacaagtgatgcatgtgaaaaaattaataattcaataacatggaaaaatctaatagaaacaatactgagtgaagattgcagacacacgcagaatatacaatgtatgtttcagttatctattgctgtgtagaaaccacccctaaacttcatggcttaaaacaaaaacaatcattttattatctcttgggagtcagtaggttaggtgggctttaaaaaatactgatgtagcccatgaaccaaagcacttattcatagcagactctccacacagcatctctcattccatgtgtgaatactggttatgttttctggctggctatgggatttggaaatctttagaatattctaaaattttccctccctaatgagtcctgcctccccatagtagaaatcagaaaagtcaattccctagccctctttgaagctagggcacctgtcaagttcatccacctgagacttccattcaaaactgggcagggacacctgcatggctcagccgttgagcatctgcctttgctcaggtcgtgatcctggagtcctgggatgagtcccacatcgggctccctgcatggagcttgctcctccctctgcctgcgtctctgcctctctccctgtgcctctcatgaataaataaataaaatctttaaaacaacaacaacaactgggcagcaggaggaaatggagatccactctacattcatttcactaacaaaggtgacagaagaagcaactggcttttgggaaaatagtgatttaaaaaaaggagaagttcctggaacagaagtggttgaggaggtgtcttcagaattggttgtggtaaaggaatagaacaaagagcaacatttagaagtagtgaggcagcagcagtgatgttgtttaccaaacgtacactgtgtgtgtggcggggggaacagcgtggtcttgttctgtttataatcaattgtctcagtatttccaccccaaaatcctaattctgagagacatgtatattttagactttttgaagtcttatcaaactcattaatgaaggagccagtaagaataaaggagacatgattcaaagaccaaaaacaattgcaaaaccaagatatacctagtcaggaaaacttgctgttagagattaaaaatggttaatgtacaacaaggcaataaaatcataaccttgaccttatcttctttaccagagaaaaagcaaagcctccataccttgtcaactctctccagattaatctctaatagcacagggctggctgcgttcttcttactcaagttaagacacccagattttgatcaggcaggattatgagaaagtatccaaatatgatattaagtaatcaagcaagcaaaattttgccttatttctaatttttagaacaatttttcctacgccattcctgtccccaaggtacagaattgaccaaataagatttttcagaaaaaatttttaaaagattttatttatttattcaacagaaagaaagagcactagcagggggagcagcaggcagagggagagggagaagcaggctccccactagcagggagccagacatggggctagatcccaggaccctgagatcacaacctgagctgcaggccgatgcctgactaagccacctaggcgcctcaatttttcagaaatgtttcaattcaatatcattaatgggattagtctcttttatttagccagtttaggactgagacataaagagctccttgttacatgtttggcaaagcaagagtcttttttttttttttaattttatttatttatttgagaaagagacagagaaagtgcatgggcgagggctaggagcagagggagaaggagaagcagactccccactgagcagggagcccaaggcagggctggatactagaatcccaagatcatgacctaagccaaaggcctagacgcccaaccaactgactcacccaagcgcccccaaagcaaaggtcttattatttttattgaagtatagttgacatacaatgttatgttagttgcagatgtgcaacatagtaatttgacattgtaagtcctatgtaccatctgtcaccatatgtaattattatgatatggcctatattctctgtgttgtactttacatcccggtgatttatttattttataactggaaatctgtactttttaatctctttcatcttttcacccatccctctactctcttcctctctggtaactaccaatttgctctctgtgttaatgaatctctttctgttttgtttgtttgttcatttcttttctttcacagattccacatttaagtgagattatatggtatttgtctttctctgactaacttcacttagcataataccatctaggtttatctttgttttcacacatggtaagattttattctttttttacggctgaataatgtttctgtgtgtgtgtgtgtgtgtgtctgtgtgtgtgtgtataaccacatcttgatcagttcatcaattgatggacacttatattgctttcatataatatttggctatatatataatgaagattaatttctaaaagtcaactgtctattttcttttaggatttttctggtttcaggtcttacatttaggtctttaatgcattttgagtttatttttttaaatggtgtagggaagtgtttcagtttccttcttttgtatgtagctgtccagttttgtcaacaccatgagaggttttttttttttttttttatttaaattcaaattaggggcagcccgggtggctcagcggcttagtgctgccttcagcccagggcgagatcctggagacccgggatcaagtcctgtgtccggctccctgcgtggaacctgcttctccctctgcctatgcctctgctgttgctctctctctctctcaatctctctctctctctctcattaataaataaataaaatcttttttaaaataaataaataaattcaagttagttaacatattaagtagtattggttttaggagtagaatttagtgattcagcacttacatgtaacacccagtgctcatcccaacaaatgccctccttaacacccatcacccatctagcccatccccctattcacctcccctatagcaaccctcattttgttctctatatttatttattttttaaaaggttttatttattcattcatgagagacacagagagagagagagaggcagagacacaggcagagggagaagcaggctccatgcagggagcctaatgttggacttgatcccgggtctccaggatcatgccctgggctgaaggtggcgctaaaccgttgagccacccgggctgcccatgatctctatatttaaaaatctcttatggtttgtctccctctctgtttttatcttattttattgttccttcccttcccctgtttatctgttttgtttcttaaattccacatatgagtgaaatctatgatatttgtctttctctgattgacttatttttcttagcatcatactctctagttccatccacattggtgcaaatggcaagatttcactctttttgtttgccaagtagtattccattccaacaccatttgttaaagaaactgtctttcccccattgtatattctcttttcctttctcagagattaattgaccaaataagcaagggttcatttcttagttttttattctgttccactgacctatgagtgtttttgtgccagtaccatactgttttgattattatgtataattatcgtagtatagtttgaaatcagggattgtgatacttcctgctttgttcttctttcttaaaattctttggcttttgggggtcttttgtagtttcatacaaattgtaggattatttattctaattctgtgaaaaatgccattggtgttttggtggagattgcattgactctgtatattgctttgggtagtatagacattttaacaatattaattcttctaatccacgaacacagcatatatttctatttatctgtatcatctccagtaactttcatcaatgtcttgtaattttcagaccacaggtctttcaccttcttggtttaatttattcttatgtattgtattctttttgatgcaattgcaaatgagattattttcctaatttctttctgatagtttgttactactatctagaaattcaaccagttcctgtatattaattttgtatcccacaaccttacagaattcattattcttctaaaattctctggtgaagaagtgcctgggtggctcagttcactgaaaggccaactcttgatttccactcatgtcatgatctcaggttctgagatcaagccctgtgttgggctttgtgtactcagtgcaatctgcttgagattctctctctccctttccctctgcaccttcctctcctttctctcgaaagaaagaaaatctgtatttaaaaaatgttatttttttttacctgaacagaattaatcaaggaaggttgaacttccattctttatttgtcagctttttctacatcatgggtttgatagacagggtagctcttttgataatacagaattaatttaaaatatatagagcatgctaaatgcacctaattacttccattcctcctacattttatgataaaatattaagtctttggtgccaccttgtggtcaagtaggtaatgattacctagtggaaaaaagcttttttttttttttttttttttttttttttttagagtcaaaaggtatcatcaacagttgtaatatcctgaatccaggatctgggtttcaggaaagcaacaacaacaaaattctggtccaaactgattacttagtcaaatgcacaactatctgagagtgagcaatcgttttagcttttgctctcccaataaccagagtgacagtaaaacatcttaaaataaatataaagatggtaacatgaaaattataagcaaagggattttacttgttttaaaaatgatttgagaaaattacactcagcacaaagcactcaaaggtatcaggttactgagtgagagtattctaaaataaatcttcgctagctaggcagattataatagaggtaaaaagaaactttttctacctctttttaagagtataatgaatattctatgggcagcctgggtggctcagcagtttagtgctgccgtcagcccagggtgtgatcctgggaagccgggatcgagtccgacgtcgggcttcctgcatggagcctgcttctccctccacctatgtctctgcctctctctctctgtctctcataaataaataaataaaatcttttttaaaaaaaaaaaagagtataataaatattccaagaccaagtttgaactacaagttttctacttttttggttgttaattttaatctatcattatgtatgcaaccatacaaaaatatgtatatagttagatgacagtactatttaactttaagatgtaactaattttattaatactacactaatatgtatgccacattgaatttaccaccttgatttcagttgtgcaacaatgaatacagataacagtgtatatataaaagctgcttaatgacccagtgctttctctttgtctctatgaagtacctctttttgggggaaggggggtaatataaattcaaattaattaacatatagtgcattattagtttcaggggtagaatttagtggtcatcagttgcatgtagtaccagtgctcattttatcacatgccctccttgatgcccatcacccagttaccccatcctccacccacctaccctccagcagccctcagtttgttccctagagttcacagtctcttagatttgcctcccctcttctggaatgaattcttttcagaattttgtgggtaatccaaagtcacttattcattaacttaaattaatccgaagacataaaattcatttaagttgaaattataaagcaatataattgctattgatcttacaaatttttcaaagaagcaaaatttttagatttcacaaagaaagtggagtacctaagtcaaatgattttgacattgtctaaagttcacaagagccagtcatttaaaaaaatagaggctgtcttctgacaatttggattagctgcatttgtttacctttaggttttcttcccataaactgagacaacaaatgagtcaaagaataaggaacaaatctccattttttcttccaaaaccaattaacagtgattaaaatcaaattaatagctgtctgcagtggggcgtccaaaggggtagaaggagattacaaaagggcaagagggaatctgagaggcaacaaaaatatttgtttcatgtaaattacacctcaataacattgataaaaaccataaaatgatatcaaaagtttcagttgtgaagtttgtgagctttagcgacaaccaaagaggtcatgatatcgagcatagcacaaatataccttttcccttttcagtttttaaaatttagtttattaaaactaaaaaacaggggatccctgggtggctcagcggtttggcacctgccttccgcccagggcgtgatcctggagacccggaatcgagtcccacatcaggctccccggagggagcctgcttctctctctgcctgtgtctctgcctctgtgtgtgtgtgtgtctctcatgaataaataaataaaagctttaaaaaaataaactaaaaaacaaaatacaacaactcacccatttctaccaccatctatccccacaaatttgtaagtctggtaagttataatttgcttccaacaaaatagaaagaggacctaaccaagttgtaagctgttataatatttaaaataatttttgatgatacatcactatttgatttagaaaataaagttctgcagaaattcaaaattaagcaaaattgctatgacaaaattccacccattaccacctccttatctatctgcacagtttccaagtgcttaaaggaaaattcaaaataaaaccaatgttgcatttttgtctcattctagaaataagtattatttatccactgatacattaaactagttgggaaaagcctcatctatctcactaagagattcattgtcaagataactttacgttttcctagttgttaattactgattaaaatgtctaataaatttatactcttttcaaaaaataaataaataaataaataaataaataaataaataaataaatattatactcttttcatcttggtgtactataccaaattgcaataagtcaaacaaaacaaacactttttttttcattgaggagcattttatttgcacgtatgtattacatctctagaaaaagaatccctggattttccctcctgtgtgaaactattgagggacaggagcaggttattctgcattttttctagatctttcagttgtacaccaaatctggggcaaatcagtccacatgtgtttaacctgcctgtgaggctcacaaaattgtcccagctctgtgatcattgatcatttcaaattcgccattgtaaccatactttatcatcatggtgagaaactgcatcatgactttgaagcgtggcctgataagaacctggcattcaccactcttcagcattgttaatgttcttgagagtatctgccaggacattcatgtgcaccctatggtggcacagagagatggcagaaagagcccaaaagaaatattttaactcttagaaatgtatggtaatagaaactttatattgatagactttgttggttttgttttgttttgttttgttttaagattttatttccaaatgatctctgcacccaagcaggggctcaaatttacaacccagagatcaagagtcacatgttgtactgactgagccagccacgcatccctatagattttgtttttgcagacaggtaaaatatggcaatcaatcaaaatgttttgcatgtgtaaatttaggataaaatttaggtaatttgagagtgaaattggagaaaatttgaaaaacaatgcaaaatgtctgaatgtttatatttaagaaacagatgccaggtataaaatcttggacacatttttaaatgacataacagttttattattttttaagcactgatattgaccataaacttacatatatttaaacttaataatgatgatgtccttgtcaacttcaaaacacatggggagaattctgcttccaagagatagagtagatgtgttttttcctgttcctctcactaactacaactaatgtccacaccatggacattattacaaaacaagtataaggagactctgaaaggtggagaaaaagcagactgactagctacttcaggacccaaggtatcacgggatggtgaggtccccaagattcccctttgccttaagtatctcagactcaaagtccaaaaagccagcaacccagaaaccacagggaaaacagcgaacaggaacagccatggttggggggggagggggggagaggtgggggcagcctagcaaggcagaaaattttagacaattgctctactccagccaaaccccacaaaaaatctgactccacctgcaccagcaaaggccaattgagaagctttaacttccaatcctacaacacaacacacacacaccaggatgatgtcagtgaaaatgggtagggaacctgaatgttcatcccttcctggtggaaatagttccccagcctccaaccctcagtgttgatggagagtagacttctacacctcatcagacatctacccccatcacttcttcccggccccagcggtggtgggagagagtcaaaaaatgcctagtgcagagtcagggttctatcaagagggtaggatgtgatctaatatgactggtgtccttttataaggagaagagattaagacacaggcatacagagggaaggtcatgtgaagacacagagagaagacggccatctccaagccaaggagagaggtttcagaagagattgaccccactgacactttgatatcagacttccagctttcacaactgtgagaaaataaatttctgttgtgtaagccttacagtctatgttactttgttatgtcagcccaaggaaattaggtcctgtatttggccctaggcctaatccttattaaggaaggaatttttttttttaggattttatttatttattcatgagagacacagagagagagagagagagagaggcagacataggtggagggagaagcaagctccacacagggagccagatgtgggactcaatcccaggaccccgggatcctgacctgaaccaaaggcagatgctcaaccactgagccacccaggtgtcccttaaggaagaaatttctaagggaagactgtaacatataatttgattgtactgaggtttgggcacaattgaaggaaaatgaaaataggaaacccttgaattctgatggcaaagaatacggatgttagagaccatcggcccctacgaggattttccaactagaagcagaacaggagttgctgttgctaccaacacctgcccgaatttcttaggccctacccctgcactgcacactggctgggctcctactgctagcacttgcatctctttcctgaaggctttctccaaagctctggaggtcactgccccactcacagcaaactaaaagggacagggaattcatacaccaggaagcagttttcagtgtctagtggaagttagctcccccgttccccagttgggatgactctgaagcatgcagttcacatcatttcccagagttcccctacaggattcagctccagtcattcacacctcattggctgtcctcccttccttgtctaactcccccaaaatctgctattgaaatttccccacctccaaaataaactgctttcattcatgtccttgtctcaagaactgcctctggtacaaaccgaaataaggggtaaccctctcaggtctcgtccctctttgagagctttgtactacaattcaataaactttgctttgctgcccaccaaaaaataaaaaaataaaaatgaaaaacaaaaagagggcctgggtggctcagtcagtaaagctgtctacactcagctcaggtcaggatctcaaggtcatgatctcagggtcctgggatcgagccccagttggggctccctgctccctctccctctgctgttctctctctctcaaataaataaaatctttaaaagaaagaaaccaaagtaaggcactaggccgacttcttagcttcacagcagtacaagtcaacttctctctacccatggctcaagagtaattaactgtgactcttgattgtggtgcgtgggtctctagcaccctgtcactcaaaactccttattctttttgttgccagcacggatgacagcccagtctattgagtattaaataaagatagtttaaaaaaaaaaaaaaaaagatagtttagaaattgaattaattagaaatatttttattctcttctattcataataacagaaactacttgacgggatgagcgctgggtgttatgctatttgttggcaaattgaactccaataaaaaatatacaaaatagggcagccccggtggctcagcagtttagcgccaccttcggcccagggtgtgatcctggagaccccggatggagtcccacgttgggctccctggtggagcctgcttctccctctgcctgtgcctctgcctctgtgtgtgtgtgtgtgtgtgtgtgtgtgtgtctctcatgaataaataaaatcttttaaaaaaatactcaaaaaatatatatacaaaataataataataataataataataataacagaaactatacaccccctctgggcctgcccttgtattcccagattatctgagtgttggcgaccactgaccatctgtaacacagttttaaaggattatagggtatgaggcccccagactggcaccctctccttagcccacagattttgtgtcagctccaagtcaggaaaactggctcaagagtccttcacaaatctgtgatttatggcataagcactggcttaagacatttactaatcaaagcctgtctttcatcctgtctctaccatggttttcaaaaataaattttaaaatcaagagcttattcttttgatcataattgttctgctgtggtcacccaaggtataaaggggaaatgccttatctgtctctgaaagtagaaaaacaaaacaatcctcatttgatatcatagaatttctcctaccattatacctgtcttataccattctatatggtttgagcattttataacaagaaagagttctgatattttctatggaacttttttaaacaataagaaataggacttttttgtaaggaaggaatttccactaggtggtagtagagaatcaatatcagtctaacccaaaagaaatgttcattaagggcaaaaagaaatgttcattaagctgagaatcaaatgctgtagccatttgtagctacaagtgcttattaactagctcagtctaaggtttaatttcttcagaaatgccagatgatacatatcatgctcttttgagcaatgtttttctacttacggtctcctataacccacttttctgtaaactggcctgcatccatttatacagaacaattgaacaactggggtccactatggttggaacaatagaatttggagaggagacacactgataataaaaacacgtactcttttcccttaagtgaagtaaaattatagtaatatacgttggatctgcacacattcctctccttcagtctccctggataaaatgaggcaagtgtattctgaaaaaggagtaaccagaagtgggctccagtatccttaccctatcaacatgtttgaccagactgcatcaatgaccagttggtttgcccatttcttttattctagcacatcctcagttctgacctggccaataggtgtaagacctggatattctcacctgtgatatgctgaggccagatttgggttctcacaaccacctgtatcctcttgcagggacacttgaaatttgtggccagatccagctcattatggctggggaccactatgaccccacagacttatttcccttgggatctaaaatcttcctgtactgagtagcagtttaatcttgagtgtgttctactagaccctggttcatgaccccttgcaccgcatcctgtatcgccccctccttggcggtgccttatttcatttcctctgattctaactcatgccaattccaggagagacacagtctccttcatcactggtcggagttccaagcaaattgtgctggaaatccaatgggcgaaccagacctatttctaagttcaaagtctctgcctctgggtcacttaatcttgatcatttggttatttcatttcaatccttgaagcattgttgttactctttgctttcaaatgtggtgccctgcttgttcttgtgctcttttttttttttcagtccttggaccaagcaccatctttccagctttggcagaaagccaagtaaacttctctcactttggcaccctgagtccctgcctaagtaaactagataatgttaggtatttttatgttgtctacctagtggggttttttttttaatttttatttatttatgttagtcacagagagagagagagagaggcagagacacaggcagagggagaagcaggctccatgcaccgggagcccgatgtgggattcgaccccgggtctccaggatcgcgccctgggccaaaggcaggcgccaaaccactgcgccacccagggatccctacctagtggtttttaaatgtgatttcaaaagcagtttaattcaccattctttgataactatggtaaatatgcatattttagtatatttattggtcatctttcctctgatgtgaaatgcctattcacgtcttttaactatttttctctcggataattgttaaatattctggatataatcctatgtaaaatacgtgtgatgcaaataaatctagtctgtggcttttgggttttctttcttaaaaatatagtttgacaaaagtttctaattttaatgtggccagattcataaactttttcttttctttttatgtttcttttttaattctgtatagttaacatacagtgttatattagtttcgggtgtacaatataatgattcaacactcctatgtatcacccagtgctcatcatgacaagtgcactccttaatccacatcacctattttacccatcccctcacccacctcccctctggtcaccagtagtttgtagtttgtactctatagttaagagtctgtgtcttggtttctctctcttttttctcctttatttgttttgtttcttaaattccatatatgagtgaaatcatatggtatttgtctttctctgactgactttacttagcattataacatctagatccatccatgttgttgcaaaagacaagatttcattcttttttatggctgatccagtaccatattgaataaaagtggtgaaattggatatccttgttcccaatcttaggagtaaagctctcaggttttgttgttgttgtttgttgttgttgttgttttttaccattgagtatgatgttagctgtgggtttttcatatatggcctttattgtgttgaggtatgttccctctatccctattttgttgaggatttttatcatgaatggatgttgtactttgccaaatgctttttctgcatctactgaaatggtcatatgatttttatcctttctcttgttgatgtcatgtatcacattgattgatttgagaatattgaaccacacttggaacccagaaataaatcccacttggtcatggtgaactattcttttaatgtattattggattcagtttgctaatattttgttgaagaatttcacaccttactggcacaaaaacagacacatagatcaatggaacagaatagagaatccagaagtggaccctcaactttacggtcaactaatattcgacaaagcaggaaagactatccactggaaaaaggacagtctcttcaataaatggtgctgggaaaattggacatccacatgcagaagaatgaaactggaccattctcttgcaccatacacaaagataaacacaaaatggatgaaagatctaaatgtgagacaagaatccatccaaatcctagaggagaacactggcaacaccctttttgaacttggccacagtaccttcttgcaagatacatccatgaaggcaagagaaacaaaatcaaaaatgaactattgggacttcatcaagataagaagcttttgcacagtaaaagaaacagtccacaaaactaaaagacaacctacagaatgggagaagatttttgcaaatgacgtatcagataaagggctagtatccaagatctataaataacttattaaactcaacaccaaagaagcaaacaatccaatcatgaaatgggcaaaagacatgaagagaaatctcacagaggaagacatagacatggccaacatgcacatgagaaaatgctccgcatcactggccatcagggaaatacaaatcaaaaccacaatgagataccacctcataccagtgagaatggagaaaattaacaagacagaaacaacaaatgttggagaggatgcggagaaaggggaaccctcttgcactgttggtgggaatgtgaactggtgcagccactctggaaaactgtgtggaggttcctcaaagagttaaaaacagacctgccctaccacccagcaattgcactactgtggatttaccccaaagatacagatacagtcaaacaccgggacacctgcaccccgatgtttatagcagcaatgtccacagtagccaaactgtggaaggcgcctcggtgtccaccgaaagataaatggataaagaagatgtggtctatgtatacaatggaatattactcagccattagaaacgacaaatacccaccatttgctttgatgtgggtggaactggagggtattatgctgagtgaaataagtcagtcaaagaaggacaaacattatatgatctccttcatttggggaatataaaaaatagtgaaagggaataaaggggaaaggagaaaaaatgagtgggaaatatcagagagggtgacagaacatgagagactcctaactctgagaaacgaacaaagggtggtggaaagggaggaaggcgggatgtgggagtgactggatgacagacactgagggggggcacttgatgggatgagcacttggtgttatgctatatgttggcaaattgattgaactccaattaaaaaaaaaaaaagaatttcacactttgttcatcagagatgttggtctgtagttctctctttttttgtagtgtctttatctggttttggtaccagggtaatgctggtctcccagaatgaatttggaagctttctttcctcttctattttttggaatgttttgagaataggtattagctcttctttaaatatttggcagaattatcctatgaggccatctggtccaggacatttgttgggagcatttgattactgattccatttcattgctagtgatctgttcaaattttctatttctttctgattccgttttggtagtttatgtttctaaatggataaatttatccatttcttctaggttgttcaattagctggcaaacaatttttcataattctcttataatccctttgtatttctgtggtactggttttcatttctcttcttccatttctgattttgcttatttgagccctctcatttttttatgaatctggttggaggtttgtttatcaattttattgatcttttcaaagaatcacctctggtttcattaatctgttctattgtttgggttttttttttttttttttttttactttctatttcatttatttctggtctaatctttattatttctttccttccactggttttgggttttgtttgttgttctttctatagttccttcagatataaggttaggttatttatttgagatttttcttgcttcttttttttttttttttttttaatttttatttatttatgatagtcacagagagagagagaggcagagacacaggcagagggagaagcaggctccatgcaccgggagcccgacgtgggattcgatcccgggtctccaggatcgcgccctgggccaaaggcaggcgccaaaccgctgcgccacccagggatcccagatttttcttgcttcttgcgggttttctttctagcctgtattgctataaaattcccttccagaatagcttttactgcatcccaaagattttgggccattgtgttttcacttttgtttatgtccatgtattttttatttcctcttcgatttcttggttgcctcattcattgtttaggagcatgttatgtaaccaccatgtattcgcgttcttccaagactttttcttgtggttaagatgcatcatacaacttcagtcttttaatttgttgagacttgttttatggcctaacatgtgatatattctggaaatgctccatgtgcacttgaaaagactgtatatcctgctgttttaggatggaatgttctgaatatatgtgttagatccatctggtccagtgtgtcattcaaagccactattttcatgttgatttttctcttcagaggatctatccattgatgcaagtagtgtgttaaagccccctactattattgtattactaccaattatttcctttatgtttgtatttatgtatttctgtttttaaaaatttgtatgtgtcgtatgtaataatattaccccacttaaagtcatataagttatttcttttatatttcatctgaaacttttaatgttttttaaaaatattttagcacttcgttcatttggagtttatttttatgtatgatgaatgtatatccaattattccggtattgaatagtacatcttttacctaattatctttaatgcccactcactcttcacatctaagaagccctgatgccgttttccattctattctattggtccatttgtctacataccctgccaccatcagtagtgcagggtcttaatgacagtgtatcagtcttcagtagtatcttgcctttccttaaccttgtactacttcatttcaatttaaaatcagtttgtctaaattccataaaataccctggagagattcctctagaaattatattgaaactatagaacatattggggaaaactaacatctttataatattgaggctcttaaccatgattatggtgtatacaggacctcatcactatctttcagtgtttttaattttccccattaggatcttgcatgtcttttctttctgagaatttattcctggtgactttaagtattactatgttactctcaaaagggacattttatcgcatttcctactttgtttaattgaaaaacgcagttgacttttttgtggatctctttaaccaccttgctaaactctattattaattcttatgtcttagattattttgtattttctctgtagacaatcatatcacctatgaataatgaaagctttctttcttccttcttatgatcctaacttttcttcctttttacctattttcctttcttttcagctgttgttaaaagtcccctattccctgcctaagtagccctaatgtatcattttccattcatagtataaaattttactctctgacagggtctgcgttttttaacccaatgccaataatggaatttcagttcttagccttgaaatgccagtaacaacattctcagcaagataaaaagcaaaaaatgtttctttcttttccccaaagctgtggagaacaatgtatttttaacataaaactttcttataaatgatatttctaacaaggatgatttctcaaacccctagactccaaagattcggagtgagacctgataaaacgaccttaaccaataaaatacctgtaattttgattactcatcttttttaacaattcagtgttcttgtaataatgttgagttaacatctccatctagaggaaggtaaaattacttgtgatttttttttctgtcaaaccagaaaagaaacattggcatttccctgtactcacacagaatacagctgaatggttctattggaatttttattaaagcaaatgtgagagggcagcctgggtggctcagcggcttagcaccaccaccttcagcccagggcgcgatcctggagtcccgggatcaagtcccacgtcgggctccctgcgtggagcctgctcctccctctgcctgtgtctttgcccctctctctctctctctcatgaataaataaataaaataaaaaagaaaatgtgagagactgttgaataaaacaagcagagcagagatataaggaggttgattgcatgctgagcctaaaaatgagcccacaatttaaaaaaaaaatctaaagatttttaattttattttatttatttatttttttttttaagatttttaattttaaaaagccaaataagataaacctgtatttacgcttctgggttggtccaacagttcccccgcccccaccgcgcgacctctgattgacggccagccgagccaatcacagccagggcctcgggtgggcgggccgcggaggcgcttccgggggcctcgctggtccgggggcctcgctggtccgggggcctcgctggtccgggggcctcgctggtccgggggcctcgctggtccgggggcctcgctggtccgggggcctcgctggtccgggggcagcagcttctccgcggcgcggctggccctccctgaagtgcccgctccgggtgtggagacctggacggaagcggtcactgcggctggaaacccggggctccgtggcagacccctacggtgcagggtccctgagctcctgccgcgaggaagaggcccccagtggtcctgcaaatgcctgaagaacgcgcaggtgacgctgatgcaggggagattccggggacgtaacggtgtcccccaggcagcgcccagcgcggtagtacggaaggggtgcgcgcgtccaggtttctcctggtgggagtgtcccagtgctccgggctcgcgggatcagttgaaggaatccgggcccctggggagggtccctggagaatgctgagagtcctgcagttgttccttcggttctcgtcacgcttgttgggatatgtaactcgttcccttgagcctgaggtggcctgtggttgtgccacggccctcttctctctcacacgaccttctgggcctcacgccgcgtcctcagccgagctgcggtccggaggagggccaagtggggaaggaaatcccctcgcagaccgggaaccgggcactgcaggatgcctctagcgtgaccagggtccgggcctagacagaagagtaaaccacctcctcttgcgtctcaaagccgtcttcctactgcttccatcatcctgaatgctggcctgctggcccgcggtgctctggttattagagaggaatttgaataatgtagacgaaaaacttgagtgaaacagagtgaggataccaggcctcttcagcttgacttgtgggtttcccacactaactctgagcttaagagcaataccccgccactcttaagctagggtgacccacagatgtgctacagaggatggatgggagtatgccctcagcaaggcaagtccgcctggggccgagtgtggccaaggagccttggttgggggccattacatgcaaatgagttcctgctgcttgcatcagaggaggtgtggcaagagcctggtgaaggctcatcctgatgctcagcctgagatgcagtcaagatggagaactgcaaagtcagcagtacacgttttctgggagcctcaacgtccaatgacaggctccaccaggaatgagcagcccctgtgggctgagctctgcacgcctggcctgcattcggatgggctggggaagctgagccaggagctcggagagtgaccggaagggcacccaggcacctgagaaatgcttcctagatgtccgcttcaagaactctcttcatgcatttcccaaaattttcgtcagtgatccagtgggagaaaaccaggtcccagacttgattaaaaaacaaaacaaataaacatgatgcctgggtggctcagttggttaagcatggatccaaatagttgcaaagattataatttccagtacaccatagatattgacatatttaaataaaaatcaccttgtcaaagtgtctagtggaatctaattaccataatgttttgacacccatcattaatttttaaaatgcacaacctcttccttaacaattggaaattttacattgctctcttttttcttttaaattcatactctcattttcctccccctatagaattttttttttttttctcaatcctggcccagcatcttagtgtaatttattttggctcttggaactctcttcttgatccatctagcatgcttctttgcaataaaatatgttcttaaatttttgatttcctgatctaagtgattgaaaagtcagataaattcagatagtactataattcttagagataattgatcaaagtaatacaaataatagagattttggtaaataaaagtgttaaacatatacattttttaaaagtaaattttaactggaaatgcttctcttatagagatggataggggctttatttttccagcttcatgttgatgaaagttactgttattatgagaacaggttccatatgatttctattcctttaaagatattttaacataaagaactaaaaaatcttattcatggggtgcctgcatggctcagtggttgagcatctgcctctggctcaggtcatgattccggagtcctgggttcaagtcctgcatcgggctcccaagagggagcctgcttctctctctgcctatgtctctgcctctctctctgtatctttcatgaataaataaaatctattttaaaaagtaaaataaaaaaatcttattcacagaataagtataagaatggaaggaattttgttgtagcaacttttttttttaagattttatatatttattcatgagagacacaggctaagggagaagcaggcctctcctcggagagccagattcgggactcaatcctgggactccaggatcatggcctgcgtcaaaggcagacactctcaaccactgagccacccaggcgaccctgttgtagcaacttcatccagtttttaaaatttcttcttagttgtatgccaaaactcacacagtgagctattattaaatactgttataatctcacaactcaaatgtagagttctttttcaattttgttgaagcaaagaattaggaactacctgatttgcaaaactatttttacacattagtttctttgactttctcagttcttagaagtatataccagaaaggctttaaaaattcttgtgaaataactaatatctatacctgttagaggcatcttgtttgtgaaactcaaattggatggaactgggttttgaaagaactccacagatttgaaaattaaaaatcagtaggttctgaataaagatgttttcctcattttttgtcacctggaagtgcatttaaaaattatgataaagagggcagcctgggtggctcagtggtttagcaccgccttcggcccagggcatgatcctggagacccaagatcaagtcccacgttgggctccccacataaagcctgcttctccctctgcctgtgtctctgcctctgtgtgtgtgtgtgtgtgtgtgtgtgtgtgtgtgtcatgaataaatgagtaaaatcttaaaaaaaatatgacagagatgggcactaagctattgtgtatgtgtgtataatttcatttgactgtagaaaattattaattttgtaatcatgcatttgatagatatagaacaatgtatcaacatccatgagggagaaattaatccaaaataagtgaacctggatttctaaagttcagggcattacaatcaagactgcattttcgaagattttgttttgtatccacacataagtggatttctgcttttaagaacacaatttaatcttagaaactaacagcaaaacgaagagaaggtattagaccattactcagtttaagtttacagaaattgtatttctgattgctatgtgaattatttccaggagaattccacttcatcaaattatcttcaaatatcttcatcagattaacctgaatctagtgggtataaacaaataaatgagcaaagaagtgggacacctgggtggctcagtggttgaccgtctgcctttggctcagggcgtgatcccaagatcctggatagagtcccacattgggctccctgcggggagtctgcttctctctccctctgcctatgtctctgcccgtgtgtgtctcatgaataaataaataaaatgtttttttaaaaatgagcagagaagtaacagtatatcatagacctgtacctaaatagaaaaatatctttctatgatccggtaatatttggtaaaagtcaatagaaatatttctcctataagtcagaataagctcaagaaaacatatactaaagtactcccaatatgtgtttattttgctctaaaatatgatgttgatctgtcagaactaaatgttgagacttttgtattcactgctttcaaatcatgcaacaaaagcaagtgaagtacagatgagataacaactgaatacgtctttgttagttctgagaaaattctattgcaggttagtatttctttacatgatttttataagatgagaattttatttatttatttatttattttttttttagaaagaaagaaagaatgagagcatgtgagcagggggtgagggagagagaatcttaggcagactccacacccagttcgagccccaatgcaaggctccatctcatgaccctgagatcatggcctgagctgaaatcaagagtcagatgcttaaccagctgagccctgcaggtacccctaaattgagaatattctaatcctagaagagataaaggtttgaaccttgccatgaatttgtcacctgaatgaaatttaaaaaccaccatcatcaatatttcttgccaatgctaaggagccattaattctttaattagaaaaggatgtcttcccagagcctggtggctccctcagttaagcatctgccttcagctcaggtggagatcccacagtcctgggatgagcggtaccttagactctctgctcacagagagtctgcttctccttctccctctgcccctctccctgctcaaactctctctctcttactctctcttgctctctctctcaaataaataaaatcttaaaaaaaaagaaagaaagaaaaaaaagaaagaaagggaagtctcaggttatcagatgtaattttcagtattccaactcttcaactgaggaattatacaaatccagaatattgtaacacaggtctaaactcccccccccccccaattcttatgccacattatcacccttaatacgaagttacttgactgagagcatttttgacgtttggagttgaataaattcagtttttgctatcccgtgcattatagaatgtttagcagcatccccaacctctacccactagcatggattcccaactggaacccttcagtgatggcactaaaaaatatctgcagatattgtcagatgtctccccttggtggcaaaatggttgaggatcaatgcccttaacagaaatatagaacaacataaagctgtggttaaaggagacttcatggccaccagttttgaactgtcctcttctttggtactcagaagtattttattcccaggttaaagcaccataattatgtcttggataggtaagcagtatgcccttctcttgtaaagtgggagaaaaaagattgagtcctcgaagaacagtcgaaagcaaatcacttttattatttaaagaggcttaagacaacaggtgtttgattaagcacatcactttttcaagtgtatgcacatggatattggggtctagattcccttaaaacttctgtgctgatgtcccacttggaaaactttaatacccccaaaatacaaaaccccagtttgaagactactacatttgaggaccgttacaaacagagccacactgaataaagcagagcaaataagttctacataaaaggtagggaaaaagaaaaaaaaaaaaaaaaaaagaaagaaagaaagaaagaaagaaagaaaagaaagaagaaaggaaggaaggaaagaagaaagaaaggaaggaagaaagaaagaaaagaaaaaaagaaaaagaaaaagaaatacccattccctaaagtcagatcaattccatatctttaaacatttaggaagattttcaacacagattgcctcacatagcaaatggattcctcccttgatatgaaataaaatgtgaaaacaacctcaacatttagaaacctaagccttaaaaaaaaaaaaaaaagaaacctaaccctttcattaatttttcttttttttttcatgaatttttctaacagtccaatgagtatcatgagtgtagctttgaattcccatagaaaaatattagttgaatattaactagagtgaaatattttagtgtcttcagcagacagtgacacaagggctgttagaaatgtaaactcctctctttactgtttttgcaattgtctacccagtcatgagaattgtgaaaaacgttaacaaacatctgagagacgaaacacacgctcaagtgcagcaaccatttaggcagaagataccagaccaaggtcccaaagtcaattagagattttagaaacttaggttaatatcaaagaaaaatataatcaccattaatatcaaaattttgtctgctgggtccctgggtggttcagtcagttaggcatctgctgccttcagctcacttcatgatcccagggtcctgggattgagccctgggtcatccggctcagtagggaatctgcttctccctccccctcgggccctccccctgcttgtgctcattctctctctctctctctcttaaataaaatcttttttaaaagaatatgttgggacgccagggtggctcagtggttgagaatctgcctttggctcaggtcgtgatcccgtgatcccaggtttctgggatcaagtcccacatcgggcccctggtagggagcctgcttttccctctgcctatatttctgcctctctctgtgtctttaaacaaacaaacaaaaaaaacaatatgtctaagaaatgttataccttaacttctaccagatactataagtggggtaacatgaagattccatgtcatttgtgataccaaatatttaaattatatctctatttgagcacacatgactatatttacaaacgtctagacattaatttaagacataacaaagtctggtctataaggtaagtgaatgaaatttaggacattccatttaatgtagcatttgaatttgaaaagatgggagctgccaaaacttctaagtagcaagacacccttcagtgggtaaatgaataaacacattggtacattcacacagaggagtattatgcaattttttaaatgagctatcaaaccacagaaagacatggaagaaccttaaatacatattgctaagtgaaagaagtcatctgaaaaggctacctattgtgatcccaactatatgatattctgaaaaaagtaaaactggagacagtaaaaattagatggtcaaaagaccagtgatcaccaggggttcactgggaaagagggaagcagagttgaatagatggagctcagggtattttgggggcaatgaagctattctgtatgatactgaaatggtggatacatataattacacatttgtcaaaacccatagaatgtacaatgctacagactttacttaataatgtgacaacattggctcatcaattgtaacaaatataccaaaccaatgcaagatgttactaacagaggaatttaggagaaggtagggagtgaccgaacatatgaaaactatcatatttttccacccaatttttctgtaaacctgaaactcctctccccagaaagtatatttttaagaagaaaaaaaaagaaggcatggttttatgtggacaaaaacgctatgactgcacttttattttatacgtgatgaaatcagagaggggacataatttaaactcaacatgcacaaaacaatttaccataagaaagtgtttacccaggtcaggaatattaaataagcttagattaaaattaagttctcttgaatttactgagtaatcctctatatactagtttaaatttttagtgcagagagttttttttaagtttatttatttaaacgatctctacgcccaacatggggctcgaatttacaatcctgagatcaagagccacacgctcgcctgactgagccatccaggcgctccactgcaaggagatttttaatgtccttttatgaccactaattattggtctacagccaagttgcatatctgatctttattttataacttaccaaagacactgaggatattaaactagagttacattttcccatttttaatacaaagagtttttaggaacagaaagtatttctattttaaaaaaagaaagaaagaaaaaacgaaagaccattgtttgagcattcattattaaataagcatagttatttttatgtgagtctgtactttttcatcttgcttttgccatagtatacccgtttgaactaaggttttataatatgcatagactttttaaaatttgcaacttaatggcaactttcttgccatttgcaatgacctggatagagctaaagtgtattatgctaagagaaattagtcagagaacgacaaataccacatgatttcgctcatatgtggaatttaagaaacaaaagagatgaacacatgggaaaggggaaaaaggagagagagaaacaaaccataagaaactcttaaagatagagtagatggagggaggtgggcgggggatgggctccataggggatggggattaaggagggtacctgtagtaatgagaactgggcattttatttaagtgatgaaccactgaattctactcctgaaaccagtattgcactgtatgttaactaattcggatttaaataaaaatttgaagaatgaaaaaaaaagggaaggtaacctttccaactagaaaatcattaaaagattccatcttctgagcgctgatttctctaacttatttaacctaattgtgtaacttgaagatagaaatttttctctacagtctcgtgaaaacagaatgacagtggaatttaagttcacagatactgtactttgaccttatctcagcctggaatttttcttaaatgttaggaacatttaaagcattaggaaccttggttaatttcttttcttttcccctacgtatttgagactcctgtcttggattcatgtgagttaatagtgattcttggaatcaataaaaacaggagctccattgaacatgacagacaatggtttttattttctaatattgtccagatgaggacctcatcctaatttaaggacaccttccaaaggaggctcctttctttgacacctacagtgtagccataccaattctcaagacacaagcagcagactccaagtctttacatttcctaaagacatacaaattgatctgcgttttctctggtggaaactggatacctggtcaacttttcagggccttgtttttaagtcaagaaatgtgcagcctattctctttctccctgtcttggtttgcttcctgggtttacttgggttatccagctgacttgctgttgctgtaataacagggctgagcatgctatgttgagagccaccactgaaaaccagaagaagctattttttgaaaagcctatcagctgataagattcctttctgatcactcctcataatctctagctttttttttttttttttttttttctagtctagagcaaatctttaggagctgaccaggatccaaagctgttgtagcctaaattggctgtgatcttccccatacttgagagcgctgagctttaacatggaccttagccacctggaaggcctgctgtgaggggacaaagccagactcttgacccagcaggaatacatcaacctggtccagtgtagcaccctggaagatgtgaaaattcatttccagaccactgatcatggcaacttcttggcttatcctcttatggcttccaaaattgacaccaagatggagaaaaagctatgcagagaatttggatatttctggaatcatcccccagaaccctgagcacatttttttgcatacatgatgtgcagttacatgacaatgtgattctactgatgaacggtgcgttgccaaaaaaaaaaaaatctgtgcaagaaattctggtgaagtgccacctattaggctatttcacagaaatggaaacagtcaacattatggagacactttcctatccctttaatgctgttctggttgaaataccgttagctacattctttctggactatatgtctgaaaatactgtagataaactgaatattgaattactgcataatacgctgtacaaatcttaccttgaagcattctataaattctgtaaggatcatggtgatgtcacagcagaaattatgcatcccattcttgagtttgagggtaccagaggtgcttttatcatgacgtttaaccctttgtaaccgaactgagtaaagacgaccgagagaccctctacctgacctgtggcaagctctgtcctgagcaactatgccttctgctcaagcagaagactttgaccagatgaggtgagtagaggaccattacagactttacgggcctttgtttgagactgtggtcatggcactggaggaaagacattggaggatgtgttttatgactatgaggtacaaatgaaagtgctggcattcaacatgcaattccactatggcgtgattaacatatacacaaagctgaaggaacaagaaatgaaaaatattgtgtggatagcagaatgcttttcacaaagacattgaagtaatatgaacagttacattccaattttataaccagtgtagggcctcaaatgcagaaaatcataaatattaagaagagattttgaggaaaataaaaagaattgtgttatatgatatgggttatacaaaaataatccatactgcacctttgtgagttgcagaacccctggaaacagaaaaccaaccctgaaatggtgtttctttttttttccagcagccttaaattttgtttccacatttatgtctcattttttatcatatcttagatattaattctgattagccccatggtgctttttctattcttatgtggttgtattaaaaatcagatctaattttttaaaaagaaaaaagagaaatgtacaatttctgcaccaaaaacagctggagtgtgaggttctagatcctcttggatacctcactttccacttcacaatggacccatgtttttacacaggaagggggaaaaaatctatcaaataatggaagaaataactggcttcttgggaagactgaaaattatccagcaacctctttccaaggggaaaataatgcatatattagaaaagaaaacacaatcatatggcttcccaaagcttctcaaacaccaggcatcacccacctatgtgtcctccagagagcaacaggtgtactgtaaatcaggaaaagcaacgatctcaggctgcaagttctgcacattaatggctcccatacttcttcctatatcaatatgggaaaacggattttgccagacttcagttcacagaagcaagacacctcactagagtctataatgaagctaatttagatcacaaaacctagaggtaggtaacaatttagcttgaaattttccagcaaccagctcagaaaggtgttgaaaagtggctatcctataaaacaaattcaaagaataattgatatgatacccagaccagaaaatttctcaagttcctatttttaaaagtgagcctctcaacaattctgttttaggaagtctaataggggtttcacaggtctgtcttttatgggattgttcagtataggtaaatattagagtctctaggtggttcagtctgttaagtggctgccttccactcaggtcatgaatcctggagttctggaatcgagccctgtgtggggctccctgttcagctctctccctcccccactcatgctctctccccctctctctcaaataaataaataaaatcttttttttttaaggttttatctatttactcatgagagacacagagatagaggcagagacacaggcagagagagaagcaggctccctgcagggaacccaatacgggactcgatcccaagatcccaggatcatgccctgagccaaagggagacactcaaccaactgagccacccaggcaccgcacaaataaaatctttaaaatatgtcggtgggatccctgggtggtgcagcggtttggcgcctgcctttggcccagggcgcgatcctggagacccgggatcgaatcccacgtcaggctcccagtgcatggagcctgcttctccctctgcctgtgtctctgcctctctctctctctcactgtgtgcctatcataaataaataaaagttaaaaaaaaaaaaagtaaaatatatgtcggtaaacagcatcaaaccaaaagataattctgtaacaagaattctacagagagccaacccattatagaaggataagtacagcaatagaaaaaaatacaaagtaacccagaaaaataaagtgactaactcttactgctatgaagcaggtcaagaaaagtttcctggggaaggaattttgatagatgtaacttggaattttccaagtaagctgtagaaggggaacattccaggcagaagaaaccacaaaaaagtaaaggcaggcaatcatgaatcagcatttttttcatagagatctatatctataatcagattaactgggggaaaacgtgaagtggggagacacaggagaggtaggtagtagcaagatccagaaatgccttctatactgtgttagagatttgatatttattttaaaataagtaaaattaacaaagttctaaatgaggactttagaaataatagtaatgaagctgagagaatatacttaaggctgtctgggaggtggaatttacaattaagtattgagtaataaaataagtgaaagggtccatggggaggtaagaatgtgagtctaaagtttctgattcaggggataaatgacaggaaatcattgaaatccattggcctatcttgcactttaaaaggttttttttgcccatacatgtttctgcaacaatcatgcattggccattagagaagagcaattcactgaattatgcgggtatttgaaatgtcagcacactttatacactatctttttaaatcacattcattaatattgcctctgacttcatcagaaaagtttttaagtacgccacggtagcaggtacaagcttcccaaaattctaattttcactcaaaagtttaaattttatcattggtagcagatataatgagctgtttttttgaagtgacagtctcactttgttcatattcaagaaaatgtctcccatatacccaagtctgaataaccaattttctgtcagttgtttgtttttccaaatgaaaaaaaaaaaaaatgtgttccataaaaaaagtagctaattcagcttgcaactcaaagttttctctggagacaaccaccatattttagtatatagcagaagagcttgatgggtatttcttatttcatcacagaatatttcttaaaatgtactcagagttgagatttaatagaagtgataattatttttccttcatcaagaacattctctagtgaaactgacttttaaaaactgtgggtgtgtcataataaagaatataatgagtgctaaagcaatttgatgctcttatcttgattcatgccaaggcactggtagtattatccaccattgttcttacactgtcagtacacatatgaatacaggtgttgcaggaaaaaccatgagggtcaaaaaaggttgtacaacactgttaatgatttaccacccctgtgtctattgtcaagattcacataaaaaaaggtcaatgattagttagcaatgataccaaatgagtacaagccggacagcatgtctagacacatctatagatcggttcatttatgtttgcagttaaatcattaacttgacaggttactctatcattggaaaatggtagtactatgctttcttatactgtcttttaatcaggcaggcatttgtgaaacaatgcaactgttcaaggctttattagtctctttactattatgtaagctcctctagccaatgtaatgttatcctgtaagaggcttttacagagtttgaaacatctacatttaaaacatttaagtccctgcccaggtaagccttggactcttgatttaagctcaggacatgatctcagggtcttgagatcaggccctgtgtccagctacatactgggcatggaacctacttaagattctctctctaccccaccccaccctccaccacatgcaagctctctctctctctctgtctcaaaaaagaaaaatatcctctgatatatttttaagccatccttaagtccaagaaaatgtattataaatatattttgttttattttagaataaaatattcaattctaaaataataaatttcatacaaaattttgaaaattaaaaatggttttggaaaatattttaatattgttgcaaaacaagatgaaattaattctcatgtttatgtataggtgcaggaaaatctttgagatttaatagttatgatttcctggaagataatgacattacagagtatagctgatgtaactgaaaagagctggttggagcaaggagtagtgagaacaaattgagttaattttttaaaaaatatatgtatttatatcctaaactcactaccttagaaaatccttgaaagtacagtacacaatttattaactgttagaacaatgatgtcatcccatgcctttgggaaacgctactgttcactcatgagagtgaaagtgaaaaagacaaaaaacatctttgtattataaatagttttaaccttgtggaccttataaaagaatctcaggaatctctcctccccagagatcctctagccataatttgagaactactgcacaagtcagttaatggtgctaagaaaattggctatgtccacaggaggcaaaaatcagaagccaatttcacaccatacaaaaataaatttcaaatgaattaaaggtctaaatgtgaataagtaaagctgttggaagaaaatatagaagaatatctctttattatctcagtgtagatagtctgacaacagcaagtgctgatggagagatggggagaaattagaatttgcatacactcgtggtggaaaatttaagtagttttcctgcttatttcaaccacttatttcacatatgcaatactgaataaattttaagggtatgaatatcctatatcccaacaattgtacttcagtttatatgacccagagccttagaaaatctctcatctatgtgcacaaggaaatatgcataaggatgttcattgcagccttgtttatatttagtagtcagaggatatccatcagtggctaaacaagtgaataaaattgtgttgtattcatacaatataaatttcacaaccattaaaataaactaaatgtacatatatcatgaagacaagtctcaaaatgtaatgaagactgatttgcactcattttattttattttaattttgtatttatttatgatagtctgagagagagagagagagaggcagagggagaagcagactccatgcactgggagcccgatgtgggattcgatcccgggtctccaggatcgcgccctgggccaaaggcaggcgccaaaccgctgcgccacccagggatccctttgcactcattttaaaccagtaattgcattgaggagagaaaaaaaaggtagcactgaagtcaggtggaaacaacacaactgtgtttgggtagtaggtgcattggtattgttccccatatattctgtatttgaagtgtttaatgttaattataacaacataaaatgtaccccaggtcctttgtgctgtcaattacagagtatctgcttctcttatcaaactttttattcttataattgctttacaggtaataaaataagttttaaattaattctgtctagttgtaacataatcaggtttgttaattatgtctagttctttgggcaataacaattgactttgtttcagtgcttagtattttttaaaattcattagtttgctcatctctttgatttttattttaatgtaccttaatcatgacctattttaaacataaagattaatggatatccattgcccaagcacccaactttattaaatcttaatattgtgccttgtttcaaatctattttttaagatgttaatgtctataatatagttgatgtctctggacccttccatttctttttttcctttgccagatatgacgacccagcatgaagtcaattttatcattactatgcatgttttaatacttccactaaatatttgtgaatccttagacattataaagtattgttttatatagagttttaagttttataaattgatatctatgtgtattctacagccgtttttgttgttgttgttgttgttaacatattttttagtcttatgtaggttgatcagtgtagttcaggtttatccacttaaagtgctgtagtgtgtactattgtatgagtatgccacaacttattaatccattccaatcgtaatggactttaggttggtttctggattgtggtttgagtgtgtgtttgtcttgctttggcttggtctcacttgtttttgctacaatagacatttatgtacatgtcgatttgggtataagagttttattaggttaagttttgttaaacatttttcttaaatttcaaggataatttagaagctagtattatcaacagcaaagaaacatttatctggattttggcaattctttagtgccattccttttttcttcccgtttgagtaacaaacttttatcccatttacttccatatctatatatccatccctcatttcacctaggaattgggagatgcctggaataatagtcaccttttcaagtaataatagtaacaatttaacaatagttgtttctgagtggaagaattcaaggggagtatttcctcttatcttgatacttaccctgtgttgcttgaatttttagttaacaggcaggtatcactttttaataaaaatagtacattatttcaaaaactaaatccatgagtctgagttagagtaagtgatatggtagctgggctgaactcctaagttgtggcaaaaatgagggagctgaaaattcaaaaggatagaggaaaggtaggaattttctggaccctgaaatcaatggctattgccacacttctctaaaagttctatgtgaatatataggaaaagaaccctgggaactttggtaactgctccagagagaggcttgttgttttatgaaaacctgtaataactccttatggaaaagaataatcacatatcatttgctatgtattggaataacttcctctacatagtggtgtggtcttgcgcaagccttttctagtttgtctaagctctagctttctttatctatgataggatatgagactatatctgaggtgacttccatatgtaaatctgcattgaaccattctactcagataccccattggtttgcttaaaggataattttgtccattattaaaagcgttgtttcaccaaaatagtaatttactgaatattcattggttttaactttattaactttagtaaatggttcatcacagagttcctttaaatgctaagattttcgagtattatttcaaccattcggaagacatttttgaatatccaccatgaatctgatgctatttgagttgccagagatacaagaatgagcaagacagatgcagtctctttatcacaaagcttatagttgaatgcatcttatttaaaatatgattcaagcgccccgccccgtggctcagcggtttagcgccgcctccaccccagggcgtgatcctggagacccagaattgagtcccacatcaggctccccgcatggagcctgcttcttcttatgcctgtgtctctctctgcctctctctctctctctctctctcgaataaataaataaaatctaaaataaataaataaatatgattcaagactttaaggaacacagccaatccataaatcaataaagagaaaaatttccaatatcatgtcattgacaaacagagatgaatgtatatatatttaaattttaaaacttttttttaaagtagacggaggtagggggtttggggggggtggggggtggggataagcatagtaaaatccttaaattattttttttaatccttaaattaaaaaaaaaaatcattggcaaattttagcccatagatgtcagcaaagacccacctgtgggcaagaaaacattttgccagaggatgtagtgtttaaatttgtcttatgtttctttcccttctgttatattcatttttgtgttctctgtaactttttttttaagattttatttatttatttgacagagagaaagagagcacaagcagggagagtggcagagggagagagagaagcccccctcagctccccactgagcagggagcccaatgagatgcaaagctggatcagaaggtagatagatgcttaactgactgagccacccaggcaccctgccctattctctgtatcttaatagcctatagcatgtacccaaagcaatgtttcctattatttcatctatttattgaaaatatatcattttcttaatttcattcaattaatttactagttctggtaatctaggtttgctcttctctctactttaaaggaccttttgtctgtaatataaaacctagtgcttgattgtatacaggcacaaattgttttctgaaacattggtttccaaaatggagtatgcacactacagtgaatgcacacaaaatccttcagagtatgaaaaggaaatattaggatttctatttatatatatttggcaacttttaagctttctatttgtgtatgttatggtatgtataatcaagtcatattactagtacatacggataagttatgataatttataaataaacatatggatataagtaccaaaatattttttactgagagagcagtcttaatccatttgggttgctataacaaaatatcagagactgggtagcctatgaacaacagaaatttatttcccattgttctggagactgagaagttcaagatcagggtaccaacatggtttcattccagtgaaagccctcttcctggttaatagccagcaccttcttactgtgccctgaaatggtgcaagggccgagagaattctgggaaggcgtctttcacaagaacactcattcaggagggctacatcctcatgacctaagcacctcccaagggcctcacttcttaatacaatcacatcaggcaaaaggatttcaaggtgtgaatttgggaagacacacacttatagaccataggaagggctttatgcttaaaaaacaatgtgaacaccatagtgcaaatgtgtgttttgtcttgcctacataatcggagtgtgggttcttccagcgagtgatggtgtcttctcttaccttttccaagggaccttgtgcatgtaaatgctaatatttatgggactccattgacatacaattcagttcttcaaaccatcagtctgaggaccatcctctgaacatgctttggaagcattttcattaaagctaaggctatcttagaaaatgttaattaaaaattaaaacgaggacacctgggtggctctgggatcaagtcctgcatcgggcttcctacaaggagcctgcttctccctctgcctgtatctttgcctctttctctcagtctgtgcctctcatgaataaataaataaatatttaaaaaaataaaaattaaaacgaaaagtataacaaagacattttcctttgtaccagcagaaagaagacttaacgaaaaacttcattagtaaaggtagaagtcatactgtaagatagcagggcacctgggaaggatttaagcggtgccagcagccttaaatcaaagaatgtctggttgcccaattaattcacgtttggtgtaattttttgttgataagaataactcataacgaacccaaccagcttacctttgatttttacacctcggtgtacaaaggaatttctaggatatagcttaggtgcaaattcagtctcacccccagggattctgagtcagcaggtcagagggtccagcattttcatcaagtaccccagaagactctaagctggttatcagagacgccacttcaaggaaatgtcctagacaagcgcattcttccttctcaaccagccatgagaatttgattaaaaaaaaaaaaaaaaaaaaacagatctaaggggctcctgggtgccagctaagcatccaaccattgatctcagctcaggtcttgatctcagggtcatgaattcaagccccacatggaatcaaaaaaaaaaaaataagcagatctaagaattcatttagcagtctgttactctcaccacctcttattgccaactatgatcagaagcatgaaacagtatttgttcttctttcagaggttatcacattgctggctgtgagatggtccagatccctcgggactgggcatggcctatgatcctggcaccccaaggccaatcgctgttccttcgtgtgtcagctgggcattttatgatatttacttaataaatcattactcagtcctgagcctcctttccttctgacccaattcatgtggtatggttgatccattaggtagcccatcttctggctttcctgttttcccaatggatgtggacaaaggaaatcctggagcagagtgagatgcctctctgtgaaaatagcagactctcctctcctaagatctttaataaaacatgccccaaaagcccttcccctatatttcccctttcagtgaattaaaccactctccacctattgtccaaaccagaaacctaagtccaatcagttttcaagtcccatcaagtcttttgctttgagtcatttcattgatttttatctcctttgcttctaattgtaatggtatacatgagtactaagtaggaggttcaaaattggagagatgggatttgaatgaatgtttttgtatgtataataaaagccatgatagatagaggagagaagatagagggaaagtaggacaaagtaaaaaaaatgtccatgaaagcacctcggaaaattcaaagcattacacaaatgtaacattttattattaaccatgatttcatttttgttccaattctgtccagagaaatttggatgctgtaaaagaattttaaggctttggtcaaaaaacactctatggtcttctaattactacttgtttatttataataacatttcaacaacaaagtaaaagttattttatagaaaaaaaacctgcaatgcccaccctgtataactcagctatggtgttgggttcaaattaatatgcacactcaaaaagccatatgagggcagcccgagtggctcagcggtttagcgccgccttcagcgccgggcctgatcctggagacccgggatcgagtcccatgtcgggctccccgtatggagcctgcttctccctctgcctgtgtctctgcctctctctctctgtgtctctcatgaataaaaaaaaaaaaaaaaaaaaagccatagtgaatactagaccagaacttagaagggtataggacataaaacaacattcttgtttatcagcctgatagcattaaacatgtcttctcaggagtctttacaataatctaggtattgattattgtccccattttgtgtggacatgcttggctgtaacagacaaaaccacaggggtggataggacccatcccaggatagaaaatcctcacaaattacaggaaccacatcgtataagcctgtgaattcacattcaagccagcaagcacattcagtttcaagaaacaccatacacagaatccaaggtctgtgtttcctgacaggtttttatactttttttgtcacataagcccacaaatttaatgcctactccatcttcctcatgcagatatagttcaccaaaaggggtcatttctacatttaaaagtgttgctttgtaacacaattgacattccttgtttatctaaacccaagacattccaaagaaacagtaaagataagataaactcgagttcatcttcctgtgggagaaaaaaaactggtctaatattgctattaacccttgggccccccaacaaacctggtttgttccccctcaaaagcttattccagtgaaggcacttcctggtagcagctcctgagcaagcagggggaagaaatgaaatgggtgcccaaacagggaaaaacctatcttttttaaccttcagatacaaagaacacaatgaattcaacatgtatttgatgtagatcttgtgccaaacattgccacagaggaagattcatctgcatccaagataaactgaggagaagaatgggagcagaggccaatgggaagataggaagccacaggaccagctagagatggctgcagcaaattgcttggagggctctgatatgtgctagggagacttaaaagagctaagttgaaagaattcataaattctacagacgcttctaagttacagaaaaggaagacacagccaaatacatcttaaagaccacgaggctaataccatctatcagggtgctgtcgcctcatcatacagcttccctcaaaactaaccagtatcttcctagaaaggaattgctgaaagtctttgtcctgaattctgcaaagtaaaacatccctgaagatgcacccagaaagggctcaatggagtacacagtcagtgctcaaacacaaatatatctctctcctacttgatgccacacacactcttacctcatgaatctccacatctcctttctctcctgccactggagcagagacaaatcagaattcccactcaccagcccatctggcaccaggaagagagattcttggcacaggcatgacagcacacaagtcctggccacaggtgtaagactctggtgatcaggaagcttctgactgccagccattggacgtcacctgtcactttgagagccagaaatgaaacttctatttcctactgagatggcaaataaataggctcaggctctccctcacccaaaattaattttgctaaagctatagaagcaaagggaagcaagcatttggagaaccagaaacaatggccacaacaaatataaaatgtttagaacttgccaagaaagagagaactgccatcttgaaactgtgcgtgtagggagtggggagggctgcattcagggatagaaacagcattaggaggacagactgcaggaagatctaaattttagaatattttaaattcaactcttatctccttcataattgtcttgagacatcactgcctcccctttacacataaacagaaattagagcagcacctgtgccttgctaagtcaaggaactaaagaaaataggtgttagcctggggtattcacttcttcattatttgctaccatggccccagctcccagagagcctgcctgttcccagttgtgcgatcccttagaactgactagtagagcgtctgcaaccatggagagtcagtgtttctgagttctctgccaggactggatctggaaggacacagaccttcatggtcagaccttcatcctttccccactatacatcgaccatacaaactagctgttatccccatggagacataagctcagagaccaacagaattagaccgctaaggactaaacccgctataaaacagaaataaatcaaacaccatatactgcctaatgcagaagtgagaaaaagatgaaacaagaacttaaaattagatggtaaatacaccagcgcctgggtggctcagttggtaagcatctggctcttgatttcagctcaggtcacaatctgagggtcatgagtttgagccctcgacaggctcagtgcagagtcagcttgagattctctctctccgcccccctactcatgtgcacaataaacaaacaaacaaataatcattgggggcacctgggtgactcagtcagttaagcatttacctttggttcaggtcatgatctccagatcccgggattgagccccacgacaggcttcctgcgttagtggggagtctatttcttcctctgcctcttctccatccctcctgctcttgcacacacactctctccctctctctgtctcaaataaataaaatcttttttaaaaaagtaaaataaataggggtacctgggtggctcagtggttgagcgtctgccttcagttcaggtcatgatccaggagtcccaggatggagtcccacatcagctccccacagggagcctgcttctccatctgcgtatgtctctgcctctctctgtatgtctctcatgaataaataacatatttaaaaaaaagtaaaataaataattttaaaaaaataaagaagtgtgtgtgtgtctgtgtgtgtgtgtgtgtccagattttaaaatcttcacttggttgtaggattggtatttgggtgagagaaggaaaaaaatcaaaaagacatggctcagcggtttagtgccgccttcggcctagggcctgatcctggggacccaggattgagtcccagtcaggctccctgcatggagccggcttctccctctttctgtgtctctgcctctctgtgtctctcatgaataaataaataaaatctttaaaaaaaaaaaaaaggacatgtaatggatgtgttaaccaatttgattgtggtaaacattttgctatgtatacatatattaaatcatcacattgtacaggtttttatttttttaagcaggctccacacccaatgtggagcccaacatgaggcttgaactcacgaccctgagatcaagacctgagctgagatcaagagacagaggttcaaataactgagccactcaggacccttatactgtatagtttttttaaagttacacactgtaaggggcatctgggtggctcagtctattgaacatctgactcttaggctcaggtcatgacctcagggtcatgagatcaagcctgacatccagctccatgcagaaagtggagtctacctgagattctctctgttcctctccctttccctctgcccctctcccttgctcattcactcaaatgctctctataaaataaataaataaagtctttttaaaaatattacactgtgcagcttaaatatatgtgatctttatttgtcaatcatatctccataaagctggaagaaaattttaaaaataaatgcattaaaagagaaaatcagaaggacatagagtatgctaaagaatctggagtcggggcagccctgatggctaagtggtttagtgccactttcagcccagggcctgatactagagtcccaggattgagtcccacatggggctccctgcttggagcctgcttctccctctgcctgtgtctctgcctctctctctctctctctgtctctcataaataaataaataaaatctttaaaaaaaaagaatttggggtcaatacataaatattaagatatttaagaaatttataaaggcaagtaaacatgaatatatgtcttaaattaaagccaaccatcataagaactgaatcagtaaatgtaacttccaatctagcaggaaaaaaatcagtctatcaaatggaaagtgagaaaaagaaggaaacaatatacattaaatacaaactctgaaatgagttataaaaataagtctcaatatatcagcagttataagaagaataaactatatatatatttaaaaaaaagaacaaactacgagtcatttaaataaatgcacttaaagtgggaagatatgtaaaggttgaaattaacaggaggaaaagatttaccaggtggcaaatatgacctcaaaaaagttgggcaacaatctcaatacacaacaaaatacatttcaaggttttaaaaaagtgctttgataaaggaccaaaaaaagattcttatataattaaaaagaaacaaggaacagtaatcataaatgtatataaaataaaaaatacagcctccaatttatatagcaataactgaaagaactacaagcagaattgatttttttaattgcagtggtaattttaacaaacccatgtcaaaaacggatatatagaaaaataagcaaatatcttaaagaccagaacaatacaagtatttaagctcagttattaatcaagccttaacaaataagaaaatgaattcttccagattacaaatgactaaagtaacaaaacaagtggctggaatgattctggattgcagggcaggaagcaaagggagcagggaaactatgaggatctttactgagaaagttactgaaatttgaatatgtattgtggctgagaatcgtattatatcaaagtttaatttccagggtgttaccattctcctctatttatacaaaagaatgtccttgctaagagcaagaaacacactgaaatacttaacaggagaggggtttgatgtctgctactctgaaataattagaacaaaacattagagaaacagaaacagaaaaaaagacagcaaacatagaaaaatattaaaaattactgaatctagacaaagtgtcataggaatttttttgtactattcttataatttttcgtaaatttgaaatcactgcaaaattaaaagttttaaattttcataaacagcgtttgaattaaaaccaaaattataaagaacataataattagaactgaccagaaattaaaacactagctatcaaaatttgttagatacaattaaggcagaacttaaaggaaaactttttacctgtaaatatacttttcaggaaacaaacaaacaaaaaaacctacgtaataaaattacctaagcattcaattcaaaatttaggtaaagaggaatagaacaaacccaaagaaaggaggaaggaaataataacgttaagaatagagataacaaaattgagagctaaaggcaattaatggaaacagaagcttgcctttgaatatatatatatatatatatatatatatatacacacatatgaaaagatacatatatctttatatatacatatatatatatatatgttgtatgtgtgtgtatatatatatgttgttctggaaaagagaatgaaaaacaaaagctgcccaactattgtataaaggaatttttattacaagaataaataaggaaatacaagaaaatgtccatgcttttataaaagtaaacacaacaccctaagtaagatattaactaaacaaaaccaacagtaaatacataactataggataatcaaatagggtttattataggaatgcaaagataagtttcacataaaaaaaaatctctctcagtgtaatccccatattaggatattaagagagaaatgtatgtataatgtaacaaatcaatgatgaaaaatgattttttaaatttcataatctacttatgatttttttataaaataaactcttagacaactaggaataaaaaaaattatttaacttaatttagtaaaggttgtacataaaaacctacagtgaggatttctgggaagatggagtagacctatttctccctattcctctcactaagtacaactaaaaaccctggacattatatataacacaaacataagaagactctgaaaggtagagataagaaggcagaccatatgggacacaggacctggaggaacgacacaatggtgagcaatttgggctttctttttcctgatacatcccaaacttggagctgaagaaactaacaacttggaaaggccaactggcataaaacaaagaaacaaaaagtcccaaaagcctgatatgactagcccaaaggctgatatcactagccaacagtctaattatcactagtcaaacatctgatatcactagccaaagaccaggacagaggcaacctatcaagaccagaaacttttacaaaataaactgctctgttccaggcaaacaccgtagaaataactatggccccattcctattcacaccagaaaggcagaatgggatacctaggcttccacccttctaagactataacagggcaccaaacatcaccctgcagtagtatccaaaaaaatcagttggacaccaagaattcatttcttcagaccagtaatgagggactctccccaatacgttagaggaatggactgtaggaggagaactcttacccctgtccaacaatgatgagaatggccaaagttctccaaacacaatgaaaattataaaagaggaatcttgaaacattgagaaacaagaacaagataagcaaaatatatgggtaaatacaataaatcttctcctcttgagttttctaagttacattagatgaagcaaaaattataacagtctgatatggttctaaatgtgtgtacaggaaatatttaagacaattatactacatatgagggaggagagaggtaaggcttctacactccactcaaactggtaaatgatgacacgagtagacaacagctaatgtatgcataatgtaatacctagagcagccactaaaaaatgttatacaaagagatacgctcaaaatgactgtagaggggcagcctggtggctcagtggtttagcaccaccttcagcccagggcctgatcctggagacccgggattgagccccatgtggagcccctgcgtggagtctgcttctccctctgcctgtgtctctgcctctctctgtgtgtctctcatgaataaataaatctttaaaaatttattttaaaaaaacactgtagataaataaaaatggaattataaagtgttcaaataagccacagaaaagcagaaaaaaataaacagaaatgacacagagagaataagtagaaaacaaaaaattaagtggcagaattaagccctagcatattgctatgaattgaattatgtccctaaagtcatacaccgaagccctaacccccaatgtatttggagatagggcctttgtggaaataattagggcaaatgagtttgtagagtagagccctgatctcataagattagtgcccttataagaagaaatatcaggcagcttattcttgttctctctcccactctccctcttgcatatgaaataaaaccagaaggcagccatatgcaagccaggaagagagaacgcttaccaatcatgctagcactctaatctcagacttccagactccagaaatataagaaaataaatttcttttgtttaagccaccgagtctagagtattttgttatggcagcccaagtaaatgaatatacatatcaacaattatattaaatgcaaatggtgtaaaattgtcaattaaaggcaaaaattggtagagtggatttttaaaaagtgagccaaagataaaatatctaaaaaacaacaacaaaaaacccaactcagttcaattcaaatatatgcaagttaaaagtaaaaggatagaaaaaatatattattcaatcattaatcaaagggaaacaagtgagcatactacttccagataaaataaactctagatgaaagaaaattaaccaagaccgtttgggacattttatgataaaagggtcaacctaccaagaagacaaaataatcctaaatgcttacacgtaaaaaactgtgcaagctgtaaaatatgtgaagcaaaaacataaaatccacagttatagggacatctgagtggctcagtcagttacgccactgactctgatttcagctcaggtcatgatctcagggtcctggaattgagcctcgcattgggctccctgctcagcaagaagtctgcttctctctgcccttcagcacctctccccactagtgctctctctctctttgtctgtctctctttcaaataagtgaataaaatctttaacaacaaaaaagtagtaataaaataaaataaatcaaagcctatgaaacataggtaaagcagtgttgaagagaagttatagcatgaaaagcatatattttttaaaaggaaaagcctccaatcaataatctaaagctcatacctcaagaatctagaaaaagatcaaagccaaagcaagcagaagaaaggaaataataaagatgaaagcacaattcaatgaaattgaaaacagggggcacctgggtggctcatttgcctttggctcaggtcatgatctcaggtcctgggatagagccccaagttggactccctgcccagcaggggtctgtttctccctctgctcctgcacccttgctcatgctctctctctcactgtatctatctcaactaaatacataaaatcttttttaaaaaatgaaattgaaaacagaaaaacaataatgaaattcaatgaaacaacagattctttgaagagatcaactaattgaaattctggcaagaccaacaaggaaagagaagatagaaatcactgataacagtaatgaaacagggaatgtcaatacagactctgcagataccaaaaagataataagggaatactacaaacaactctataaatataaatttgagaatttaaacaaaatggatcagtctctcaaaaaagacaaactattacaacttacccaataggaaacaggtcatttgaatagccctatatattgagtttggaatttgaaatttaaattcccgaaaagggaaactctgggcccagatggtttcatctggagaattctaccaaacatctaaagaagaattgacagaaattctatacagtctcttacagaagaggaggaaacactttccaatttgtgttatgaaactattaccctaatatcaaaaccaaatggaaaagaaaactgcatacctatatcctgcatcaatataaccacaaaatccttaacaaattatcagtaaatatgattcaggaatatgtataaaaaaacagtaaacactacaattattgaggtttttccaaggatgtgaagctggttcaaaatattcaaaaatcaatcaatgcattctatcatattatcaggctaaagaagaaaaattatcaaatcaacataattatatcaatcaatgcaggaaaagcatttgattaaatttaatgcccattcataacaaaaacccaggaaaagaatgggaataaagctaacattctcaaagtgttttttcaaaaaagagaaaaaaaaatgaaaaaggcctacagctaacattatacttaatagcaaaatactgaatgtttttcctgtcagacagggacaaggcaagatatccactctcaccactcttatttaagatggtgttagaagttctagccagtaaataatgcaagaaaagaaaaatgtaatcacattggagaaggagaacagaagcggcagcagctcaacctaagatggattatggacttaaatgtaaacgataattttttttaaataggggaaatcttcaggatgtagagctaggcaaaaaattcttagagttgacaacaaaagcatgattaataaacagaaatattaataaactgcacctcatcaaaattagaaacatttgctctgtgaaaaacctataaagaggatgaaaagacaagctacatgatggaaggaaatatttgcaaaccatgtgtccaaaacagaatcagtatctagaatatacaacaaattgaaaattcaacaggaaaaagcaaacactctaattagaaaataggaagaaatgaagagacatttcacagagtaggatacacacatggcaagtaagcacatgaaacaatgttcaacaatagccattaaggaaatgcaaattagaattgcatttgagatattgaaattgaaattgagatatcaccacacacctgttaaaatggctaaaataaaaaaacagtggcaataccaaatgctggcaaggatgtggaaaaactggattgctcatacattgctggtatagccacttgggaaaacactttcgtagtttctttaaacattcaactcctgaatgattcagcaattacaccactgggcatttatcttagaggaatgaagacttatgtctacacgaaaacctatacataaatgtttagagcagatttattcatattatctaaatactggaaacaatccaaatatccttcaaccaactgtgttatatccataccctggaatacaattcagaaataagaaactgtatatttgcaacaaccttgtataatctgtagagaaatatgttgagagaaaaaaaaccaatcccaaaatgttatatactgtatgttttcatttataaaacatttttaaaatgacaaaatacagaaatagagaacagattagcaactgccagaggttaaggaagttgtggggcaatagggaagtgggtgtggctctaaaagagcaatatgagggatccttgtgatgatagaaatgttctgtattttaactgtatcggtgtatcccaattgctatattgtaccaatgctttacaagatgtcatcatcagaggaaactgggtaaaagatacatgggatctgtttgtacatttttttttttacaactgtgtgtgaatctatagttatctcaaataacaagtttagttttctttttttaaagattgtattcatttattcatgagagacacacagagagaggcagagacacagacagagggagaagcaggctccctgcagggagcccattataggactcaatcccggaaccggggatcaggagctgaccctaaggcagacactcggccactgagccacccaggcatcccaataagtttaatcttttaacaagcctacagcaaacattgtaattaatgaagaacatttagttgcatttcctttaacaataatgctcattgggatgcctgggtagctcagcagttgagcttctgcctttgactcagggtgtgatcccaagtccggggatcgagtcccatatcgggctccctgcgtggagcctgcttctccctcagccggggtctctgcctctctctctctctctctctgtctatcgtgaataaagaaataaaatcttaaaaaaaacaacaacacaataatgctcattgtcactgcttctatctggcatagccttagaggtcctggtcaatgctatgaaaaagaaaactaattaagagttttaaggatttgaagggatactctcagagtttgctgatgatgctattacctatctggagagagagggagaatatcaacagcaaacaaaccactgaaaccagcaagagaatccagcaagattgtctcatgtatgaccaacccacaaaaattggttaacttctaatgtttgcaaattctacatatgataaggcattaatatccagaataaataaagaacctctgtaactcaacagaagcaacaaataaaaccacatggaaaaacaatttaaaagtggacaaatgacatgaataggtatttctctaaagatgatatgcaaacggctgacaagtatatataaaaagatgttcaacatcactaatcgttagagagatgcaaatcaaaccccacaatgaaataccacttcacacccattagaatggctactatcaaaaaaaaaaaaaaaaaaaaaagcgggcacttgaacagatatttgcatacccatgttcatagcagcattattcacaatgaccaagaggtggaagcaacccaaatgtccatcgacaggtgaatacataaacaaaatgtgcaatatatatacaatggaatagtatttggccttaagaaggaaagaaaatcctgtcccatgctacaacatggatgaactttaaggacactatgctaaatgaaataagccagtcacaaaaagacaaatacggtatgattgcacttatatgaagtatctaacatagttaaattcatagaaacagaaagtgtggtgattaccagggctgaggaaagagggaaatggggagttgttgtttaatgggtactgaagttcagctttgcataatgagaaagttttggagatttggtgcacaacaatgtgaatgtacttaacactactgaaaggtacacgtgaaaatggttaagatggtaaattttgttatgtttttattttttttttttttttttgtttttttttttgttatgtttttaatacaactttgtaaatgttggttacacttccctacaccagaaatagctgctttgaaaataaaattacaaaatataaccaatcacaatgacagcaaagtccataaaatttcgaagaagtaactgagcatacaaggacacgatatgaaaaagtaaatttcaaaaagcataataaagagcaaacaagttgatctgaatacatggggagataccctctgtttttgcattggatgacttatatttttaaaaagccaattatccccaaattgctgaataaattcaggataacctcaatcacagttctagtttaattttgaggaacttgaaaaccttacagtaagatatatcagaaaaaataaagatccacagttacataaaccttggcttagggcaggggagactagaaatgagtattttctcaggtccccgagcagtaatattagtcttctgttattactgaggtcttgtccctgcatgaggcctgaggccgaagcccaggttttgcatctttctacccctaccaccacccaatgccacaactttggtttctttccttcaagtcaagtcaatgtgccaattgtcctacacctgtccttcttaagatccacatttctccaagccaaggtctgtcccaagcgctggcatgtaggatatcacagtttccagagctctgtggcttccctttgctttcagcctcgctctgagagcagagggaggcagagagcgaggccaggttttaactcctttagccccctctcaaggtcaccttagactggctgtgttccttgactgaagggcactgttgccagcaaggtagtgacactgaatcctgataacccctctaatctcttgcctttttggactttggggtagtgacaggtcagctgctacctccagtttatactgcactaccctctacctacttctttgtaaatacttctttgtaagtagactctccttgaactatcttattctgagtgtgccatttgttttctgttgacgctctgggataatgaaagtcatttctttcttcattccctgcctctgaccagcctggccaagggctcatttgcaatggaaaagtgcaagagaaaggttctggagagtaggtctagtctcccactggggagcaatccttttcggtttggggcctttctgctttctgtagcccttggggattggtgtggcaaaagtaattttcctaaataaacattgagatcagataccaatctttttctggccttttcacatgactatgtacatgaataaggagacaaagagaatctggaatgcaagtgcatgctgtcactcaggaaaaaagcactgaggatacaccctcccatggtgtacttgagctttattccattgcctttatttttttttttttaatttgagtatagttgactcacaatgttgcatttgtttcaggtgtataacatagtgattgaactcctctataagttatgctgtgctcaccgcaagtgtagctaccatctgtcaccacacaacgttattacaatatcattgactatattcctcatgctgtgtctttgattctcatgactcattcactccatgactggaagcctgtatctcccactccctttcacccatgttgcccagccccccagccccgcccctctagcacccatcagtctgttctcttgtatacataggtctgattcagctttttttttattcatgcgttgaggcttttttttagatcccacctatgattgaaatgatatcaaaagaagaacctcaagcttgaggtcaacacagttctctgaagtattgctatctgctccaagggttgaagggactccctgcattgtgcacgccctcatgaacacttttatgggtggagagtgggactagatgaccttaaaagtcaattccaactccaagttcagcttttaaaatgagctagacattgagagaaccatgtattataccacctggattagatataacccaatagcccaactacctctctcccccctctctccctctgtcccggtctctgtctctctcatatacacactcctctttttggtatttgattatgtttaacattctactctccccacacagccccagagctggcctaccattaccctacttctactttctatccaagcaccactcattctcccatgtaaggacatgtagttcctcccttttctccctaatctggcttcttggatcccaggagatctacccagcactttttcctactccttatctggaaggggacagctttccaaacaaaaacacaccaagttagggcagagggaagcctgccaggaacctccagaggaggactggaagctatccaattagctgactctctctttccttcccctggggtcctgtcactttgattcccactgctgtgaccagacccagaccctttggatatgcagcttcttcaaaattagccaggcatagataccacccaaagccctacacagaccagactagcatttcaaaaggaatttgctttgtcaaacaaacaaaaacaaaaaccatgaatggaaaaacgaaaatgaaaccacatacaactttaaacagcaagtttttaaatcaagtcaagcagagatggaagattatttacatgatacacaagctcatccattacatgctatatataaatgcaaaaaaagggaaatacaaatctgataaaattcctagagattaatttctgagcctacatttgccaattagcacagtgcacagcacttccctcttccaaccttatatggccttgctcagagaataatcattttggtgttttttttttttttttttttttttttttaatttttatttatttatgatagtcacacagagagagagagagagagaggcagagacacaggcagagggagaagcaggctccatgcaccgggagcccaacgtgggactcgatccccggtctccaggatcacaccctgggccaaaggcaggcgccaaaccgctgcgccacccagggatccccaagaataatcattttgaattcatgaggaccgtcccctcccattgatttctccagcaaactctttccagaacaaatgctctgatcacaaggttccttctgggggagaccatggatgtaaaggagatcaattcactggttgtacaaaccctgagcacctactttggacttaaagtctgtaagaacttcctatctgtaagtctataagtctgtaagtgcttcccccattcttctgtaggcccccatcagcacagaaacagtccaaggatgaatagtttctagcccccatgaccactccacacacacacacacacacacacacacacacacacacacatacactcatggataccagcacataagaaggttctgcagtcttctgtctcttcccccagctcaccagagtctgactttgaggattcctacatagctacccacatgcaaatgtacatcaataacccctcgttttccctccacaatattccattaggctaaggtgcttcagtacttgtctttacttctggtttctcttccttgcctgaagtctcctgtcccactgggattccaaaaacaatgccacgccccagctttctgtgtccagcaggtgtcgcccctcactagaaacaaaatgcacctctcttctacagtgcaaaatttgtaccccaacagtggatgtcccttggattaggggtaaaagggaatgaaagcatggctctgaagagtggcgtgctcactagaataaggccatctacttacttccagttaaggtagacaaacatcctatatagagaatttgttctttgatcttggacaagttatttacctctgaaccttgctttcttcatctgtgacatggaaggagacaatcttttcctcttggcattattggaagaagtaaatgagatacaaatacaaagccttagcccagcacctaggtcatgataagcacttgagctatgggctcttccccatttagggtatggaagaaataactgcccagaactcccatcccaagttaagctctgccctttgagtcctatctgaggatgtgtgtcaaggctgtgatgaggatcaacaaaataatacacataaggcacttggtccaatgcgtggcccagaaagttgagtaagaggtaataactaccatcactactgtgggctcagtgtgtgccagcaacactcttagccatctgtgagtatgaacacattcaatcctcctaagaccccttatggggcaagtaaactgttagctccctgcctctcccttatcctgtgactccatccaaccacagtttaatttcttcttatgagttacagatcagaagactacccctaattctgtcatgtctagagggaataactaggaggaggtactgactcctccagtcaagtaggagagaattaaccccaacccataactctgctcatgggccttccccagggcctcaggaaaaagcatagaaaaacaacattttcactggagtttattcctcagagatgatcaccagtgactcactggctcctgtggcacagtgtggcccccggaagggcctttaacctccctccccagatgatatttgacccagagatacagccttggacaataacttgattacagaatattcccagcagtgagttccccccaacttgctaaggtctacatgggatgggctgggaagttcaaagatctggatggagaaaccataggatccaagaaaatttgtagggtctgaggatgttggggggacatggcaacatcattaagagtttgaatctcctcactggggtagaagttgtaggattctgcctctaggagacatgttgacctgcaaaagaaatagaaaggagataatgaggcttcaaaccaacttgaccccatcatctgtctctataaccatccatgcaagccatacagtggtatcaaaaattctagatcaccaaggagccactttcaatcgtctccccatagatgctcaatcagatagaagaaaggggtgtaggtgctactattccctgcccctaataccaacaatggcaatttaaattatgctcttggctacatcctggtggaacctcactcctactataagcaccattagctgagcccaacacagactcctgagatctctcactcctccaaaggacctataggcaaatggaccaatagagatgttaccttctggataactggttccagggagaaaaacatagcctaggagaagaaaatgtttgattagaggacagtggataaaagtgcctggcatcactcacagcaaatgaggtagcaatgggagaaccactcaccaacagaaagtgagcagaaactaggagcaagattggcaacaggagattaggggtggcactcaccagaggagccagctctccgccagctgagcaaaccaagagagaagatgatgaagcccaggcccagagtcactccagacacagaaaccttcactgtctgcattggggacagcccaggtgctgcaaaaatagaaacttactataaccaatctgttgctcattgccagagaaacttaatttagtacaacctccacctagtaggtgcaaaggtgttctagcctaataccaagggtctagctcacaccaacctactcccaaggaaacagactttcctcaacatccccatcctgtagctctctactcctagagtagcactgggggacccctctcaccagagttggcaccctaccttccaggtcctctctaatacagtgggacctctcaaggcatcttttttcctttcttcaccctgaagttccctcaccaaagaataaaggactcctcattcccctttctatttaccccatagtgacaatttctgctcccttatgtgctctacctgagtatttgtctattaaaatgtctttccacctttcttaactctcaatgatcccattcatgagttacctgaatactgatgaatcttttcctgtccacatcgagatttccggaacctggctccatcccactccatagctcccacctcctgaaacccattgtattctgaatcccaccccacctggattcctttcccatgctaaaataaatattccatcaccaagggaaactctggtgcatgatgagaagactcccaggagagttcaggtgtgcttgtaggttcctctctctgctcttcatgcccttctcagctgcccagcaagacaacactccccaaagggggagcccagtctcaatagccaggctgggattctgttctctagccctccatagatatccctcttcatttcttccccttctctttccccatatatgtgtaccaaatctcttggtacgtttaattacttccagtcctggggttcaaacagtgctcattgattccttgttcattagcctccaagcatgtaaaccaaagtgtttgccagccatggtttttacttccctaatagagtagcccaaattcagtaccacccccacaccaagagaaagtcctgtttcttctgaaaccttttttattccagtaatgggatgtagccaattcccattactgatcagacaatacaatagttggaatctgaggatcctaaaatgttgtatcacaatttttggttttgaaaacaaggtcaccaaatcatatccccttttcaggacagccatgctgctccctgccaccctcgggcacacataaaacagcatcaaccacaccactatgccatcaatgacagtaactctttctattcctgtatcccatcgctgcatttctggttatcaaccctctaccagttcctccagacttgcttcccattctcagcctctccctccctgctatataccatggacctgtccatgtcactccctgtgccaaaatgttggtgttccttttttagccaccctctcgcagctctctgcttcaaccctaattcctcccacccaccatacacttactccagtcctcacaaacaggctcaggggccccgatgtgctccacaacacaggtgtaggtatcctcataagaaggggttgtagctagatgggagacagtctgatatgtccagtctccattgggctgggccatattaagggcactactgtgagaagggacaggctgcccattcttcctccatgagatggtcacatcagctggatagaagccccacacgtagcaggccagcatcacactctccttcgtgttaaaaggagtggatttggctacttgtacagttggtggtcctgcatagggggaaaacatagtcaggaaagaggacaacattctggctttttctccaacctggtttctttcctacttcaatttttcctggcttctgccaacctaccctccccacccccactccatgcctccacatccctttggaaaagaggagttaggatttactcctgctttgctctttctttcctcccattctttcactgccctttcctttctttcctgctccaaaattacagttgatcacattaagtagaagccagttctgaattgcaggctgttccagaagtcgctgtatttatctcaagtatataagctaacagttgtcaagagttgtaggttgaggtttgtaaaggtagggaaagacatctgctctcaaatctaatttaacaaactaagtggcttcaaatgaagcagcattttttacttcagatagtttaaggaaacgagcctaactcagatctaatgctcttaaatttggaattgtgtaatgcaaatttatggaattgttaatattgccattctctactactttattcgcctagatgaccctcttgcttgcctctatcttggtgctgttcaaaacagaatcttatataaaaatccaagaaattgtgttaaaatgcagattccctaggttgcttcccaaaatattttcaccaagtggatctgtagtgacattcaagggcttgcattattttcttttaagaatgaaatttttagaagattttatttatttatttgagagtgagggaccgaaatagcaagagagagcacaagcagggaggagagggagaagcaggcttcccactgagaagggaacccaacatggggctcgatcccaggacccgtatcatgacctaaggcagacactaaccaactgggccaccaaggcaccccaaggtcttgtatttttaacaaacatcttccctaggcaattctgagaaaagtggcccagaaatcacaccttaagacacattactctgtcttgtggaggtcttcatttttcttttaccaatctcaagtcattctcagtggaagggctttggggcaagaaagcatgttgaaatcccctggaaagctttctaaatattcctatgcctgggcccatcccagacctagaatatcagaacctatgataaagaggcatgagcatttggagaaaaggcattctggctattcttacacattcctggttgaacttaattctgcatcctgagataccctgaatagaaggaaagcatgcttactctctcaatagctccctagtggcctctttattcacccatccccatcaacaaccttttgagggtcaacactcactctttctatattccgggtccatacattttctgcttgtttcctccccaaatctcaaatctcttacttatggagggatggagcgatcctccctggcctccctcccctttccaactgtgcttcccaatagcccctttgcacccctctctccttacgtgttctgtgggtcagtgatccccagaaggactgggtatgtgtggcacagtcctggagcccattagacaagcgctggtgcaggtattcctgttggttgaggtaatctgagaggtaattggccaagacattcagtgtcccaaattcataagggaccattttggcctcatctggatcccagcaggtcagcaaatccttattgaaggagacacaatatgtgaaatcctttggagtcccatcatcatccaacagacaggagctttccacgtgagctataaagccacctacagaaaccacagaaggacggcagctcaaagacctctgcaggaagcccaagcctcagttacacctaatgagtggggtgtagttttcctgcctcaggtagcatctagagaccacactcatgtactggagtctctgagagcacaaattaagggaataggtggtagtagcagagaagttttcagatgctatttcctctttatgagactaagtatgggaacaagaatagaccaaaattattagctagttcaagcacagcttacccaggacaaggccatcagtagagcaaattattgaatgagaaaggggtcaagagaaagagtcagctttgttgtatgctgtatatattaaatattcactccaatatatatttatgaagcacacacacatattatgtgctaggagctgaggatgcatcagtaaacaagacagatattgcccttgcccccactccaggaaatgatatgtattacacaaataattatacaagcttaattatattaagatcactacaaagatagaaaggtacaaagtgctatcagagtacatactagagagacaaactagtctgggatgtctgaatccaactgacccccctgtcccaaaggagcagaggaagggaaggtcccaggcaggaaacccttaccttctccggtagagcccagactgaggcccagcagcaatggtaggagtgtggtcatgctttgctctaggaacactccaggaattcagtcccctggaccagttcttccagggtccttgggtcctcgcctgctccagtagcccagcctgggtagatgttctccagaccctgagtggaataccgtattgccccggctccttgatccccactaaatgaatgatttggagccacccatcccctagatactaaacccgttccaaccacctcttctaagtcagtcccaaactaagagttgtcagattggttagagaggcgaggacaaatacagagacaaatcgctgagtgctttagcctagcatcatcagttaccaggtaaatcttatcctgccttaggctttaaacaactccttctcttaactctttccctgtgagaaagaccagtctgtaggtggatttccttaatcagtgaaaagaataatcccaatattcccagaacatttgtaacctgggcagcccaatggtttaactgtttcctttcaatatccttccaaaagactgggactagataacttctcttgtcccttagagtactcagattttgagcaacccttggtctgtcctgttacctggagatggaggtgggatggtgaaaggcccttccggagctgtggcagagccaggaatactaagatggaaggaggtattaggagagtacagagttatcttgcctcaaaacacaactgcagaataagggaagcagctccactttagaggttggagacagactggaaaatccctccctgggattccattgctttttttgttctagccagcagaacttcgtttcatcctttctgctttttggagccaggaaatcctatcctccaccactctgagctatcttagggcagaccacaggacaactccacttaaacccttgataaatagctggtaatggatcagttcccgaagctcaactgcctccccaaactcaacattcaacagtgtgtctctcccactgagcctatctgtcccagagcaggtccctgcatatgaagccactagaaaaataagacctggaaaggcagattttaactggcaattcattctcctattccactgcgaagtatatagctggtggctttttctatcacaaacttaaaaccctaaattggcttctctctattccccagtggcttcagagctgtgtctcctcaccttagtttctgcaagcttttggatttgatttagtagtgagctaaatgaaagaggattaggagacccttgataccacacttacctgttctcctccccaaagtccctaatctcaagagagtcaatatttatgaagaaaaagaagcatgtaccaaaaatgaatagaaagatgaaaataagaaacaaaagacttgtgtaactaatcaagattaactgaagtcgtgtccatgtttcccagcacccccactctcaaccctaccttcattataagatgtttctatactctacttcctcaataagccatcaggtgagctagaatgggcagaaaattgggtggtgggtccaaaatgtgttgagcttcaactttggaactgatactatactaggtaggcccttcccatgtcatctcatataatcttaaaagacctaagtgtcttcattcttacagttttgaaaacaggtccaaagattcacacacaggtgcacacacgcaagcatgcccacacactcactacatcttgaggctgaggtgacccatgtaaaggtggccagcgctgacctccactgagagaaagataaagggaaagccacttgatctgttcaagtcttagcttccctgttctcagaattccttctgttcttagaacaagtgtctcctggctttctcttttaacagtttcaaaactgtgcaaactcttccccccaaccatctgcatacacacacttcccctttacattcttcctcctccccctaggtaggcggtgagcctaaccttgcaggaaccagggcttgggatccttttcaatgtctacaaagattgcactggcacaggaatgcatgcggtgaggtcccgtgcctgcacagggttggccacctgccagggagctgaggccacgcagagttccctcttgagtctgagtgtctgccccggcagccaaaggagatgtgaaactatttgtgaggcagcagcaggaaatgcagaagatttcacttctctattaataagaagactgagagtactttttagaataaagcaagacagaaaacccagagacctgtgctcagtgatttcttcattctcctcttcctcctaattttacggacataggtaacccatcaacccaaaagaacattttaggtgccctgtccattgtgattgaataactatttctgtagtgccaggaccaccaggaccataggaatgagggagctgtagccgcgttcccacatgctgtccctcttttactggcactacccaagctccaagagccagtcctctcctttcacacacctctccccctgggctgttcaccacgtgccacaagtggactaactatggtgttcctgtgcagagcattacaagaaatacccagctaggagatatggactctgcccccacgccatttgcttttaggtcaattggtgaataagaaaaaacatttgtaaagagaagagttgatgttaaagcaagtaagcaataaggccagtgtacttcaaagagaaaagagaaaccattgagggcatggtggacagaaagtcctctccactgaggggtgctggaggtgagaaccaaatactgggctgaagccacgtccagaagagaaaggcagttggcatcgcagtcctgacatataactccacaagcttggcaatgttatgaggtgctgctgggggtctaccagaagcttggattgactaaaacaaaaaggaactacaataacatcatgggcatcacacactgaaggaagtcacaaatgtggtctcatgctcttcctgagagcatggacctaattataaatcccttctaggtacttccttatgttgctccctgtaaattctcaggttcctcttctggacagatggttttaactcaagcctcaatttcataaactcaaaaattgttcaactcatcaatcatttgtgatctgcaacctgtagtgtgagaccacatttgtgacttccttcagtgtcttctcaaagaacagtgtcttctcaaagacctgcaccctgccaggatttcattatctcccagtctgtccaacctcatccctacccacccccacctcacctctgtcctcccactctctcttctctatgggattcactgctccagaccctgaccttggggttacagttgctctaactagcccattatccttccctcctgcagccgaatgacttgaacggctagggaatattctacctcctttgctaccgcaactcttgaataatatcattatctccatcttaactatgataaaatggaggcagagggaggtcagcaaccatccagatttatccagacatgaatagaaccatgatttgaactgaggatttaggattctaaaatctatactcctaataatcagttagaaaacaactgaacattgctagccatttataatagtaacaaaaaccataatgtgtttagaaattaacattaaaaagtataagaactttatgaatagaagggaaaactaggggatccctgggtggctcagcggtttggtgcctgcctttggcccggggcgcgatcctggagtcccgggatcgagtcccgcattgggctcctggcatggagcctgtttctccctgtctgtgtctctgcctctctctctctgtgtgtgtgtgtctatcatgaataaataaataaacaaatctttaaaaaaaacaaaagaagggaaaactttattaaagtacataaatgaacacctcagaaagtgaaaacatattcatggatggggcatcctaacataacaaggaagttaatttcttcccatatcactaacctaaatgctgtcctaaccaaatcatagcaagatttggggagaacttggcaaagtgattctaaaacatacatggaaatcaaatccatgaatatcttagacaattctgaaaagaagagcaaaataggatttagggagaggtgaagtgatagagaaatgaaaccagccctgccaaatattaaaacacgtgaaaagccgtaataattaagacaatatgacactgacataggaactgacaaaacaatggactgaataattcagagacaaatccatacatatacggaaatttggtataaaatccctgggaataaaaaataaaataaaataaaataaaatccctgggaataaatggaatatttagtaagtgatattaagaagatcaatttactatctgggaggaaaagaaagttgtgtccttattcccaacatatagaaaaactccagagcaaaaaatatctgaatgtgaaaggaaaacaataacatgaatggaagaaagcatcgtgaaatatcatatatggccaaataaatataaggcaaaggttttccacccaaaactactcatcagaaaaaaagacaattacctcatacataagtcctcaggtttttttccttttcagactaggaccactctttcaaagctgtttggagaagacacattatcctaaaatgatgtcaataaatataagaaggggactccacactgttttctatagtggctgcaccaatttacagtcctacctacagaccacacaccggtcaacaacaatatggagattcctcaaaaaattaaaaatagaactgccacattatccagcaattccacttctgggtatttattcaaagaaaatgaaaacactcactcaaaaggagatatgcacccctatgttcattaggcattatttacaacagccaaggcatggaaatgacttaagtgtccattagtggctagatggacaacatatccatatggctggacacacataaatacacaatgaaatgtgattcagcctaaaaaaaaaaaaaaaaaaaaggaaacctttccatttgtgacaacatgaatggaacccaagggcattatgcaaagtaaaataagccaggcagagaaagaccaataacataatttctcttatatatggaatctaaaaaaaatgaaaaattaaaatagaaagagttcgggacagcccgggtggcccagcagtttagcgctgccttcaacccggggtgtgatcctggagacccgggatagagtcccacatcaggctccttgcatggagcctgcttctccctcttcctgtgtctccgctgctctctcgctctctctctctctctgtctctcgtgaataaataaataaaatctttaaaaaagaaaaaaagagttcatagatgaacaggttgatagttgtggggggcagggaagataaataatgaaatatttttggtatttattttatttaaagaaagtatttttaaaaataaataaagaatttggaagtcattcacataatcaaaaaatacacaagaagaataaaaataaattcatttggggtgcctgtacagtgctgtaggttgagggatcgactcagttttggctcaagttgtgatctcaggatgttgagatcaagccccacatggggctccatactcagcaagcatggggtctacttaagacactctttgcaaattaattaattaattaattaattaattttaaaaaatttttaaaagacactctttccctctgtccctcccccttgaacacatgcacatgctctctctctcaaatcttttaaaaaatgaaaataaatttgttttatgacattcaagtggaaacagcaccatttttatattaatacattgagcaataaaatatgtgattttaatctcatgagttagtaactaaataaagatagctagcagacgttttactaacttctacatccctcaaattttatatattgaattggtcaaaaaacttctaaaatattctcattgagaaaactaagtattggggctcctgggtggctcaggggttgagcatctgcgttttgttcaggtcctgatccccaggccttgggattgaatcctgcaatgggctccccgcagggagtctgcttctccctctgcctacatctctgcgtctgtgtgtgtgtgtctctcatgaataaataaattctttaaaaaaaataaataaaactgagtatcattttatcactttatattccagcaaaaattgtaactttactgccttggggttgggaaggatttcttaagattataaaagcacaaatcatgaaggttctgaccgttcgtcaaaattaaataattctattcaggaaagaaacatatacaaatttaactgataagcagcaaactggaagaaggcatttgcgatatttatactgacataaaattgttacaaagactatataagaaattcccacgaattcacaagaaaatgcaattttttaaatagacaaaagatatgactcagcaattcacagagagagaaaaccatgaaaagatccccgaccacagtagtaacacagtagtaacacgaggaaggcaaattaaaatacacccaccatactgccatattgccaacatttgaaagttaaataatttcaagtgttagtgaataaatgaaaatgagacccaccttccctgttgatggaaggataaattgtttataatccctgaattacttaaattacaaactagttaggtgaaaaaaattaacatatgaaacaaggcagtatatccttgaaagcagtctggatcaaagtgcattaagtcttagtaaagctcaataaagattatttaaggctgcagggagggcacttggctggctcagtcataagagcatgcaatgcttgatcttggggctgtgagtttgagccccacatcaggtgcagaaattacttaaatttacttaaataaataagcttttttttaaaaaagtctgcaggatgagggataagttcatggaagaagttgaatttaggtgggatctatagcattggttaagctgggaacaaggggagcagaataaagaaggaattacagtgagaggaagcctgtgtgccctaaagagaacacagacacagtacagtcaaagaagagtggtgaaaccagattcattcaagagtaaggatacctgttgggaagggggacaccagactagagagggtctttagtgcttcttgagtatttcaagtgacagtatcatagaatgtttgaccagagagcatctaatgtgaagcccatcattttacatatgtgggaattgaggtccacaaagggggtgtaacttgtctaaggtcacacagtgtaataaacgcagtctgaagacatgactggcaagaaatttctagataagttggagaatagataaaaatcaggaagaactacaaaggagtaagacacatgtagaatggtaaagagaaaagaaaaataaaaatatctcaaagggagaaaatataatacttgaatgtagattcgaagtaggttccagaaaaaaaagaaagaagtcagtcatgctgctaagtttccctatggaaatccttgctcaattattgatcagcttttccatgtgccaaacactgttctaaagcattctacgatattgccttatttaggtttcacaacaacacctttattatcatccttttacagaaaataatgccaaggcacagagaggttaagtaacttgcccaaggtcacacagctgaaatttgacagtcaaaattgaatccttggcagcctggttcctgagcatactattaagcagtaagcatgctgctattagaaatgagatgggggaggggcacctgggtggctcagtggttgagcatctgcctttggctctggtcatgattcccaggtcctgggattgagtcccgcatcagtatccctgcagggagcctgcttctccctctgcctatgtctctgcctctctctttatgtctctcatgaataactaaaaaaaatctaaaaaaaaaaaaaaaatgaaatgagatgggatagaggaggtgccaactcctaggaattggatctttcccttagattctggtacaatgtgaaaaacagagactctctgaccaataccaaaataatttcactcttaactttaatgccaccccctcctccaaagtaacccccagaccctaaagaaagcaagaaaaaaagagcatgcaaagtaatttaccaccagtagtcacgtgtcccctgcccccactatctgctcagggcagcaccaccatagttctccttggatgatccactctggccaaagaacaaattgtttggagggacacatgaattgtcccttcaggctgtttcaggagcttgaatatacggttttcacagaaacaacatgattcagttagaacagcatttgaaagcttatttttcccattcctgacctcccattttcccagctacagtgaaggttgaaaggagttatatatttcccaaggcagcttatactagccataaacatcttcacaaacagtaaaatgaaaaaaaatatccgcaatcagcttcctccacggttttgtgagcagattatcagaaaatagctctgccttcatttttcatgtattttgcacaaacggagaggagtaaaagccattgtatggtgctgagaccagggaacaggagtcaactgagaagctaggggttttcccatttccctccctaatgagggcaagctgcattcaagttaaagcaagttgaacttgaaatgacaacccatgcaatattaagaaataagatttattgccctgaagtgggaaggaatgtggttgtgataagtaagctgttctgggtacccctgggtgcaagtccagggacagtagagccccagctgagaaacttgtacacatcctcacgcatacactcccagaggcgtcctggggacttctgctctgagaaagggagatcctgggcaggatgccagaaacgtgagttcccactgcatgcatggttgaccctgctggcaccagattctggtcaggaactatcgatctgaggagagagaaggatggaggaaagccatcaggaggaccccccctcctccacaaaggcctctccctgcctggtgcatatcccatacaagttgatctctctttggccccaagttatctccaagcacccctcctatagttccccatatcactcctctcccactcaaagccatgcctgtgatcctataactgtgtgtatgtatgtatgtacgtaactgggattccaaccaggaggatgtccatggtgccgacacaggcctccctataccacaggatgaccttgggcatgcccccacatgcaccactgtatgtggctcccatggtttgcccacccactccagacaccccgatgtaccatgagcaaggctttcggaagtacacgatgaggactaagccaacaatgatgcccagcatacccaggccaaaggctacaccacacagcacattctccagaagatcagagggcagcgcatcatggggcactggagaaaaagaggagcaagtcatcctggagccttggtcggtgagtccccacccaggggaatgacttggggggcagggattaaacagaagaaacagaggcatgaaaaattgaagttgctcagggtgagaatggacttaagcaaagtgcaagtagagaaagaaagccctcccatgggtccatccttttttgtccccaaaagaaagcaggcttccaaggagaaatttctcaccccaataggcaattgccgtgtagttgtcaatctcatgagtcaccacgcaggagaaaagatcagagggtgccggtgtaaagtttaagtaagaaaaggcctggaagctgaatccatcaacagcggacacaaaagtgggcccgattccttccacagggtccaagtgatgccaccagttcaccgtcaatgtgggtgggaagagattactgataaaacagaccagcatgttgggtttgccaaactccaggggcttcaacgtgaacacgtcgaccataggaaaccctggtgggaggattgaggtgtgagggaaagaagtaactagtttacatggtacccctgagtttggaagggatgtggtatacagaggggagtgtagagacagtgtcagtgggaatgggctttggaaggagagatgagggaggagcttgggctctgacggaggtcttcttccaggcaagtaccagaccttgactagaggcagagctagatccaggctactctgggaccctccatcgtgacttcctgcagcacttcctgtctacagttcacaccatcatctaatcacatgctatcttctcactgaagcacaggcacatcattagatacttcctttctccccttccatcctcctgagcatagcaacacaagctctaatattccgtaggcatcaactagtccctattgcattcattaaattcaataaacagttctgaacacctactatgtcctgagcacaagtctttgtcccacaacaaaaacagagggcagaccatagctggtaaggggagacccagacgacattagaggaggggactggtgtgaaagggaataattcagtgtacaggttgaggaggttaagaatgtagcccctctctctgccccccgaaacacccctgacctctagacacagggatttgcccttcaagttttggtcctatttcctcaatcatagcttggcagaatgctttgtcaaaggaaatggtgggcatatctccagacttctgagcccagtcagcaaattcaggcaggcgaggcactcgagtgttctgggaaaagttgaaggagaaaagctgatccccatcataggcttccaagagtccgatgctgggactccagttctggcagtacatcgtgtgcaagaatgtgtggttttgcagttcatcccgccatgctagagtaggagctgcaaaggaaacaaggtaagtcaggaaggtgggagtgtcctcctcctccttagcttagaagacagcaaggcctgcttcaggcagaggggtaggattggggtgtgaccccttcttgtgtctgttatttaggctctccctcccaataagggtgaagaagaaatcacaggatctctccaaacttcccctgcccataaaaaggccaactgtctaaagttgtaaaattaaaaaaaaaaaaaaaaaaaggtctaaagcaacaaatttggagtcacaaggttgggttgcctgtttgcgtgttacatgaggaatctggccaaggaagtaattgaaagttgaaatctagcttgcactccgctcaccaagcaagccacatggcacagggctgcatcctcccaaaaaagatacttttgtctaaatcacagaaggccactatgttaacttgtgaagggcttcgatgggttcccccaccttagaagggagggtaaattaaggaatggtcatggcctccccaagccacacatgacactgccccatcttacccccagaaaacatggttagctaaaaaaccaatctccaggtttctcttcagctgcttcatcagcaccagacctctctgaaaacctcctcatctccctcagccctccagcccctgcaatgtcaggagtgggaggacccaaagttgtaggcaataatatctatcctttggaattcctggcaagaatctccccacacacaggagcaggaaactttctatccagtactcaatatctagaataatagatatttagaggaagaaggatcttcagattattcatccattccacccgtcctttacaaggaaggaaactaaggaccaataaaagttaagagactttcaagaaccacaaggtgagttgatgacagagtgcagagcagatacctaaataggacagtaacataatatttactttgttcaaatcccagctctgccactttccaactgcatgaatttgaatacattaccgaaagtctcttagtctcattttttttttccatttgtaaaatggatataataatctctttcaagagattgtttcgagtgcaatatataaagcacctctgacattgtttggccatccatccatagttgatctctttcccaattctgctattgtttccactactccataatacttcctgccacttacaaagcacagggcttcaaatgcaaagaagacttcaaatgctctgggcagttcgctaggctctgacctgtcaggattgaagtaaaggcgaggtattgtcataccttcaggggcggtccgggagtagggcagcagccacaggaggtgtaacagccttagcagtgcagctccctgcctctgctcatgatccatatcttcacaccacaccatgggctaagacctaccaaccagctgacccagggccccaaattccttccccagatcatgttccaccagctagttccaatagttgcctttatcacttggttaaaccaatcacagaagtgtagggtttaacatcatcagttgctggggagagacacagtgccagcaacctcttctaagacttggctctttcaccaggccagagtcgggtgtgtaactgggctgggaagacaatggagggatgtctgcctcctgctggggatccctctgtagtaccaaaccgtcagcttaagctggtaacctaggcaatgggctcttcagagcagcaccacctcctggcagttggctgcagtggggaagctcctcttcccacggcaaactcccagggctcttcagaccccgcctcctcctccctccagccctccttcctctttttctctctgagaggtgttcttcgggcattagctcaatttcattctgcagaaatacatggaaaatttaataagtactagtattgggtccagtgctagaaatacaaagatgaataaagggtattcctgctttcaaagagcttaaagtctagttggcggggtgggggagtcaatgaataaataattacacaacaatgtaatgtttccaacaagaatgtgctcagtgttttaaaagtattaactttatgaggatggaacataatccaagcttctgagaatcttgaaagaaaaacaatttgaccagcagaacctgaaggaagagaaaagcattctagggcaagggccaggcgaatatgtgaaggcaaaggcattcagagctccttcccttggagacatctgtgtggttggatgtgaatggtgtggagactactgattgtgtccctgtttggtagtagtgcatggaggagtgtcaagatgagctggaaatttaagcaagagccagatcacataggccatgttataacacaaagagggtctggcttttagaggtattaaaactgaggagtgacccaattattttaaattttagaaaaactggtcttcaaaaatttcaaaggatggactggagcttagaaaaaattgagctaaaactgctggtcagagtctatattacattacatcaaaataagttgcacacacccacataccactctttttttagcaatatagcaataatttagttgagaattgataagaacctgaattaagtcatgaacagaggcaatggagggaatagaatattgagataattaggagacagaatctaaagggcttggctactgattagccaagcagaggagtcaaggccaacactaagatttctagattagctggctgggtgggtagtcagtaatgaaatagaaaaggagccaaagaagcagatttgatgaagaagaggatgagtttagtgttgtacatgtagaatgtgagatgccagtgaaagaaccatgcaggagacatgaggtatatgggtatagaactgaagcatgggctgagaaacctcaatttgggagtcatgagcacaaatgttgaagcagaagcagtggataagatcatgcaagtagactgtgcagacagaacaggaagtggcatgatgtaagtctgcatggattccaaccccaaccctcttaccagttatcatccaggatctagttgggaatatagaaccactctaggtcttccagactcagggaatttaatacaggaaatcagtcacaaaggtgttaaaagggcaagaagtacaaaaaggaaaaggtgtctggaggcacaaatagaggaatatctagaaatcagaagctattcttcccctgacatggaatccacgtccatgcctgctgttgccctgggactgacaccatcatagctagttctggatctgctgaaaaggttccatcttcttcaaggctggataattgagaagatgctttctctacctagaaggcttacgtccggaatcacccattcttactgctgccatatctaccagcaactgtcactctgttagaaactaaagcaggaagcttctcagtttcccctgccttcatatcccttgccagtgcctcctattgggagaatataatgggaagccaaccagctaataagcctaagaagtacatgctttacagacgccttggccaagcagttcagaacacagtataggagggcaagcctggcactaacaccagaaaataaccagtacatggacatggaccaatttgtagagatttggtgacaccaggagcatccagatagccatgagagctaagagaagaacaaggaaggagcagattcagagaagcagaggtgttccatgaagaaggacaaggtcagcattataaaatgctacccagaagtcaaggaaggactagaagtgtccttagatttggcaattatgaaatggttgacaaatgtattgagagcagtttcagtgttgtagtgggagttgactccagattgtggtgggctaagaagcaagtgggaggtgagggagaaaactgtcacagtatatgctgggaagtctaatagagaagaaaaagagagaaagacagaagggatgggggaagaagcagtgagaaacatctaatgtggcaattaagtaaccttagaaatcaatctatgtgaatataatccctcagtatctcagactttcaaaatccatactcccctttgaaaaataaatatcagcagcaataatagccaaaacccaaaacaaccccatgatctcctggatattctgaaacactaatgtgtatatatgtgcaagcacatatatgagtttgtgtggtggggggcaggcagagtggcaaggctggagtagggtttggaaatcattgtgttacgctccgaaaaacagaacattttcccaatgtcccactctttgtagacttatccatcaacagttcctgcagtgggaagattcaggccttttagggcagcagaaaggaagtttatgacatcatcaggaccatagggggagacatagtgcacacagccacctagaatctaaggcaggagaatccgaaaacctctgtgaaggatcagataggaaatattctaggctttgtgagccattcatctctgtgttatgcactcagctgcaagtgcacaaacagccacagacaacatgtcaatgttgaaagagcatggctatgctggattcctcccagcttcctcccacacttcctgggcatctcctcagtctccttcgtggaccactttctttcagtcattctgaaaacaccatttaggtggtgttccctggagttttgttcttaaccttttttttacttatggacactggaatttaaatttcatacaattttcatgacatcattctttcgcttttcttccaaccatttaaaaatgtaaccatttctcttagttcttgggccacttaaaagatggtgggctggattttgctccatactatagttttctgaacaccattctctgtatgtggtcagaattgagatggggactcaaaataaaccaaagaagggctccatttccccttgggggtggctattgattaatgattgtggcccagataggacagactgtttggaaggaggtctgaggggacatgaggaagaagactaggtaggaaggctaggaacaggtaaagcagtcactgcaactactctgcgtgagaggaaagaaataaaagggtacaagttcttcacagattagagtgtagacaagatcaaggtgagcagatatataaccacccatcatcaagactctggccaggtgtggtcaactcttctctcccagtaaagagtaacaagttcaaacagttaggactatccttccctctatgcaatcctgtcagtactcttcaacaagttctgtaacagatatctcaaagagtctctaattagtttgcagaagtaattgcatgcgagaggagcaaggcaattggttctgtatcccagtaactcactgtatattttggtcattaaataggaatgtccctgaaaataatggcacctgtgaatctagtagctcatggctttctaacacagctcactcatccctttctagccccatttatttttcctagaaggccaaatttcctgaaaagggcatgggtttccatatttccatttttatacttgccatttatgctgtaactctcaacaatgagactgttcatcaatatttttgagttgttaaatcaaatgaactctttgcaacatttgacactgttggccatgccctccttcctaaaatggcctattttttggcatcatgaatctctcctagtctttttgctcctacttctttggcgtcctcttctctgtcttctttgtggactcctttcttaacagctggtgttccctggagttttgtcctcaaccttttctcttctcacatttgtcctggatggcatgccttcagatgcctcctatttgctgatgtcttccaaatttactccttgagctcagttctttccctgaatttcataccacccatatactcaactgcctttcaacatctccacttgacctccacagcagttctcaaactgtattctccacaaaagtgtccctcaagaaattttttggactgtaaacttgatagtagcaattttttaaaagattttatttatttattcatgagagacacacagagagaggcagagacataggtagagggagaagcaggctccccctccccctgtccccctgggacagatcccccagtccgggactctgggatcacgccctgagctgaagacatgctcaaccactcagccacccaggcgtctcgatagtaacaattttttatttttaaatttacctcaacacagaggtaataagatgccaaacacataataatctcattatgtaatcatttattatattgaataaaactcttcgagatgtaggcaatagacaccaattctggctaacttaacttttaaaatggcaatttactggaaggatactgagctaaattcataaatcaaagagaaatggatagtctagcctcagaaaggaaagcctcaggggtctagcagcaaagagctgagctgctgttaattacgcctcacccttaaagacctccagccaccatctcccaagtttcacattgctgggagagatgatctgattggctcagcttgtattagtgtgtatctctggatcaattagctgtggccaggcacaatatcacccctatgtatcacagttattcccagagaagggagaatcatcatgaaccaaaaaccacctcaatacgctatcttcaacagatgacatgctggacaattgcatgacatcatctgagacattaacacaaggttaaatctgtgtattaatgctcagatagcattttccaactaactgcctgagtgatatatgtcttccacttgatctctggtctgtcacaagtcttggcacaaattcgaaacatactcataatatgattcagtgttgacttagtaataataaaaattttacattccactaattgatttcttttagatctatgactaaaatatatatatttttaattttatggtgaaaaatttcaaacaggggcgcctaagtgctcagttggttaagcatctgactcttcttttcagcttaggtcacgatctcagggtcataggttggaaccctgtgtcaggctctgcactcagcagagtctgcttgtccctctctctttgctcctccctctgctgtcctcccacctctatctctaaataagtgaaaactttttttaaaaatttcaaacaaacataaaagagaatataataaatcctcattttactctcatgagcttcaaccttctaaaactcttccattcttgtttcatctattctgttccatgtcctttttatctattctgttccatgtccttttttttttttttttttttcttttcttttctgggctattttaaacaaattctgccattatatttctcagataacttttcttttaacagaatacaatactattaccacaaccaaccaaattaaaaacaattgtttaatttcatttaaaccagtctgtgctcatttttccccagtgatcttcaaaaatgtctaaattctaaatgaaaagcagtgtgttatgatttccaaactgcattcatttcaaaagtattgacaagttttttctttcttttttttttttaagattttatttatttgagagagagagaaagagagggagggagagagagagaatgagcaagcagaggggagaggcagaagagagggaagaggagactccccgctgagcaaggagcctaatgtgggggggggacttgatcccaggatctggagatcatgacctgagccacagcagatgtttaaccatctgagccatctaggtcatttacattaggtctcaaaaacctctgttgatggttcaataaagaattctaataggcaaatgaagtctagcaattacaatcttgaatacccttccatctcaaaatttacaaaactaagctcattaccctccttcccaacaagttccaactcctatattcaagacctcagtaaataacttgactatccaatcaatcatctaagccacaaatctatgagtcaaccttgaccacttcatcttcctcaaatcttctcatccaatgtttagcaagtcctatcaattctaccttgttaatatctcttgcatctgtcctcttttcttcccattcccactggctcaggccttcattgatttgtttgcttttccctggattactttaactttcttcttcttgatctgtctccattcttattttctagtgctgccaaaggaatctttttattatgcatatttcatcacatcatactttggtacaaaaaccttcaatgattgtaatctgcttccttagtatgatccttaatgacctgaactccatttaacctatgtctgtatgtcctttgagatgaaatctcacttccctcaggaagccttggaacctggaacagggattagtggcttcttctgtatgctgccacagctccctgtgcctgccattaccatcatttttcttgtactactctctctatatatgtgcttcacagtcatctcaccctcactgcaagatccttaaggaaccatgtcctattctttttttttcacactcttagcatccaccaagaagatacaccaacaagtaactgttcactggatgaatgtgtggtgttactgaagatgatgaaaccgagactaaagagccctcaagcattagatgaatgatagacaatcccttcaaacagtcaacagtaggtcttaccagtcatgcctataggctaccctgcaaatactttcacctccactgccttccctgtgcaacccaccattctccacactcttcccattccattctaggtccttcccaagctacatgccaactgccattttcttcctactcccttccacctcctgtttcagagagtgaacctagtcatccatctcccatttaccctcattcccagctcaatatctcttcacatccacgaatgaatgttcattctttcttttagctactttattaggatgtagcaactctgtcaactacaaggttggaatttattattccatatataaataagaaaaccatggctcaaagaggtttgtttgtttatttatttatttagcaagtatgtattgaccaccttctatctgcctggcaggatgctggacaccagacacctaccatcatcacacttataatctagtgaaaatagagatattaaacaaatctaaaaatgcaaattataaaaggaagggaaaaaaactgagatctgttagactaactggaatggggaacctaatgatacggagatgagatctgaagggtgagtaggagttaggcagagtgggaagaatgctcctcttggagggaacagcagtagcgtaagccatgaagacaggcaagagactagctagctccttcaaggaagtgaaagatcagtgcggctggagcataatcagcaagtagaagatggtagatgaggccagagtcgggcagaagcaagaccacgtgggaccttgtggaccacagggaggcttgagcccccttctaagcatagatagtcctgagattgcaactactttattccttctcatctcacatgtgaatgcatgctagctgacctacctccagtctctccgaacccaatccatggtgcatcctgttgccaaatagatctccctataaaggtagctttcacttctcctcttagaaaagttaaatagttcccttctttctactatattcagtctggattacttggcctgggttttcaggttgcccatgctctgtattctttttttttttttttttttttttttatgatagtcacagagagagaaagagagggcagagacacaggcagagagagaagcaggctccatgcaccgggagcctgatgtgggaatcgatcccgggtctccaggatcgcgccctgggccaaaggcaggcgccaaaccgctgcgccacccagggatccccatgctctgtattctatccccagcttacagaaactgctctcaatatcagtaatgacccccaattaccaacccatgagttttccttctttgtctgcagaatatcactttctcattcaatcagaacaaggttcttaacttgcagttccacaagccacaaaattcaggggtcatgaacgtggatggaattttttaaagtcacttttatttccaataacatcaaactgaaatttaagtttaggaatgtagaaagcaaatctttgtagtactagcagtacctgcaatgttttcatcaatagaaatcaattaatattttcatgtcacatacagatatctcaaaatatctctataatttaataagttgttagacttgccaataaatcattttatttgttacttaagaaccacatgtattatattaacatggaagcacatattactggatcatcacacacttctttaaacataattctgataattatgtgttttatttatacgtttacaaatggtattgtcaaacaaggtcctaaggctctagcagactgtcaaagaagtccatggcacaaacaagcacaactcctgattagtcatttattcaacaaacatgaagcccttactgaggccttgtcttgttctggcatcttcatattatgtaattttgcttttctttcttgtttaatactcttccattggttctacttcctattctgttccctgaataaggatctaacccaaagttcaatcttcgactcaaaactaaattctattttatacttccttataaatctcatctacctgcatgactgaatcaaacatcaattcaaagatgactcccaaatctacctcccctgatcttttttctcaactttagtcctagatcttaaactacctgctgtgtttagcaaccagaaaaacagatcatccatgggcagactacttgggttcacatcccagcttaagatcacttactaaaagtgtgaccacaagtaaattatttaacatctattgcttcaattgcttcatttgaaaaatggggatgataataatagcatctacttcataaggttataagaaaggaattaaaagagttaatacatataacagcactggggcacctgagtagttcagttggttaaatttcagactcttggctttggctcaggttatgatctcagggccatgagacctagccttcattgggctcgtgctcagcagagtctgcttgagattttctctccctctcatctcccacccctacaagtgttctaaataaataaataaattttttaaaacattttttttaatttatttatgatagtcatacagagagagagggagagagaggcagagacataggcagagggagaagcaggctccatgcaccgggagcctgacgtgggattcgattcccggtctccaggatcgtgccctgggccaaaggcaggcgccaaactgctgcaccacccagggatccctaaataaatttttaaaaagaaaaaaaaatacatgtaaagcacttataacagccccaaacacatttcaagtattcaacaaatgtgagctatcaccggtctcatctcctttcaacccgacatttgtattcggtgtttattaacaggtatcatgctagctactgcgaatatgaagacagggttcttatctaacgacataacatgggtcaaggaattgctcaaatgactccccagctagtccaagcttaatggcactagaaatctttttacaacactgcctcagataaatttatcttccaatcttctcttctcttgctttacctcttatggcttatatcctattctggccagactggagtgctctgctctccgtgaagatggcctgtgctgttctgcttctgtctttcctcacaccattccaatgtctcaattatatacttgacagaaatgatgacttacaatgattatttccccaatactatgaatgatgccccataaacatacattacaatttcatctaagtcacatacttaagtattcattcccttcaacatttgctcactttgtgagcacctcacattgaccagttactctgccaagagctgtgaatattttttttaaaaagaatacaatatggggatccctgggtagctcagaggtttggcgcctgcctttggcccagggcgtgatcctggggtcctgggatccgcgtcccgcgttggactccctgcatgggacctgcttctccctctgcctgtgtctttgcctctctctgtgtctctcatgaataaataaaatctaaaaaaaaaacaaacaacaacaacaacaatatgaccgtgttctcaagatcaaagtctagtaatgaaacatgtaatcacataaacaccactcattatgaaaggtgcaatcataaaaggaagggacaccaaggaatgagcagtcagctcaatttgggaggcaaaagtaggctttttagatgatggatttggggctttgattgattggagaagtttattccgtataagagagcagtatgtgtaaaatacagaggtataaaccaaaatggtctgtctggggaacagttcattatggctggaacatagggcccaagggaaagtggccacacacaaaactagacaggactttctggcaagcataggcatttgggctttatcacacaggcaataaggaattaatacaggatttaagcagtagcatatggccagagctgtgtttcagaaagctcagtcctggcagtattgtggcagaggcagggaagaaaatctaaagcagtactgttgaatagaactttctgcaataatggaaatgttctatcactcctgctgtccaatatgacagccactaaccacatgtggctaatgagaacttgaaatgtgactagtgctactgaggaacttcagaatttaatattaatttaaatagcaacatgcgcctagtggccactatactggacaatacagctttagagagagggaaatcagttgggaagctgttgatgtagctcaggtgataggactatgacagaatgtgattcagtaaatacttaagaggcaaaatagtaagttttgtgggtataaagttgtgtgtgtgtgggggaagaacccaagaatgggttcctagattccaggctttgtgactgaatagctgcaattaaccaaggtaatacagaagcagatctagcatgcatagactgcatcaattttaaactggtttaagtgcccgagagttaatcaagaggtaatatttagttccaagtttaactccgacaaatcttttgaacttaaggctcagcatgtgtaaagacacacgtttaagaggcttagagccactgagtgagattagagaagatgaacagaactagaagcaaactaaggcaaaaatcctgacaaacatcatcaacccattagaagaagctagagtccacaaaagaaatgagcagttggacaagcaggaaaagaaacaggtgagaatggccacagaaggggcatctgggtggctcagttggttaagcttctgccttcagctcaggtcttgatcccaggtcctgggatccaggctgtagtccctgctctgcagggagcctgcttctccctctcctgctttccaggtttgtgctctgtcaaataaataaatctttaaaaaaaaggaatgaccacagaaatcaagggtgtagagaatttcaggaagaaaatatgatcaaatgtctaatgtttcagaggtcaagtaagctgagaactgaaaagttcattgtgactgccaatcaggtccttggtgacatctgccagaacactttcaataatggaagaaatggactgaagagtgggaatggggcttagaaaaatttagatgatattttcaggtcttgactgtgcaggatagctcagagtaaatagtctacaaaggaacacagtattggtagggttttccttttttgaggctggcaaaccaatacaggaggaaagtttaaaatactaatgggaacgaaatggaggatagctttagagtgataggctaaagttgaccaggtctaaagaaaaggaattcccttacatccaagagaggatttctagtacaatactaaagggttacaggcaaggcccagtttataggacggagatggaaaatcccgagtcctcccgcagattggctcttctgttctgttcttttggtggggaatagaggttatgaactacagtgaggatttgaacccatacactgagggtcaagggagagattactggctataaacaagtaaaatgtttgctttaggtggcaatagaatcaccataatatccttaatttttatgagattgatttaacatttatagaacagagggcgaagcctcaggaaaaagtagttttaaatgaaatagagcacgagatcagtaaagaagtgaaagtgatcagaaggctctaaattttgtggaaggaaggagtcgaggctggcaggcgtcagtgaagcgatgaagtaagtctaggtaggttcaggggaagtaagaggctgtaaggctgcttaagacaaagatgccggaaaaaacgcccccatctaccgttctcagctcatttcccgcccgcggcaccaggaaggtgataaaccccctttccctttgtcgaaccacaccaggggaaggccccaccctgcaagccctcacatcccctccctcactgacaagagcttcgaggcgcgcgttttttctagactgtacagcgcgaaccaagcggcgacttacacctgggtaagaggaaccaaagaaggctgccccccggcgaacggtgaggccaccgatactgagggaggaggggccgctcagaccagagataagcgcgtcgcgcccgcttccgccccacccactgcgcgcgctctcaggcccagcgagggagcggccgtgcctccggacgcatgcgctctgttgcgctcccccgccgactccaatgctcctttcccctcccccaatcggagctcacccttgcgcctgcgcagtgcacgttctcgggctgtggcagccatgctgagcccgtacggagaggctagtgggggggacggggtcgacgacagcgggataggaagccggggatgtggagaagcagcggcattagagcgccccggctctctggagataggtcagggccatgcagcctctttggcctcttgcgcgacccccagaaaccttcggaaaatgttcctcgggggggggggggggagggacggctggcacgtgacccgggtcagccaatctgagtgttgctgacgtggcggcgcagccccgacgatctccccacccccccagctcactcgggaagggaggggcggggggttacgccccctcccccaacacagcttcggtgtcccgggggggtgacaccccggattacgtcctcttccccccctccccccgcaccaagccgaggggaacgttggctcccccctggaagattccaggttccaggtgagaaggggcccttgggggggcggggatgttgctagttatttagaagcttaaccaatggtggggagtccgggggataattcttggggttcagagaagaacctgagggtgggagggtttgtccttcaaacagtttacagccaatgggagcgtgaagggggggcgagcgggagagggcccctcagatgggggaggggaatggccaacctcgtgcctccgtaccaattggagggcaaaggggcgtgggggcggtgtgtccccccattccattcgtcccctgggggtagaggagtccggagccaggtgaggtttctttttggcggccggaggagagaggtgacctagagggctgaggagtgggagtggtgaccgtatcgcctactcttggatgtgaatgggcaacctaggttgtgaactgagattgttcccgggcgcccactccctgtctccccagactccggaaggagcgtttctgtgcttttgtgtcagcggtaggaagctcgcagtccccacatggcatgctggaggttacgcttcgagtcgcttatcgagtttgtgtgcattcacgtggacacggcctgtggagccttctgcacaaaccgttgcctcggcggggtcttagaaggctcagcatgtgttaccccaggccggggagggcttacaggctgaaagcttggggttcgcttgggaacagaaaccaagcccaaggtgggtgcggggagggctgtagaaagcgtggttcagacaggagcgagtgagtcttaggacctgaaatgatttcacagctcacaaggtttcgggtttctccagggtggcgtcttctgcctcctccatcccctccccccattcctgaacagttctctccttgtgtactgcgggggagggaacgaaaaggaggagagttacttttccaaattcctgactagctgttagcctcccctgtgactcatggtggggtgggggggggaagggaggttgggagggagcagggagcagtgattttccggaatgcgggaaagtaagccagagtaaggtctggctgccctttggctttcaaagacccagcattttcgcgacctcctaagtttttcttcccggccggcccccctaatgggcctctgcaaacttgcgaggcctcgggtggagaactgcagatttaggaggctgggccactagggggaggggtggggggaggggagcaggcctcagcaaagttgctgtgtcattgccctccctactgcagccacccgcgccatcccgcatgtacttgtggggccgaagcctggtccctgcgtgggggagcgcggtggtactaggggaagaggcttccctcccggtgtgcacttctccccgcagggtttgcccgaccgggctggtcgagaagacgtgaggttggcggccattttagacgcagtgaccgaggttagggctcaagagctcctgcgaaaggagggtgatgtggtcggagcgcaaggacctaggccctcacgagcctttccggggtggaggtggaggcgcttacgttcgttgatttacattaatttcctttctcagatatgcagttttctatcttcgtatccagagaaggggagctggagagggagacctcccgctaaagcccaggttggggataattctcccagaaggggtgcgggggttgggcggggggcccagagacggctcgagagatccgggtcttgcattctcggtcttgactccaacatagtctagccctgtgcgggtaaccgaattgtggggaagagttagtgagtgggttgggggagggggcgagactgagctcccaaaatggctcctgcccctcctcggaggcggacagcccggggggaaggggaggaggggagagaaaggagggggagggttaatctgagctgcagccgccgcctccgctcgccctcctccctggcgctgaccgatggaccagccgctccgtggggaggactccggaccctcgtggggggatggggggccctgccgcccccgaggcggagggaccctaagaggggggattcgggcctgccctcggggttggggagggccgggagcttgggaagaggtctgagctcgtcagaggggacttcgcagaacttgttttttcggctctgagccggacaccggaatgaagtttggggcggaggtgggtttcattttacagagaaatgggtatgtttggagattttgccttcactttagggctgctgggattttgccgagcaggcggatactttatgggcaactgtgaagggattggagaagtgcttgggtgtgcgtttggggaatatcctagacttggttgtcttgtgggtaagctaagcctttgagagcccgtggattctttgtgcctttgtcttccgattatttgacctggggaaagggaaggattttttagactgcagcaagcctgtatttttttattgtggagctcgggaacgttagatccttttgctacgttcgggagcccttagttctccgccagagagcaggccgcggcttctaagatggcgtcttcttcctcctttcagattgctcacagcagcggcctcttcgccgagaatcaccgcccgccaggcgtcctgcggccacaccctggcgggccccggctggctacgcccacgcggccccttcagtcccgtcggcctggccaatggaggatctgcaaatgtcacgacctgcccgggcttggcagtcgccggtcgcaccgggcctggacgcctgggaagactttgttgcaaggggaggcggggagaaggcgctgcacccatgccagcctctcttcctggagtcgtcgaaccacagcgcagccaattggctcagagatgtggcggtttgccggttccctatgggtctatgcggtactcttctgcctagtgactgacaccttggaaatgaagcctatgacgtcatcgctccagcgaaccaataggaaacgctcccgcggagaggtgttccgcccctttcgactctgcttcttcacgcgcgtgagcgagcgtgcgcgcgcggagggggtgggggaaatctcgaacacggtggcgcgcatgagcggcgaagctcctcctccctgcctatatataaagggctggcgcggggctcggcggcgccatttcgcgctggagtggagcatcctctagaacgagctggaggattctgcctactgatagccttcgagtcgtcgggggccgccattgcaatccacgtccatccgtttggaaatggccttcgtctcggcctatgaccggtcccggcggacagtacagaccccatagaagcccccgacgctcccctttttcgggccccgcccaatcctcggagtctgtccaccccctctactccgccctcaagaggatttcaaagatggaggcggcggctccctaaaccacttttcgtgttcatccgcctccatccgagatcgaaacgggacctcgtccgctgcgggcagtcccagcaggaagaggggatccttgcagatcaacagcgggcagtattgacgacggtgtccgggattgggggccgtcctagtgtttgaggagtccgtccccccttgcccgcctctgctgaggccgccgccattttctcgctgtccgcctcccgcggagcgcgccaagctgctgggagctctccgagaagcagcggagaagactgctttcgtgccggcccgacgggggcgggagttgtcgactggagggccaagggcaggggccctccacccccccacttcccgggttatgctggagcgggcggtaaggggaaccgaggccacccggactttccgcggctgagggcagcgccggttccccgtggtcaggatgctgcaaaacgtgactccccacagcaagtaggttctcgcgatccgcgtgtgggaagatgttgggggctgcggcacggggacgtggagcgtcgggttcggagggaggacggaaccgactcggggctcgttgctattccatggcgcgactgttggcttttgggctcgcggagggggttgggtgacggttttggaacggtggtcgagggccaggtactgcgtatggagggagtacaggttgtccatttatacgttacttttctcgccgtggtccagtctaacctagtcgaacagagctgggttggcggcggaatgtaatgggaaaggacaacgttgagtggggtagccggtcctgcaggtggtgggtctggtgtgtagcaacggtttatcataggtctttcagggtgttgagtggccacatcaagcaccttatagggttgccatggtgatagagcctgactggcgacggagatggccagagtggggcaaagggattacttttcgtctatgggtttgtgtgtccagcttaggtcattgagtattctttcaatgactgagtcagttttgtgttgtgttgaggatttgtttgcatgcgttttctttggaggggatgttttggatagctctgagagttacattcggggcaggagggtggagctaaggattttagtccagctctgcggatgtaaacaatgagatctcccatgtagtgtttgtagttctgggccctgggatacccctggtcgtgactagtaaagagaatgtaagtttgaaccactttggctgtcgattcccagagtctggtgctagagtgggagccgttaatgtaatttttttggcggggtggtgggtggtccatcactatccagctgaaatgtgctgaccttgactggggactgggccgggtctatttttgagtcttttggaggagggagaggaattcgagtaatttctggggtctggcagttggattattccaggccctgaagtctgacaaatgccccccttgtctcaaaatatgttggtaaggttttccgttaggtttctgattcattctctactaaaaattaaacagagcttgtggggaggatgatggtgtgttctcttgtgcccagatggattcttaggtgtctcatcagcattttgtaaaatttgcttcctattttgttccgcttttcactcgtttccctcaggctcaaccaccatggcaaccaccaagcccctagtgaggaggaagcttggggcttgtgcttctttgctccacccatttagcttaagtcccatcctgtaaagctcgtggatgctttgctgttattctatatgagaaattgttttggggctttacttttaaaggagtgatttaaaaaataataaataaataaatgaataaataagtgagtggtaaagcttgtcggaatctggataagtgtactcaacatagggaaataaaaagtgggggaggggcaagaacaaaatctccactgattgttgggatatgctggctgtggttaagatccacttccgtaagcttgattgtttctcaccaaattcaaaacctggatttattgagtatgtagtataagtggcagtactgattttcataaaattacaacatctaattatgcctcccatttcacaggctccctggggaggggaatgcagggttactggggctgggcccagaggcagcagcaccagggaaaaggattcggaagccctctctgttgtatgagggatttgagagccctacaatggcttcagtgccagctttacaactgacccctgccaacccaccacccccggaggtgtccaatcccaaaaagccaggacgggttaccaaccagcttcaatacctgcacaaggtggtgatgaaggctctgtggaaacatcagtttgcatggccctttaggcagcctgtggatgccgtcaaactgggtctgccggtgagtagggatactggagtcgggaggtattgggaatgaagaagaatgtgtgtgagtggaggtgggctgcttagtataggtgctgcggcccctagggagttcccatctctctcctgtagggcaggtagccaccagatatctggattcttggtcctttgtgattattgatccaaccgcttgctatcttggcatctctcattgtgccccctccatgtgtccttccttaacttttgtgccctggctccattttacagattcccaccccaggttgggagaggaccacggtggccaaaattcttagcttcttcctctccctcatgcagcccatggatagccagccccagaggtaatgtttcaggatgggaaaccttgcagagtgggtgggagatgggtggttagggaaaggcatagataggggcctccaaccgggtgttaagaatctcgttccattttttctctgtccttagtttaattggggccgcagtttaggggaatacatattttgcataggggatgtgtatgtgtgtgtgtgtgtttgctggggtcagtagtttgtctaggaaaactggcattttcagtgactgatctagcgtttctttctctaggattatcacaaaatcataaaacagcctatggacatgggtaccattaagaggagacttgaaaacaactattactgggctgcttcagaatgtatgcaggattttaacaccatgttcaccaattgttacatctacaacaaggtgagtttttttatgtgtttattaataggtggagagagagtgcttatgttattattttattggtataatgtttgaaggtgttttcaaagtaggtaggatctagaaaatctgagctccaaaggatacccctgagcacagtgatgggatgtggcttcagaaatctgaaggtgaaggttatttaagtagaacattttcatacttggggatgatgaccctgtttctcaaaagaaatctccagagagatttttgctgagtagagcggaatgtattctccttgagaatctcattcccttacatttgaactttcattatttactgcatattgatggacaattgggaggatatggagataagtagcccaaccagtgtggtggttcttagtaattatgacaaagttggagaggtgatagtagtatttggacctaggaataggaatgcctttgagaaaactgatgtgtctgcctttaactggcatttgaatctttttgtttcctgtagcccactgatgatattgtcctgatggcacaaacattggaaaagatcttcctacagaaagtggcatcaatgccacaagaggaacaagagcttgtggtgaccatccctaagaacagccacaagaagggggccaaattagcaggtaggaagagccgcagttttcctaatggagataagatggggaaagataacagaactaatcttttttttttctctctcccaccccaccccccccacccccagcactccagggcagcatcaccagtgcccaccaggtgccggctgtttcttctgtgtctcacacagctctatatactccaccacctgagatacctaccactgtcctcaacattccccacccatcagtcatctcttctccccttctcaagtccttacactctgctggaccccagctccttgccgtctctgcagctcccccagcccagccccttgccaaggtacagatgtgtggatttctttgggcaatgggaagggaaaggtcttgaatgaggtggaccctaaaaggctcacatcttatttttctctacagaaaaaaggcgtaaagcggaaagcagatactaccacacctactcctacagccatcctggctcctggttccccagctagcccccctgggagtcttgaggctaaggcagcacgtcttccccctatgcgtagagagagtggccgccccatcaagcccccacgcaaagacttgcctgactctcagcaacaacaccagagctccaagaaaggaaagctgtcagaacagttaaaacattgcaatggcattttgaaagagttgctctctaagaagcatgctgcctatgcctggcctttctataaaccagtggacgcttctgctcttggcctgcatgactaccatgacatcattaagcaccccatggacctcagcactgtcaaggtacccactgcatggggcagatgggatgctcaggcagtgattggaactttgggttcaataaaacaatcagtgacttcttacaggcacacggcgatcttgattcttggtattttatttttataaaacaacgggacaggaggttaagtacttgataatagtatttttttgggagttgaaaactgtatggtgagttttgttttcaaagcaatattaatgtctaagtgctacttaagagaattgggttaggggagtaaggggttggaaggataggccacccatccacccctatcacttagaaatggtttttttttctagacgtagatatttcttcaacccacccaaattcctttgacttcacacttgaaccccagagcatagatctttaaggtcatccctactgtgctctcaagagagggctactcttgcggtgtctggggttggcagggaaaggtgagtcttcctgcctgtgcagcttctgatgctgcctccttctgcagcggaagatggagaatcgtgattaccgggatgcacaggagtttgctgctgatgtgcggcttatgttctccaactgctataagtacaatccaccagaccacgatgttgtggccatggcacgaaagctacaggtgagtgtcacagttggaatttgaagaacaaatgagtctggggtagggagctttttgtcctctgctgtaccaccttattgtgaggctgtcccagtatatacagtttgtaaattggagctgtaccttaacactaggtggctgggtgtaatcgtgggaccattcactagtgtggttctgaggatgcctttttccctaggatgtatttgagttccgttacgccaagatgccggatgaaccactggaaccagggcctttaccagtctctactgccttgccacctgggttagccaaatcctcttcagagtcctccagcgaggaaagtagcagtgagagctcttctgaagaagacgaggaagaagacgaagaggaggaggaggaagaagaggagagtgaaagctcggactcagaggaagaaagggctcatagactggctgaactacaggagcaggtatcttgtcactcggtttattttgtgaagttgtttattttgccctaaaatttcttttttactccttttattctgctttatttttctgattatacctctgaatttttggtctccagcttagggcagtacatgaacaactggctgccctgtcccaaggcccaatatccaagccaaagcggaagagagaaaaaaaagagaaaaagaagaaacggaaggcagagaagcatcgaggccgagctggggttgatgaagatgacaagggatctcgggcaccccgcccgtctcagcccaagaagtccaagaaagcgagtggcagtgggggtggcagtgctgctacactaggcccccctggctttggaccttctggaggaagtggcaccaagtaagttataagagagtaggaagcagagaccagcttggctattataatctcagggtggggggtgtgtgtgtgaagttttatctaagccagaggtcaacaaatgtttaattggcaaggtaacaagtactgattttgagaactgtagagttccaaagttccaccctggtggaataatgcaaaagcagccatagatattatggaagcgtgggtttagaactattctaataaaactttatttacatgaaaactagtgactagctagatttgtcttctaatttgttccttctctctgcaccaataaatgcgtagtttttcttgttttccacaagtagtagtttagggagcaacaagatgagtttctgtcagtataccaacatctagttctcaaagcccaaaataaatgtaaagtgcttggcatgtgagaaggtctgttttcctgaggaatattctagtatctcaactctagttggctcaccattacccttgtgggaaaactgaagcttcactctggcaggaaattaagacttctggatttaaatactgggaatgtgtcgggagagattagtgatgcttccctaattgataattttttgcctatatagactgcccaaaaaggccacaaagacagccccacctgccctgcctacaggctatgattcagaagaggaggaagaaagcagacccatgagttacgatgaaaagcgacagttgagtttggacatcaacaaattacctggggagaaattgggtcgagttgtgcacataattcaggccagagagccctctttgcgtgactcaaacccagaagagattgagatcgattttgaaaccctcaagccatccacgcttagagagcttgagcgatatgtcctttcctgcttacgaaagaaacctcgaaagccctatagtgagtatgaaatgaccctttagcacattaatccggcaatcctcaagtaattctgaggacagtgcggaagagggtactagggtatgcttgcagtccggattgtccacttctgaaggtgtggggatttgttggtttcctgatcaggaaaggaactttgccgaagggaaactgggggaaaattaggaagacaaaccacgagagactcctgactggaaaacaaaggattgcagaaggtgtggggggggggcatagggtgactaggtgacgggcactttatggcaatccttagacctggagtgtttcttacttctagccattaagaaacctgtgggaaagaccaaggaagagctggctttggaaaagaagcgagaactagaaaagcgattacaagatgttagtgggcagctcaattccaccaaaaagccccccaagaaaggtaagtattcctgtaaggtactatagatttaccacatccccctttcttgactctttccttgacaaacggagatcagacttgtacaatttacccttcaattttgttacgcagcaagtgagaaaactgagtcctcgtcaacacagcaagtagcagtgtcacgcctcagcgcttccagctccagctcagattccagctcctcctcctcctcatcctcttcttcagacaccagtgattcagactcaggctaaggggccaggccagatggggcaggaggctccgcaggaccggacccttataccaccctgccccgccccttccccccctttgctgtgatacttcctcatctcctcccccctccctcccactgtaggagagctggctctgcaagggggaggggtgcagggacatttactgaaggagggacttaaatggacaaagttaagatggagttcccagccccattgagagtgacctcttgggcatagagcccccattcgaaatgactggggcggggcacgggtacagggtgagagtgggcaaaggccctgatccagggttaacctgaggccatagctgccctgttcacttgtaaaggccctgttttgaggttgtttgttctaatttattttaagctaggtaagtctgaggggtgtggggccatggtcccctcggcctccatggggagggaagaagggggagctctttttttacgttgacttttttttctactctgttttcccttttccttctgctccatttggggcccctgggggtttcagtcatctccccatttggtcccttggattgtctttctttgtctgttgattctaacttgtaaataaagaaaatattattcaaattttgagttaccttaataatgtttgctttgtagtgtttcaaaaggaacgtaatagagtattgaggaaagtatttttgaagtgaggaaaagggaagagacctcttgtggttggattgccttagttgttaccccagtagtaggctgttagctgtgctgataagtcagttcatctactttttataaagtgaatcctaaataacactcaggttcatggtttgttctggtttagtgtttggttttgttgttaagattcatttatttaaagagagcacaacaaaaaaaaataaataaaaataaagagagcacaagtgggaggggcagaggaagagcaagtcaatcctaagcagactccacactgattgccaagcctgacttaggctcagtctcccaacctgagctgaaaccaaggggtgcttaaccaattgcactgctcaggtgcccctggtctggtttaaatagaggaaaagctaagaggtgtctggctcatttgatactttgatcaagtttaggattcaaggtttaagatgggttctgaggttttttcctttacataaaattatgtatgtatggattgtctcctgaacacacttgaaccaaatgtgaatagaatgaaacctaaccacaacagcaggtgtttttgtgttctgcatctgacttgagaaggcagttgtgcttacttttataagctttggcctcaaattccagatttatggccctcgggcacagtacattaatagaacacaaaacagcaattttttgccaaatccagatcacaattcctctccataaatttaaccccttgtcttgctgaggaaagagtctagttcagggaactgggacacgtgggttctggaactggggacttagaagacattatagcctagtaaaacaggccactgcaaaaaatgaacttggaagtgtaagggctaggaatttttttttttttttaagatttatttattcagagagagaggcagagacaggcagagggagaagcaggctccatgcaggaagcccgacgtgggactcgatcctgggtctccaggatcacaccctgggctgcagcggcgctaaaccgctgcaccaccagggctgccctaggaattgttaatgtagagaaaatattctgctctgaataatgttgccagaaaggagaaagtacagggtagaatctgatttggagatggtagtaaagattttggaatcaataaattggactgtagcagggattctcaacccttaccacatgtattagggctccagtaaagctttttaaaaatactgcagtaatttcaactttctgtctttatgaattctaagttgaagcttgggcaataactacccaaaagttcaggagatggtaatgtctcaccagggttgagaaccactgaagtgtttttggaaagcccttagcttgaaaagggacaaagaaccctcagttgggcttttgggccaacttaactgtacaattcagagaatgaatcttggaacttttgagctctgatcttgaagaatgatagaaaagattgaggatgtttttgtggctccggcatctaacttcagcccaggttatgatcccggggtcctgggatcaagccctgcatccgatcccagctctgtggggagcctgcttctatcccctgctagttctcttactctctaaagtgaaatctttaattaaaaaaaaaaaaaaaaacttggcatacttttaatagaatttgttgtgggggtggaataaaatctaaaaaggagtaacatggtttgttagaggcatgtatataatatgtccaggattatatctcatttcaaaaagaatacaaagtgagttggattagttgagggtggaggctagctgcagaatcttaaggtagtatggctgcgttgccttgcattcgtatactcttaaagactagtctgggaaagtgaatttcagctatcaaaatgggagtttctgatgtctttggcagctccttagaagtataacctgaactgggaacaagtgctgtcagaatgggcagattggctcatccccttgactgcagaaccacttgagacggaaagagtttccagacctgtgttagacttcctactctgccatatcaggccattttcaagtgtacatggatttcctgagactcaaagttttttggtagagtccttgctgtggtctctgacccatagtttggtaaatctgtcctttgatttactttctcccctcagttgaatttttcctggtccaagtcccagctttatcccatacgctttaggcatggtaatagttttgaagaggcagagtggtagcttggttcaaattcctgtcttccaaagtaaccaatctgtagcctaacaggacacaaatgtggagtcctgtgggtatccctcccatgttcttcccagctcttgaaatcatgggttccactgcctgactcttaggccatttgctctaatgtctcctgtgggagcttttttaatcagtcaacacattttacagagttccttggttgccttttattttaacaaccacgtcaatagaccagacacggctaagctctgccaagtcgagcatggggttgaaaattagagcacaagccctgccctcaagaagcttgctctgtcaaagttgaactcttaacacgatccatatatggtgctgatggtctccaagataaaggcatgaattggtcttcccagatacttcctgcttattagagtatgccaatgtgtggatcccagtctccacccctgccaaccttgctctcagaactatcttgattggagttattctcctggtctggccccaaatcaccttgagagaggtgttcctgagcagtgagaggaactggtagagttgggtaggggatgggaatggtggtagggaactgaactgatgtctcccaggatctcccatctttgtttctttcccctttactggatcctaagtttaattcaagctctgcaaaaccccactagctggtctctagcactaaatgagacagcttgctgcacccatagtgtgtgggaggacaacattaggtaatcacagtttttaagaaaaagtgtacttctagcctcacacatgtaaaggtttttatgagcttagagagatttatagattttatttatttatttatttatttatttatttatttatttatttatttatttttgagcttagttcttattctgagatctctcatcagatctgttctggcagatttcagaaggatgaagtgttaggctatatccaggaggaaggggagcaaatgaggcctgcagaaaaaatagtggaggtaaactgcagaatgcaggcagtgctgaagcaggagtgaaagggtgagtgcttctaggtaagaccagaaaggcagaactagaccaaggagagcagttagccatgataaggatttgaatttttatccaagactttaatcacagctcacatttaattgagtactgactatgccaagcagtatgcacaactcattttgtctttttttttttttaagagtttatttatgagagacacagagagagacagagacgcagagacacaggcagagggagaagcagtctccatgcagagagcctgatgtgggacttgatcccaggtctccaggatcatgtcctgggctgaaggcagcgctaaaccgctgagccaccagggctgccctcattttgtcttcattatagtcctgtgaagtagatctaatctccaacagatgaatgaggcacagacatgctaaggaactccccaaagttgcaacacagctggtgagtgctggggtgggactcaaatccagcaatctggctacaggaaatactaccctggaattccagtacaacaggctggtagggtcctcacatcctttgaaaaaattgcagtgagaaggatcatgttgagttggtggggtgtcgagaagggatggagagtgattatttagaaagcagctcctacaaatgaggatggtggtttggaatggagaggcagcaatggaggtgaaaagtaggtaagtttgaaaattgtaggagatagaacacatgggactattctccacacaccacaggaagcgcagttgtgaatagctccgtattccttggagtccagagtgttccagccctggaagtttgacagtttgttaactaaaggaatgccagctggctgactggcaagagtgaaggaaacccctcaaggttgcccctgggtgttggggttggggggtgctaggtttccgaggcatttgttgagcatcccagagggtctttggcgccacctggtgagcatggtgcccaggacctcgtggatatttcaggtagtattgtgcgtaccctctcatctttcagttcttacttccctgtacttcaacttttgaaacatcagcctcacttttatgaccaggaggtctttatttgtcttggcctctgaggcatcccatgtggcttcgcctggctctctcactttttaggcagcctctcttagtttgcttctcaaaagtctctacctccaccttccatgagatgttgtcatccttcatgttaccttccttggtcctcttcttatttgcacatttctaatcaattctacccattcttctggaggcaattcccacccatacaatctgtctctgtccagaccttgctccaaagttccaagtctgttttcaactgccaaatagcaatgtcccaggagcacctggcactcagcatatgtccaacaacgatcccatcctttcccacatagatgcctctgtgagttacctgtttatggaacaagcaatcatacaaaactcactaatgtcctggacacttacaagggcccttgccgtcaagtccttccaagaacactaggacttaggtacccagcacacttttatagatgaggacacagagctatccaggaacagttctacagtaaacaagtggcacagccaggattattaatgtaccaccattcccttagtcactggagccagagcctggtgatcagtccagatttctacccctcaccctccccttctctgttcacccatcaaggcgtgtggagccttcctccatcacttctctcctatcagtatgaccccctcagactggactatcacaactccctgctcaccagttttctgtccagtctcatttccactatccatcccccacgctagctgccagagagatctcttaggacagaaatctgatcatgttgcttattattactcttcaggtttaaacttctttgccaggtctctaacctgtgttgcttctacacagtgatatttctcatttgcccttccttaaactctgcactcaactcagagcaaaagataagccttcccagattctcccatgctgcttagaatatcctttccccatcagtaaatcctgcataatctccaagaaccacttgttatctccactataaagacctttctgactgaacttccataccccatgacacatacacacactttcaaggacctcattgagcttctaactatgccctaagccctccccacccaaccaataccctttccagactccagcgggggaatgtctaacactgatttaaattggcctctctgttatggctgttctgctcagcagccttggaggaatgtccttatgaacaattagacaacttcaatttttcagttcacacttaagcacttcctcctcaattttgccccttccacttatatgtctcttataggtcctttgttaggcaggaattgtatcttgttctttataaacttaaccttaaccagtgcctagggaaacaatttacatgtaaaaataagtgatggttaaattacctcttggcatttgcatccatcccaggcacctcagcacacatcccgcggggctagcaggcgtgggtgctgaggtatggactagcgtagtatcaagtcactggctccagtgactaattatgcaggatttgctgatggggaaagaggatattctaagcagcatgggagaatgtacggtcaccacccacccctgttttgtccagagctgactagctttagttataaatatggggaaatctcaggcgaattgggacaagtggtcacctcatgaataggagacatcatcactttggccatgcaggcagatagtaagaggtaacatactctaggcatttttttattttccaggccctatgcttattttattgtataactcatctgattctcacaaaattgaattctttctcattaaattttattatgccctcttcatagaagagaaagcagaggctcacagaggtatattaactgggcctgaatctttgattccaaagtctgtgtctttgtgctgtaccatgtggtcttggggttccatcaatcaccttctcccttcatgccccgccctttgtgcaggagccctccctccctggggtaccaggcaggcctgtcacttgcagtgaggcctctcatcaacctaaggcagccaggataagaatagctccttgtacaagtgagaggaactagcaaacacttatacgtaatattcctcatgtgcatctaccaaacaaggacattgctaacactttgtcggctaagctaatgtctgatttgaggttggaatagaaaaggcatttattctccagggatacgaatttttgccaggtgttggtgtgaaagagttactaaagtactcttcgactggttccgctgtcagacctcagagtcagctgctgttaggatttctgagaccatgagaatgcaacagagcccaatcaatgagtactttctcctcctctgcccctgcggtgtgtgtgttggaactggctttctccgtggaggcaggttgtagagacacctctgaaagttcctccagaaatggttattacctatcctcctgcctcgtctctgcgtctcacccagagttgctgcaaaagggagacgattttctctcaaaaaaaatgaaaacaaaaacaaccagtttttaaggttttctaagtttgcacgtgtgctttttttaactctaactccagggcaacaaaagctgaaaagttacggcgatgggggcaaagaaggctccattccttttttttttttttttttttttttttttaaatttttatttatttatgataggcacacagtgagagagagagaggcagagacacaggcagagggagaagcaggctccatgcaccgggagcccgacgtgggattcgatcccgggtctccagaatcgcgccctgggccaaaggcaggcgccaaaccgctgcgccacccagggatcccagaaggctccattcctatcaggaacctactgctctttaatgggacacagaatgtcacatccagtggtgacagaaaagtgttgttgttgcttgtttgttttatctctctctgcttattattagggatttgtgggctttcatatattcaacatgtttaagttgattatagtcattttttgatgctcaaattcccccaaatttggccaatggggaacctcttcaagctggctgctcttctcttttgacatgcccctaattagtcttagaacacttcattgtttgctgaaacaaatttgctttgtattttccctaacccagacctgcaatcagtcacttctctaaaaaactccatttccttttattaggtatttagaaaccacaatctgtgcacttggatgctccttgctactgaggtttcctgtatcactttcaggttctctcagccactggaactaggagatacacatatttatacatcattaattaaaactgacttttttttttttaagagcacaagcagggggaggggcaaagggagaggaagaagcagactcccctggtgagcagtgagcccactgtggggctcccatcccaggaccctggaatcatgacctgagccgaaggcagacacttaactgactgagccacccaggcacccctaaattcatttctaattaaaatttaatattagtgttttaattcagctacttttttccctttaaaagtaaaaagacattaaaagtctcagttccaaaaaaaaaaaaaagtctcagttcctgggcagcctgggtggctcagcagtttagcgccacattcggcccagggctgatcctggagccccgggatcgagtcccacgtcgggctccctgcatggagcctgcttctccctctgcctgtgtctctgcctctctctctctctctgatgaataaataaataaaatcttaaaaaaaaaagtctcagttcctaaaaaaaaaattcttggttcctaattacattacactagtaattactgattggttaatatacataatataatttcaaaataataatacaatattaattttttaaagattttttttatttattcatgagagagacacagagagaggcagagacacaggcagaaggagaagcaggctccctgcggggaacctgatgtgggactcgatccagatcccaggatcatgacctgagccaaaggcagatgctgaaccgctgagccacccaggcatcccaatgcaatattattattattattattattaacagtgaaactactcaatgacattcaaggtttttggtagttctttttgtccttagcatatattccactaagaatatacagtactgtcttcttttttttttttttttttttttatgatagtcacacagagtcgcacaaaccgctgcgccacccagggatccctagtactgtcttctaatattagttaaactctcttcttggtgtagtttacttgtttctgatagttttaaattttagggttttttaaaatatttataaaaattgtaaagcagggaagcccagatggctcagtggcttagcgccgccttcagccccgggcgtgattctggagacctgggatagagtcccacatcggggtccctgcatggggcctgcttctccctctccctgtgtctctgcctctctctctctctgtgtctctcatgaataaacaaataaaatctttaaaaaaaaaaaattgtaaagcagggcagctggggtggctcagtggtttagtgccacctttggcccagggcgtgatcctggagtcccgggatcaagtcccacattggactccctgcatggagcctgcttctccctctgcctgtgtctctgtctctctctcacacacactctctctgtctctcatgaataaataaataaaatctttttaaaaattgtaaagcctttatatgtttcaaaagtcaatattcatttttatccctgttttctcaaacccattccttcaattcttattctcccaacttcatttttaccaatttctggttttatccttctagtatggctttttgcaaatatatatctctgttctttcttaccccaaaggtagcacatactatatataattcctttgtatgttgcattctccatgacatcctagagattcctccacaggagcaaagagatcttccttgttctgccaacatctttagagtaatggtatggaagtacttccactgtgtggaaataccatagctttttcaactattccactcttactagatattgttaccaatctttcacttacaaaaaatgacatatcagtcttaaaaggcagataaagtctacatgtttgacatttccttatacatattaaagtatatttttattttttaaggatttatttatttgagagaaaaaggtgcacacatgagagaggggaggggcggaaggagagggagagagagagagagagaatccacaagcagactccccactgaatttggagactgatttggggcccgatcccatgactctgagatcatgaccagagccaaacccaagagtcagctgcctgactcagacacccgggtgcccctaaagtataatttagaagaaaaatattacttgtgtctatttatttttagttcagtttttagcattctttggaatacttgaatttcatggaacaatttaagaaacaccaggtatatttcacggtgagcatacagactaatggatcggacaaatgtcaggtcttcagactagtgcttggcacactaacagtgcctaataaatgaaggacaatcatgataataaaagcaatagtgttaataacagcagccacattttaattacaggctaccttccactagctcgtgagtagtgatggttcagcagaaggaatttgggctcctgcatcacacagaccttccaggccaccttttagatgtctgaccttggggcaagttgtataatttttcaaccccagtttccttcctcccctgtaaaaaatgggtataattattctaactttgcaagttgattgtaagaaagaaataatacatggtaaaggaatattgcttttcttttcttttttccttctctgtactgaagtctgtgatatagggcgatggcagatgtcacctccaagacctctcctcttctggcattgaatttcccaaagcctggagcacactggacatcacgccaggcgtctcagacattatactaggaagatagagagaggaatgactttgagaggcagggaggcaaggcagagagggtagattctcctaaactgtggaaggcacagtggtgggtgggtcccgcgagagccccgttaccctgcggcacccaaagcagatagggaggactctagggaaaagaaagggtgtccatctggtgcatttgtgcagtcatgctccaaagcactggggctcactcctcaccaaaacctcccctgccccctgcctgatgcagaacagcaagctgccactccaaaaggactatctatgcaagcgaaggcccaggcatcctagagagcgccagtctgaacagatgtaggaagacagggagctggtctaatgccgcagcgctgtgtcagtgcctttgaaaaaccatgaaagagggggcgcctggctggcttagtggttgagcgcctgccctttggctcaggccatgatcccagggtcccagccagtcctgcatcgcgctccccgcagggagcctgcttctccctctgcctgtgtctctgcctctctctctgcatctctcatgaataaataaacaatcttaaaaaaaaaaaagctgcagaacagtgggaataggccaaatctgcaaaaaataaaatggaattcagtagaattctaccaatgtgttaatgcccagtatgttccagataagaggttaagtgttggaaagatgaaacacagccttgccttgtgatagaagagcagcaaaggaagacacacacacgcacacacgcagctaactctgacatatggcagaatgtcatagatcctagtgagaaaatgggcaaaatattgtggcctgggattaggaaggtttcacagaggtggcattgaatttggactccggggaggacaggtaaaatgtttggttggcagaggcaggcaggtccaagcagagaacagtatgcgcaaaagcaggaggtataaacatatcttgagagtttggtgtgacttagcagtggctgttttcaggggagctactaggaataatgttaaaaagtagattgaggacaatttgagaaggatcttcttcaccccataagaatttaaagctggaagaagagaaaaagaaaatagcctaaaagcttccagaaagaaaaaacaacagatcacatacaagtttcaggactccaaatatcttttggcttctcagtaataatactggaagctaaaagacttatagggaagcagtttagcgccaccttcagcccagggcgtgatcctggagacccgggatcgagtcccacttcaggctccctgcatggagcctgcttctcctgctgcctgtgtctctgcccacccccctctctctgtgtctctcatgaataaataaataaaatcttaaaaaaaaaaattctgatagaaatgattttaaatcttgaattgtatgcccaacttgtctcattcaagtgtcagagtagaataaatcaattttctgaaacgtaaaacataaaaatgtgccttttatgcactctttctcagagagctaaaagaggatgtacttctgcaaaataaagcatagaccacaaaagggtaattactggatttaagaaacagaagctgccgcacacaggacaggtaaatcctgccaaggatggtgaagggtgatcccaggatgacagccatgtcactgaaggcagctggttaagaatggagcagacggaaggtggtgggacagttttatctggcaataaaatgggctgattgtgttgtaaggaaatttgtcattcattaataataagtacaaacaaagccaagcaaagagaaaacaggataattattcactccagggaagacaaaagctgtttagggaaggaagagcctggcttactctgtggtttgactgcacataacttttacgtggtcacagtaatataaacactgaacactgacctagccagagcgaccatctaactaattgtactaagggatgacagcaccagaagagggcatgtgtgtggtatgaggatgaaaatcctcatcttccacagtgtgaggcaaagagagaaagcctaaggctgaaaaatcaagatgtagcaacacaaacacatgatttagagacaggaggtaataccaacagaatcgatcgaaaacagttgaaagttggggtgcctgggtggctcagtcggttaagcctctgcttttggctcaggtcatgatcccagggccttggggtcgagccccatgtcaggctcccctctgcttctccctttgctcctccccaccccactcattatctctctctctctctctctctctctctcaagtaaataaataaatatttttttgaaaaaaaagttgaaagttatcacttcttggcagggaggacatggtaggagcaggggctggagactagatgttttggggaaatcttgtagaactatttgactctttaagctatatgtgtgatgatggcccaggcacctcagtgcagccacactcccagggagcaggtggccagtggccctccccagggactatccagcaggcctggaggaacaaaagtggctctaagtccagcacaggcacatcgaagaaagctaaagcacttcatgtgaagcacagatgcagaataagtgtcagatagcaagcagtagccggtccacgtttagtgagtgggcagcatttccttctcccactggtgccgacatggcagaaattggtgtaattcagtctaaaatggaatacagcgaacatattagttagcaaatgagggtcccagaaaaattaaaggtagaaccaccaaatgctgccctggaataaggagttccgaaggctgctgtcattatgcaggttgcagagaggactgtgggagcaggaaataatgaagacattccacttccaagcccagcagatcttgatcttcatccatcagctcccaggggaacctgggtggctcagcaattaagtgtctgcctttggctcaggtcatgatcccggggtactgggatcgagtcccacatcgggcttcccacagggtgggtgcttctccctctgcctgtgtctctgcctctttctgtgtgtctctcatgtataaataaataaaaccttttaataaaagaaggaatttgcaggaaataaactataagtatgacataactttgttaaaaattacaattttccgtcttatctgaggaaaatgaaggcactcatacgaaaagatatgtgcaccccaatattcattgcagcactgttgatagtagcaaagatatggaaatgacctgagtgttcatcaatggatgaatggaaagataaactgtggtacatatgcaaggaaattatgtagctgtaaaaaaagaagatcaaaatcttgccctttgcaacaacacggatgggtctctagggcattatgtgatgtgaaataagccagagaaggacaaataccatatgatttcatttatgtgtgggatctaaaaaatacttcataaatatggggaacagactggtggttgtcagaggcagtagttggggggtgagtgagggagaaataagtaaaaggagtccaaggtaaaaaggggaaaaaagggaaagaatagtaaggagatgactaatgcatttagttaggaagaacaaaactgcaggcatgtgaaaaagaaacaaagttctgggtaaagtaacattattttctctcctcctgggtgtttgttctgcccttaggccttgcttctttcttactgaaacactcattcctcagatctctgcttgtcagtcttcggaaataacatttctgtcccggtgtcacctcctaaagtaggacttcagccctctccttcagtcactctatcagaccctttattctgtttaattttctttgtagaactcatcacaatttccaggcctcgtatttctcattaaatatccttttcgctggtggtatgtttccttcactgagtctaagcttttggaggtaagagactatgtctggctttttcactcctgccctcaatcccacacctaaagcaacaggagacacttagcatctgatcggatggattgatgcataaatgaatcaaagatgcagtaattcacttgactacaatgggcctgttttattaaacacaaattagagctatgagtattttctcaagcttcctttggaacactgcatagacattcctaatattaggaattatccaaaatgaataactgcattcagctctagtcttctgaaaattctgaggatgtccatgtcttctctgcacctcctggtccatgcagtgggtcatttatccacattaaacctagaatatgttagaatattaaaggcatgggctttggagtcaaacagacttggattttattccctgctttgacacttagagttgtgttgctttggacaagttactgaatttgttcaggcctcaatttcctcttatttaaaaatggaataatattagaatctaccagatgggattattggggattagaagatacaatgtatgtgcactgtatgctacacagctgaacagggaattgtgggggagaaagaaagagagagagaggatcagcagaagggatctggaggcagcccacccagaagactcattcagagagaatgggaggatcttgcaatgttggaggtggggggtgggttatacaacaaggaggagatttatttattttttattttattttattttatttttaaggaggagatttaatgttctcaatatatgagagccatgatacgtcatctgtagggagaacctgcaaagagggagagtttgaaaatacagaataagagttatctattgaatgtctattctgagagatacagaaaaggatcagatcaagaatatagaaggaccaccagcattttccacagcgctagaacaaacaattccaaaatctgtatggaaccacaaaggatcccaaatagccaaagcaattctgaaaaataaaaacaaaactggagacatcatgattctgaatttcaagctatatcacaaagccatagtcatcaagacagtataagtcaatggaacaaaacacagacacataaatcaatggaacaggataaataacccagaaatagacccacaactctatggtcaactaatctttgacaaagcaggaaagaacagccaatggaagaatgacagtctcttcaacaaatgctgttgggaaaagtagacagcaacactgagaagaatcaaactggaccacattctcacaccatacacaaaactaaattcaaaatggttgaaagacctaaatatgtaacaggaaaccatcaaaatcttacaggaaaacacaggcagcaacaacctctttgaccttggccatagcaacttattagatatgtctctggatgcaagggaaacaaactcaaaaatgaacaattggaacttcatcaagataaaaagcttctgcacagcaaaaaatcaacaaaactaaaaggcagctcactgaatatgagaagatatttgcaaatgacatatccaataaaggattactgtccaaaatatattaaggatttaccaaactcaacaccccaaaaataaataatccagttaagaaatgggcagaagacatgaagagacacttttccaaagaaggcatccagatgtctaacaggcacatgaaaagatgctcaacatcactcatcagggaaataaaaatcaaaactatgatgagatactgcctcacacatgtcagaatggctaaaattaacaacatgaagaacaacagatgttggcaagtatgtggagaaaggggaaccctcttacactgttggtaggaatgcaaactggtgaagtcactctggaaaacagtgcggtggttcctcaaaaagttaaaatagaactaccttaggatccagcaattgtactaccaggtatttacccaaaagatacaaaaatacaaattcaaggggtatatgcaccctgatatttatagcagcattatcaacaatagccaaactatggagagagctcaaatgtccatcaactgatgaatggataaagaagatgtggtatacacacacacacacacacacacacacacacacacacacacacaccactggaatattacttggccaacaaaaagaatgaaatcttgctatttgcaacaacatggatggagctagagtctattatgctaagtgaaataagtcagagaaagacaaataccatatgatcgcacgctaatgtggagtttaagaaagaaaacagatgaacatatggaaaggtggaaagaaaaaaaaggacagagggaaatacgccatatgtgactttttttttaagattttatttatttatttatttatttgtttgtttgtttgagtgaatgagtgagtgagtgagagcatgagcaagggaggagcagagagagaagcagactccctgctgagaaggaagcctgaagtgggactcatctcaggatcctgagatcatgacctgagcttaatcaactgagccacctaggcacccccataaatgactcttttttaaaaaaagattttatttatttattcatgagcgacacacagagagaggcagagacataggcagagggaggagtccctgcagggagcctgatgcaggacttaatcccaggaccccgggattgtgacctgagccaaagcatacccaagtgactcttaatgacaaaaaacaaactgagggttgatggagggagatgggtagcagatgggctagccacctagcctaaataaatgggtttatttagggagcgcacttgttgtgaggagcacagggtgttgcatgtaagtgatgaatcaccgaattctactctgaaaaccaatatcacactatatgttaactaacaaaagttattttttaagattttatttatttattcatgagagacatagagagaggcagagacataggcagagggagaagcaggcttcctgtggggagcctgattcaggattcgatcccaggaccccaggatcacgacctgggccaaaggcagatctcaaccacgagccacccaggttctccctaactaccaaaatttaagtaaaattttaaaaagaaaaaaaaatgtgggaggacaatttttaaagtgagactgtttactctgaaactagaagaaaaatgtgcttatgaaggcagatactaaatttaaaagatttggaattgtcccctgaagttccaatgacttctgtgtaatacatgcaaagcaaaaaagtagacttctggtcaaaataaaacacttttaatgaccttattaaacattcgaacagtgatcagagaaacatcttttccaaggatgatcaaattaacttttaagcaaaagatcagcagagatcaaggcatgttggggtcaaacatatcttgaggtgtcttctgagaaccaacacattcttctttcttttgagaaatgatccaacaacccctttcctcagaggggtttgtgccttagatcttctgcctctggccatggtacattggactcagatggacacctgccccaagtttgggcattcatttgtttttccaataatttaaaattgtcactgggagatagtgctgttgggtgggttcagctgaggtgctgtggctgcgggcggacatgttagatgaaaaggatagtccacagagacagaatagatatggctaatgcaactaacatgcagagggacaacacaggccatatggcccagagagagaaagagagcaagaaaggatatgggctatgggctagagtctatgggcttttcagttctgagttctgttgcctgtaaggcttggctaaaatccacctttgggttcagggcaccactcctgtgtctttattgtaaatatcctctgcttacatctgtgatcattttaggagggtttctgttacgggcaaacaaaggcttcactaggaccactctcccccttccaacagggtcttcttctggccgttgattcctttcaacttactctctcttgggaaatctacagtgtcttcacgatctcttagtttctttcctctctatgaccaaacctcacaatgccaaacccaatttgcccctacttacttgtatcttccccaactcctatgccctaaaagacccaggttcccagaaagccttcctggaccacctctgaactcagggatccattcttagcatcaggctatgtcagtgggtcccagttatcagatcacagtctaagttcaggtggctgcatcagcaacatctgggcttgtttaaaattgcagactgctaccactctcctcaccctccaagattctaattcagtagatctggctgaagcctgtacttttaaaaaggctcccaagtgattctcctgtacattccagtttgaaaaccactaagaaagatccacctgaactctgtctaaaccagctcttctactggtatgactgaccccaggttaaggaagtaatcatcatatccaagccttggacctctctttgtcatgcgtgggactccaggggatgtagaaaaaggagatgacattgtagatcatggctgtataccaaagttctcttcattacagagtaaatctggacaagagtagaattcccatgaacatttcctctcctgaaaactcctttaggggcaaatctgaattcagaaggtaaatttcatgaagtccttgtgagaggaccgattcataactaacacaccatagagactcaaacagaacaagacatagctgaactggcctgaggatagctgcctatccccgttgaaatgtcctgctcaatagtcatcacctggaataccctcttccagcatccctcacaccctggaagaacttgccaagatctgatagaaatgatacagtacaaacaccatttaaaaatttattgccactaaccagagctttgggtagaacaagaaagaggtgtgtgtgtgtgagtgtgtgtgtgtgtgtgtgagtatgtgtgtgtgtacgtgttgggggtgggaaggggagctagctgctgccccaccagtcctgcagtgagtaccaggtctaagggaggagacagacctatagcacagagtttgatcccatccaaagtcagcacaatagagatatacttagtagactgaggcactgagtatgcaaaggctgtcagaaacttgcaaggaatccatagagcatctcccacaatcctttctcggaaggctcattacctaaagtggtaaaaagcatataatcaagctcacaatgctgggatcctatctctgattgcccacctccccaaaacctcaccccctcatcacttctactcttctattccctgcccgctacttgtctattcacccttcccattggccccattgctccccaaagaatgatcctgcaccccatcctgttcagagacacccactctcctgcccccagactcctgggggcctctgtacctggggccgctggacaagcacgtgcctctgatgatgaagatggtgcccacaaggaagcccaccaggccgagagccaggccaagtgcacagatcagagtctcgatggtgtctggcactgggataggcacctggggctcttgggggagaaaggaaaggtcagggggttcagagaaaggattccagagcaaaggaaacatgggtctgtggagagtgacctggtgaggagctccgtaccccagtgcctgagaagcggctcttccagaccccagtgctccaccttgcagtcatacatgtcttctgcagagggcacgaaggtcaagtagcagaacttgcggaacagatggtcaggctgggaatagaagctggtctgggctaccccctcgctgattatttgaccattgcgcagccaggtgatattgatcacaggagggaagatgttgtccacaatgcagatgaggacattgggctggcccagctccactcgaaacttggggagtacagccaccctcggaggcactaggaaaaatgaggccttgaattccaaaggctcatccctgtacctgggcttcattaggacttggattaagtaatgtttcctcctatttagccatttacagggaggaaatgctctgggatgtaacagcttgggtgggaggggtgcagagggagaagaggctgagaggggggcacctggaacccctgtatctgacaggtccctgagagggcatccaggtggaagggtcagtcctcaagaaggaagagtgtgctgaaggggtctgggaagatcaagagcctcctggaaaagaaaggggctgattacaacagtcacagaggctgagagatgtgctggagcagatggaggcctgtgaggtgggaagaagcttctctgggcctcccttgcctaacacagggtagcagagggaacaaggagaggaaaggtgggtaccgttgatggctctggtgcggttggagcgttccaccaagacatccaggtgggctttgatcaccgcgatgctggccagcccattctgtgggtcaaagtgggccaagttgccaaactcaggcaaacgccacacagcctgcctcttcttcagctccacggagaacagctgttccccatcaaattcatgggcaaactgacccgaggaaccataggactggtagaaggctggtccataggagcccatgtgatcagctgtattgagtgagttcagggtcagagacagaaaagaaaatgtatcaatctcatctaaagcaggtgacactttaaatttctgagcctacatcccatcctgggttctctatgagggcaaagttgagctgttgagctggtctttggacagtggaagtgttgctggcgggggggggggagaaaggagaggacagagggacacggacatgtgcccaacacactggcaggaacagagagacacgagtgcagtccagcataccaggttgggaagaagagaggctgcctcaaatcatgcttgggattcaaagttaaatggtagccatgatcatcagctctagttgtgctatgaggtcctgtgtgtgagatgagtggtatgagggagtgggatgagggaaaatgattaaggatgggagcataagtagagccttgggcacagagatgcagtatatgtgggcaggaggggagaataggtgatggctggcagaagtaagaattaagatttgtgacagagatcaaacagacaggaaaaagcagcctggggtattgcagagagcactggaaaaggagtccaaagttcaagttaggtttatgccccagctcttccacctcaagagattatgatccaaggtgtctctttccataactgaggcttagttctctggaaatttgggttagattttaatcagtaagggacctctagaaatctatgcagtcatcgagggactactatgtgcccagcatgatgtcaggccccagggaaatacagatgaaccagctgtggatccctcactcaaggagctcatgtctagagcaggataaacagttgactatccacatggcgataaacattgcagtaaaactggacctgaatgcgcacactccaagtcaggaagtgacagaaaagtcactgtgcttggcggaaggagaatggaggtttgggtctcagaaagaaggaaggagctggggaggcacctgaacctgcagctggcatggctacactgagctgcacctgtatgtttaggtctgcaatgaacatgatagaggtgagagagattgaggatctctcggtaaaggaagttgcccataagccagagaaggagaacaatctatgttctttctatactgtctctcatagaaccctaaatttcctttcctcagccgatccccctcagcactcaccctcgatggccccagtttcatgggggctcaggaggctcatcaaggtgtagagtaccaggaccagccccctactgaggaccattgccctggtgctttaaccaagtaagtctctcagagtcgggctgccgcagaaggtaaagaaaagaggaaggaaacactctaggatggggaagacccctgctgtattcagccaatcagagacactccttgagttaaagtggctgttgttgggtgaagaagtaaggagcctaggtggaaggtggaagaatacactgggccctcattgcaccacggaggcctggtccacagaagagtcaaaaggaagcttctgtttgggagatggcagagctttaatcaaccattactacaaactctaagaagagacccaccaaaggaagagaaaaggccatcagagaactacacagctgagctcaaacaaagcctctatcttgctttgtgatctgtggtgtagagaaacccagtccccctctaagtttctgcagacacatttggaggcaataataataataataataataatataaactgtactcaggaactttgaaaaggagatgttgaatacacagtaggattaaaatcctttaaacctttaaattgttttggaaaatattactttatttcattgtgtgaaaaaaaagtgtaattgtcagagatgtttagagtaagatgtttagagtaaggagaactgtaagaagcctcaatggactgttctagggggggcagagggtgctggataacctccatttgtccctccaggtctcctgggcaccctccttcatgctgccagcatccccagccccagcccccgtccctcccccagcaacagcaactcctttccctcccgcttccggttgagctcagccaatgggaggcgggaggaggatttgttctaatatgaaaactatatataaagctaaccatctctccagataaggaaaagtctaaccaaatacctgaaggcagtttctgaaagatcagaaaataaatgattttctgcttggaagggaactaagatatcatctgagtctatggttccaaaccccgctacagaggagaatcacctggaaagttggttaaaaatgtagattcctggggcgcctgggtgactcagatggttaagtatccaactcttgatttgggctcaggtcatgatctcagggtcgtgagatggggccccgagtcgcactgagcgtaaagcctgctcaggattctctttctctctctccttctgcccctcccccttctctctttctctctctctttctcaaaaagtaaaataagttttaaaagatacggattcctgggttacatcctgacctgagttaaagcagccttttcaagggtagggctgagagacctgcgttagtaacacgctccctaggtgaggactaccacactggaaaagaaccatgcctcctgctttgcaggctagagagaacctccagaaggatctgaagaagatcttgcagctttcgaccacaaaccacatgccatttctactcacattccattggcaggaattaaacaatgaccctgcccctgggcagggctgggaaaaatgtattttagcggtgcgttcaggaagacgtagtggttggggagcacatcgcaggcactatctttgccccatccctgctctatttattgtgattattaacatatttgaacctgtttctaatattgtatttatttcaatctttccatttgttgttgttggttttttccttaggcttcatcatctaaaaaaaaaaaaaaaaagtgttatttttaccttacctatcttccctctagccagataagaactttagcatgctttcaaattattcatatactgcctctctacttcaccaaggagtttgatcaactttacttctcatcctttttggcaccccctgacatttttttctcctttattggaatacttcttccaaaaatgttttaagtatgagcaaatcttctgaagctttgtatgcttgagaatattactgttacagcaccacttgtgaacgtttagctatgcattaaattctaagttgagggactcctgggtggcttagttggttaagtgtccgactcttggttttcagctcaggtcacgataccccttgtatcttttactctagaagagttagttcttcaatgtagtcttcccattactctgttgtttttctatctctcccactatttattcccagtagtggggtttttgactttcatatttttttcatgcctagaacttctatagagctttttctgtattcctttttttcatattataatagtttttctttttttttaaagattttttatttatttactcatgagagacacacaaagagaggcagagacatagacagagggagaagcagcctccccccagaagccttttgcaggactcaatcccagaaccccgggatcataatctgagccaaagccagatgctgaaccactgagccacccaggcatcccagtttttcttattttttaatgtgtttttcatgctccttttaagtggctatcctatattttctaatatttctttaaggacacatatgggctctctgttgcttttcttttgacatgtgaaacttcccaaaagggagggagttattattttggccttcaggtgcccatctatgtcagtatcatggtaaagagagggaaggaccagagttctaggacagcacaaaaccagttgccacccttttggtgtcaccttactggtggcagttcaagtcagggcctcaggataaggagccctgggaggggctagtcctctctccttgtccgccagccctgaggacggtccgaaggagtgctgcagagtgaatgactatggcatcaggtgcacttattgtcctgcaccctccccactctagcagggatttcaacctagactttatccccaaccctctatctccaggcatgatccagcaatcaggatcttgggccactgttttttgttgttgttgttgttgtggttgttgttgttgttgttttttgcattatgggacaggcaaaaattgttcaaaggcaacactgggagaaagcaagaacagattgcctctaatgaatcttctcacagcaagcaagctcccccaaaacaattaacagtgtcactagggattccccagtttccctccactgcttctccagggttggtttttagagctgggaactaagaacatatgctaatttatctcaacaaaaagcagatctctccattatattcctataatatttatgtatgaactatattcccccctatatagaaatgccaagcagttgaggttcattgactctgttatagaatctcccctctcctccagatgctagcccagtattaaataaatgcttttcaaataaacaaatagatgctaacaaataaaaatcaatgaagtgggaacacctaggtggcaaagttgggtaagcctcccgactcctggtttcccctcagctctgatcccaggatcgtgagatagagcctcctattgggctctgtgctcaccaagggctttgctttgagactctctccctctccctctgccccccacccctcccactgctcatgcatgtgcacacatgctttcacactctctctcaaatgaaaaaatctttttaaaaaatcaatgaagtgaataccagtggttctagagagagacattccagcactggaaacaagtactgaaaataagtacatgctcaacaaattgctgagtaaagtgctctttgaatatgacataaattcagttcctctaaattgtctaaaacactgactttgagataaacagttgtatccatcatgttgagcataatatgctctggagcataatattaagttgaggtaggtgttaggagatattattcattaaacacatatttaatgaatatgtgtttcattaaacacacataatgttttttcattcacacattatggaacacccactatgtcctggggacacagagaagaacaggacactgccccttaatcataggactctgctgtccaatacggtcaccacctgccatatgtggccattgatcacttgtaatgtagccagtcctgagatatactataaatagaaaaccactgtatttcgaaggctttgtaaaaaatatatgcattatatgtatttaaaattatatatctgaatatatataatctcattaatagtttttatattgattgttggttaatttgcaatattttggatatgctgagtttttgatatattattaatttcactgtttcttattacctttttaaagtgactagaaaacttgacatcgaatgtgtaactctcattgtattcctattggacagtgctgctctggttactcttggttggctaccaattaactattcaatgcttttcttagattcttcaatttagctgtaagcttttcaggggttggaggtggggggatcctttcctgtgatcacctagagattccaccagagggcgacttatcttccaccgtttcaattctggatcttcaatctattttatgtatatgtattgaactacttttagtttattatgcttcaggcactgtactaggctctagaaccacaattatggttcctgccatcccagatcttacaatttatcaagaaggctataaacaactaattatcatgtgaaaagaaagaagaatcaaatccattatattaatgtgccatatgaatgttcatatggtcttcaactttttgggatgaccctttcttagtaattaattaaatagttccaacagataatttcaggaattcaagtggtctagttctctcttcagaattccctggacagggcagcccaggtggttcagtggtttagcactgccttcagcccatggcctgatcctggagacctgggatcaagtcccatgttgggttccctgcatggagcctgcttctccctctgcttgtgtctctgcctctctctctctctctctctctctctctctctctctctctctttctctctctctcataaataaattttaaaaaaatttttttaaaagaattccctggacagagaagtgatacaagtgcatgtttccacatgccagatgcttaatgtctttttctccaacctcctgctcctggcacactgtttcagtcattttcaggctgctctctatcatagcaagtggctttctgaccatattttcaggctttgaacttctgtcgtgttgctggaagctgcttgcttcccttagaactttcccctcccatttcctgactctctaaatcccagacctcttatctcctgggaacaaactggaaattttaagcaaaaatcactctttgttctcgctttggcagcacatatactaaaatcactcttcctttatatctgtaagtagcttgatatataaaaatcaaaactcatatgtgaaaaacagtaactttttaaatatatatatatatatatatatatatgaataactgactgatctcattatactctggagcaacaaatccaaatgatggtaggaaaacccccaaactggacttttaaaggtacagatgcagctcttcctatttaaatgagatttttttttaatttttttttattttttattttttttatttatgatagtcacagagagagaaagagaggcagagacacaggcagagagagaagcaggctccatgcaccgggagcccgacgtgggaatcgatcccgggtctccaggatcgcgccctgggccaaaggcaggcgccaaaccgctgcgccacccagggatccctaaatgagattgtttttgaaaagattcgtctctcccctgggaaaggctgtctttcagggtttttcctctttccccttctccttccctcttatttgaatgatatcctgggacagaaggtaaatttatataacattatgactatgggaagctgtgtcttttttctcttctctgatggttctctacttccagcagcatcttaatcattggcctctgccctctctccttcaattaccaaagtttctgtggctggtcgaattggagatcagttctccttggcaaaggcaacagggctcagccactttccccactattggccccagtgcaagcctggctcttgctgcatatcccttacatcttgatgcacctgctacccgatcctgggcttgcataactgggactgctggcccttgaatccaggccaggtctacctgctccatgattaccttgaaaatcaatttactgaaaatcaactctctaaaaatcaagtcatgggtgggggtggggccggctggctcagttggtagagcttctaactcttgatctcccagttgtaagtttgagccccatgttgggtgtagagattacttaaaaataaaatctttaaaaaattgttttaattaaaaataaaaatcaactcaccaaatggccaactaagctgaaattaattcatcaaatcacaatcttcctattttaccgatttaccaaaaacttgattctttaactttatgaagtttttgttactttatacattgagttgaatggttttatgcattcaatttttttaattttagttgattagctttccttttttcttcatattagcttttaaagtaatgttcagggatccctgggtggcgcagcggtttggcgcccgcctttggcccagggcgcgatcctggagacccgggatcgaatcccacatcaggctcccggtgcatggagcctgcttctccctctgcctatgtctctgcctctctctctctctctctgtgactatcataaaaaaaaaaaaaaaaagtcttaataaaaaaaataaataaataaaataaagtaatgttcagtttgccaaatgttacaaatacaggaggatgataatggctgtagagttttttcattgccccaagtgtcctcatgaaaacagatcaattgggatagcaaaggaaagtacccagagacaatgtctttaacaaacgagggacaaggcagtacctggaactctagaatatgaatgggtaggtccaaacaaccacacaggatcctataggttctagctccgtgtggaggtagcaaaaggatgaaaaaggagagttttgatgtttataagatctcagaaacacagaaccagccaatgaatattcacctccaaaagaaaatagtcccagcctaaaatgcacactcagtaagaaactctaaaaaccaagccaagcctgaaattctaaagccaaaaatttcagaaacttctttttctgttactaatgtctgactttcaagactatgaccttgctgtgtctatcaatattctgtttggaattctctttgaagttatatgataaaaatccaaatgttccccaatacaatgagtatctctgaatgaataaaatcacatccaaagatgtgtgaaaaagaaaatagtaagacctttagtaaataatatttttataataaaatattatccctatatgtttcacagagacatgtgacttccacctgcctctactaatttagagtatttctttcataatgaaaaagcacattaatatgttttcctaaatcaaaggtcaattttctccttgagatcagttatatctctagaacacgaaagcagcttccagcactatgtatttaaaatagtaatcttttaaagttttagctcctacctttaaatctttgattaatttttttaaagattttatttatttatttgagagaagagagagagtgtgagcacgatgtgggaaggggcagagagagagggagaagcagacgccctgcagggtctcgatcccaggaccctgggatcatgacctgagctgaaggaagatgcctaaccaaatgagccatccaggcacgcctctttgatcattttgacataattttgtacgtgataagggtccaacatcattcttttgcatgtggatatacagttttcccagcactttttgttgaagtctgtactttctaccattgaatgatcttgctgctcttgttgaaaatcattgactatataggcaggagtatattggggggggggtctctattttattccattggtctatgtgtatgtctttatgccagttccacactgtttcgattcctgtaactttgtggtaagtttgtggtaaatgaggaagtatgacacctccaactcttctcctctttttcaagattgtttttggcattttggggccccttttgaattttagatggataattgtatttatgcaaaaatatcattaggattttgataaggattgtactgagtatgtatattgctctggataatattgacattttaaaaaatattatatttatttattaatgagacacacacacacacacacacacacacacacacacacacaaagaggcagagacacaggcagagggagaagcaggctccatgcagggagcccgatgcgggactcaatcctgggtctccaggatcagaccctgggccaaaggcggcgccaaatcactgagccacccaggctgccctaatattgacattttaataacattaagtcttccaatccatgaacatggaatgtctttccatttatttacatcttatcttctttcagcaatgttttttacctttcccccttctcatagaacaatcatacataggattactttattcctacatcttctcaattgttttttccccatatttgcccttttcctttcctacttggcaagatttggctttactcaaggatctttttgtgatctttgtccagtttcattctagtgataactaccttgctatgatgaatgcctacatggacagttgttcatttgccttctctttctgtactcattcaatgtagatgacatattccttcctgtaaacctagactacttcaccaatttgctgatctttctagtgtcctcacacaacatgtacttcatcatcctttcggatggcatttgttcaaacattatacttctgtctcagctctttggaaaaaggggacgagggatccctgggtggcgcagtggtttggcgcctgcctttggcccagggcgcgatcctggagacccgggatcgaatcccacgtcgggctcccggtgcatggagcctgcttctccctctgcctgtgtctctgcctctttctctctgtgtgactatcataaataaataaataaatttaaaaaaaaaaaggaaaaaggggacgacataatcttcctgtgaatgtgggaaggtgcattgaaatgcattttatagttcttgctctggtcaaaagtcacaaagattgaacttcattttggaggctggcacttcaacgatggctgcaaaagtctcatcagtgttttttagtcgtcagtgcatatagtattcacctccttgtttaggttaattcttaagaattttagtctttttaatggtattataaatagaattggtttcttttttggattgttcatcgttagtgtatataaacacaattgatttttttattgaagtatagttgacatacagtattcatttcagctgtacaacatagtgattcaacatttatatacattattaaatgatcagcattaactctgtcaccacacacagttattacaatattattgactatattccctatgctgtagtttgcctccccatgacttttaaccagaagtttgtacctcttagttctcttccatttatttcacccatcccctcacccccttctcttctggcaaccaccagtttgttctctgtatttatgaatctgtttctattttgctcattcgttttgtttttagactccacatataaatgaaatcatatgctatttgtctctctctgtctaaattatttcacttagcataataccctctaggtccatccacatagctgcaaatgataagacttcattcttttttatagctgagtaatattccattttatgtatatgccacattttatctattcatctattaatgaacttaggttgcttccatatcttggccattgtaaataatgctgcaataaacatagcgatgcatatatccttttgaattaatgttttcattttctggggtgaatacccagaagtggaattgctagatcatacagcatttgtttttatttttctgggaaacctccttactattttccatagtggatgcaccaattcacattcccgccaacagtgcacagggatcccttttcttcacagcttcatcaacacctgttatttcttatttttttgagactagctattctgacaggtgtgaggtgatagctcgttttggttttgatttgcattagaaacacaactgtggatttgtgtggattctgtaccttattactttgctgaatttctttttaaattattttttgtgtgtggaacctttaaggtgtggtacttattagatcatgcatctttgaacagagataattttactctttccaattaggatggcttccctccactcccagtttgtttaattgctctggctagaatttctagtgctattttgaatagtggctaaagcaagcatccttatcttgttccggaaattagaggaaaaactttctttcaccattgattatgctgttatctgtcagattttcatgtatggcctttattatgttggggttgttttccttctactcctagttttttgagtgtctcaccataaaagagtgtcaaaattttatcaaatgcttttttgcatcagttgaagtggatcatttcagtccacttaagtgtcattatattagtcataatgttagtgtcatatatgacattaattagtcatattaattttcatatgttgaaccatggttgcataccaagaataaatcctaattagtatgtattcttttaatatgctgctggattcagttttctcgtatttcaatgaggacttttgtatcgatattcataaaggatattagtctgtagttttcttttctggcagtgtctttgtctggctctggtatcaggacaaaaatagaatatcataaaataagttagaatgtgttctctccttttcagttctttgaatttgagaattggtattagttccttaacatttagtagaattcaccagtgaagccatcagctccagggcttttccttgtccacaggtttttattactgatttaaccttactacagttctactcagactttctatttcttattgattcaatctaggtaagttatgtgtttctaggtgtttgtcgattccatccaggttatccaattagttggttatccaattgttcctggtatcatcttttaatccttttttgtttctgtggattcagtagaaatgtccccggttcatttctaactagaaatttgagggatccctgggtggtgcagtggtttagcgcctgcctttggcccagggcacgatcctggagacccgggatcaaatcccacgtcgggctcccggtgcatggagcctgcttctccctctgcctatgtctctgcctctctctctctgactatcataaataaatttaaaaaaaattttttaaaagatttaaaaaattttttttgaatcttctctctttttttttcagtcagtctatataatggtttctcaatcatgtcactctctttgaagaagcaacttttgggtttatttccagtatatttttctcttctctatctctgctttaatctttattatttccttccatctgacagtttggggttgcttgttcttcttttgctagttcctaaaattgtgaagtaggtgattggtttgaggtctctcttcctttttaatgtgtttacagagattaatttgtcccttagcacaccctttactgccagtatgcagcattgtgtgttgtgccttagcttttgttcatctaagtatattctaatttcccttgtgatttcttctttgatctattgtttatttccacaaatttgtgaatgtttcagtttgccttctgttgtctctaaatgatattttaaattaatgcatcacatttttaagaatattctgctggtatttacgttaaatgcactatctggaggttgtggtatttttcattgatcagtcaaggtacgttccacgccttttgaggccaagtctatctatggcaatgcttgaaaggtgaaaagacatgttaactttcaagctaagattttcttacaccagggtttaagaaagctttgtgaagtttattcctccatttccagcacgcaacactacaaacctgaggtatatttaagatgtaatactggcaagaaaagagagagaacctaactgtggaaaagagaaagaaatgagggaaggtttcctggaggagtgacatatgagccaagactgtccaatagcaggaaaggagtcagaacagcatactctccatttccccaatgttttctgtctccgcaatgcctccacctgaggccttccccactagtgagtttctgcccctccctggaccccacaagaaatatcgcctccacagaagccttcatgttcccctcctcctccagctgccagcagaattgattgctttctccaccctctctagagatcactgaattaccccttagcattgagtcacgttttatatacttatgtatatctatgcgtgtttactttttttcttttccctgtgaagggcctattgtttaatgttcagaaatcatttggttgaatcctctcctctcataggtgagaacacagaaaggttctgtgcctaactcactattacaaaagatagtttttaaaaatccaaccctgaggtgaactgttttgaggagaatagctagaaccatgcatattaaatatattgtcaaaggttcaaaataagggcacctggatgactcaaccggttgaggtccgcttttggctcagattaggatctaaccaccacccccttcaagagctcccacctcagacgggtctctgcttctccctcttcctctggccctctgctctgttttctctctctctcaaatgaataaactcttcttttttttaaagttcaaaatagccaagtcaaaagcaatgaatcactattttgtaaaaacttattgtacacataccaaaaatagtttgcaaaccgggagctgtcaaaccagagcacagaatgagacttaggggtatattgttataaaatagcttatgccgtgagaaagcagtgactgtttttcacagattggctacaatataattttcagtggtttcttcatatcaaccatgggaaacagtccaatgttgcttatttccagaagagcaagcaagaaatgatcttggccaagacagccttgcaaatgcaaaataagctaaattaagctttgtttgcatgatcaaaccggctagtttgcttagaattttctttttttttttttctatttttatttatttatgatagtcacacaaagagagagagaaagagaggcagagacataggcggagggagaagcaggctccatgcaccgggagccctgcgtgggattcgatcccgggtctccaggatcgcgccctgggccaaaggcaggcgccaaaccgctgcgccacccagggatccctgcttagaattttcaaagctggtctccttcggtgttgattgtaacagacccaatctctcagtcaatgcaagacacccccaaaagttccacgaatacaaagcagcgctacctgggcggcactaggaccccaggggcacccgccggcgggtggtggcgcccgttagacgttcggcgagagcggggagccaggggcgggcgaggcggtaggagaggccgacggaggcggccgtcccgatccgccccccgggccgcgaggaggtgctcaggtgtgcggggaatggggtccggcaatcccggcgcggccgccgccccgcggcgcacgttccggtcgcggcgacgctgagggccccggccgtctcccggggcgcggcgcgcggtggacaggcctgtcgtaaccgcgagaggagagcgcgcgcttccgcggggacagcagcctgtcagagccggggcggcggcggggcctgggacccggcggagcgagtccccgcgcggacgcgaacggaggggcggggcttgggggcggggcgagcgagggcaagaccggaaggggcgggaccgagagaccgcgcagtcggggctggcccctgggggctgagaggtgctgacgggcccttcgggacggcgttgtgggaagaaacgccgtggggaaggcggatctgagatattcgaggggccccaggttactctaaagcatctggagccgacgagaaggcgctggtttccgggggggaatccggggagacgagagcgaaggagggaatcgcaggaacccggacagctgtgctgtttgacccagaacagcctgccaaggaaaccagaaggtgaagagcaggtactaggagaagcgccccgagacgtgttccagaggctgaggttgagagggtgacctaagccagcggtggcaatgacttaacaagatgaaggaaaggcgggttgaactgtgtgttcggaaatcggggaggcttggggaggctggctggctgcaggatggggagcaggagagtaccaaggggggccgagaagtaagggcggtgaggaggagtgtgaagcctaagccccttgggggctgggatggcattttaccttgatttcccgtcgctggtacagagtagtgtttgagctaaatggcattttcttgaaggtgattagcttccggatagcagtgctggatgccagcctgaggagtgtggatttatcttctaggccaatgagtcccaactcctgctcaccggaatctcctagaaaccttgcctgaagcacagattccccaaatcactgcccagagattcagattcagtgggtggcgaggtctggaaatctgttttcttaatgagttcccaactgattcccatgtagccaggtaacacctggcagatcctgaagatttctttttttcagttttattgaggtgtaattgacaaataggaattataaatatattaattatatatgtttaaggtgttcaacttgatgttttgatatatgtctacatcgtggaatgattacacaatcgagctaattaacatacccatcatctcagacagtagccagtgtctgtctctctgtgtgtgtgtgtgtgtgtgtgtgtgtgtgtgtgttgacaacactcgaggtctaccctgaacacatttcaactatgcagtacagtattgttaaccatatcaccacgctctacggtaagatctccagaacttaatcatcttggataattgaaaatttctaccttttgaccagttgctccccatttccacctccctctaaccccgagttaccaccattctgctctctgcttctaggagtttaactatcttagattccacatgtgagtaagatcatgcagtatttgcctttctgtgtctgccttcttttacttagcataatgttagctatatagctcgttagcatatgtattatgtataataacataatattttaatatacaatatatattcataggtatatacaatggatatatacttagaagtgggattgctggatcatatggtagttctatttttaattttttgagaactctccacagtgttttccataatggttgtaccaatttacattccctctaccagtgtacaaggattgcctcttctccacatccttagcaacacttaccttttgtattttgataatagccattctaacacatgtgagatgctgtctcgctttgtatgtcgagcttttcccatttttcttctaaattttatggtttcaagtcttacatttaagtctttaatccattttgagttgatttttgtatatgtacgagacaagggtctagtttcattcttctgcatacagatatccaattttccgaacaatattgaagagactctcccttccccattgggcatttttgaaactcttgttgaagactaattcaccatcgatgcactgatttatttctttgccctctattctgttccattcacctatatgtctgtttttataccagtagcatactgttttgataactttgtggtgcattttgaagttaggtggggcctctctcccatggggctaagaggtcccttttctccttagccagggatggaggccaagatcagcctttgaggatcattgtcagggctgccacaagctggcagccttgttttcctgcctcagacatctgtagttgctgggagcccctgcttgatccatatcaagcatgctagccccacagccagactagggtctgaactggcagcatggagcctctggctctccttacatagtgccaggctctcatgagctgatcctggcctgtgttgccccaaaagtaacttggcccctgcctactctataggcaacacctaacacacctaaacaggtagtcgtctacctcaaagatgcctttgaaggagtggggcctctcacctcctgctttcctactaaacaacttctttggccctaggggattcactgggagaagagagggttccaaaagtgggggacttctgttgtaaaagaggcttctgaggccacctcgctcagggagggtcaccattttcccctgtgtggattagcttgggtgttaccagaccactctatccacccactcagagttgtgtctcctgcagagagtcccatacagcattgtgaggcatgggatggtgaggaagagtcatgagtgggtgctggagaaggagcaccacagacatcaggacaaagaatcagacctgacactcactacatcagccgcaagtgcaagtcccgtttgtaagcagtttattgtatccaattggacagtttgggctccccacacttgccatgtgaagttttctgtgttgaagtactttcatcagctgacaaaataacgttttagaaaagttttaaagttctaacagtttttcttcactaataaaaattctgaaagcaggatgcctgggtggctcagtggttgagcatctgccttcggctggggtcgtgatcccggggccctgggatcgagtcccacatcaggctccccgcctggagcctgtttattcctctgcctgtgtctctgcctctctctctgtgtctctcatgaataaataaataatttttttttaattctgaaagcatcaaaaaaaaaaaattctgaaaacatctttttttttttgtcctaaaagcaataatccactttctgtgggaaaaaaaaaaataggaagattgttttggctatttgggatgttctgtgcctcatgtaattaagattattttttttattatctgtaaagaataccattgggattttgatatgaattgcactgaatctgtaaatcaccttgggtggtctggacattttaacagtattctcccaatccatgaacattgaagtcttttcatttatctgtatctgctttggtttccttcatcaatgttttacaattttcagtggccaagtttttcatttctttgattaagtttattactaagtattttagtctttttgttgctatgtgattaagattgtttccttaattttcttttcagataattcattgttagtgtacagaaacatcactggttttcatatgttgattttgtttcctacaactttactggattcatttattagttctaatagttttgttgctgttgagtctttggaattttctaaatatatgatcatgtcatctgaaaacagagataaatttatatcttcctttctgttttgaatgcctttcatttctttttaattgccctggctaggatttccagtactatgttgagtagaagtggagagagtgggtatccttgccttatatcagatcttagaagaaaagctttcaagttttcgtcattgattatgatgttagctgtgggggcttttaatatatggtctttattgtgttgaggtaagttcctctacatctattttgcttatagtgtttatcccaaatggatgttgtcaaatgctttttctgtgtctgttcatctgtcatgagatgatgatgtttatctttcattctgttaatatggtgtgtcacattgatttgccattattgaaccatctttaatcccacagataaatcccacttggtcatggtgtataatccttttaatgtgctgttgaattggtttgctaatattctattgagtattttaacatctgtgttcatcagggatattggtctgtggttttcttttcttcgtgttgtctttgtctagctttggtattagggtggtggtgggctcataaatggtttggaagtgttccttcctttttttggaagagttttaggatgattgatactaattttctttgaatgtttgatagaattcacccatgaagccatctggtcctgggcttttcctttttgggaggtttttaattactccttcaattttcttatttgttattggtctgttcaggctttccatttcttctcaattcctcttgttatatgtttcttttttttttccaatttttatatgtttctaagagcttctccatttcttccaggttatccaatttgttagtatatcattgttcataaagttccctatggttgggacacctgggtggctcagcagttgagcatctatgcctttggctcaggtcgtgaacccatggttgtgggatcaagtcccacatcgggctccccacatggagcctgcttctccctctgcctctgtctctgcctctctctctctgtgtctctcataattaattaattaattaattggttaataaaattccctatggtcttgtttatttccgtggcatccatttaatgtctgctcttttgtttctgatttatttcagtcttctctcttttctgtcttgttaagggtttatcaatttttttattctatcctctattttatttatttttgctgtattatttctttctatcttctaacttgcagtttggttcgttctttttctagttccttaaggtgtaaagtttgattgtttatttgagaccttttttttttgctaaaaacttcccccttagtattacttttgctgcatcccataagttttagtgtgttgtgttctcttttttctttttctttttttttttttccactgaaaagttttatgccttttggatagaaatgggaatttatttgccaggaaggatgatcccatcacacttctactgcaaccagcacatggcatctctttgctgattctgtgtttggccccaatgcagcctgtcctgcgcttcttgtctgcagtgctgaaacctggcctacacagaagtccaggccatagataccaatgcttgggtcatatttaatccccagatcagtgtgctcctggatccccaaaccaaagtttccagtatcagagaggttattttttcttaactcatactctcgcacctttagacctttctccaagatttcttctgccttggacctaaggactgtgcagtggacagcaatcttttcatttctcccaataccagggaatcgcactatgtatctagctttggagaacacagagttgacctgtgagctactccagcaccttggctgcctgggtcagtctctctccactctcccccacacagatgttgagtcagaacttgcagatgtgaagttcccacatggggttctcctttctaccttaatcctgtgccatggtggagaacagcatatattgtgttttcattttccttttctgaagatatttttaaaaatcccttttgaccaatggttgttgaagagtgtggtctttagtttccacgtatttgcgaaatttcccattttctcattgcttttgggtttgtttcattccatcatgattgcaaaagatacttggtatgattttgatcttcttaactttgttaaaacgtgttttttgacccaacatgtgtttgatcctggagaatgttctatgtatgcttgagaagaatatgtattcttatgctgttggatagaaagtactatgtgtgtcttttaagtccatttattctatagtgttgtttaactccactgtttattgattttctgtctggaaattccactcagtattgaaagtgtgttgaagtctcctactattattgtattgccatcaagttctcctttcagacctgtcaatatttgttctttatacttaggtgctctgatgttgggtgcatttatattcacaattgttatatcttcctattgaattgacccttttatcttaatgtaatgaccttctttgtctctaaagacaggctttaattaaggtctattttgtgtgatataattatagctacccttactttcttttggttacatttagcttggagtatctttttttttttttttttcattccttcatttcagcttctatgtatctttaaacctaaaggaagtttcttataaactgcatgtagtcggatcttgggtttttttaatccacttagtcactctttgtcttttgattggggggttaaaccatttacttttacagtaattattgattgagaaggattgttaccattttgttcattgctttctgtttgtcccaattttagtatatgtgctgctgcagcaagcacactttctgtttgtcttatagttctttgtccctctttttctctaccttcctttgcgtttatcttttttttgtattgataggctttagttatttcctttttcttttgtgtagcttctatacgtattttctttgtagttatcatggggcttattctagttataacactctgttttaagctgataacaacttaatatcacttgcatacaagaactctacacttttacctctcccgcccccacattatatgttattgatatcacagtttatatgtatttatattgtgtatccattaatatgattttggttatagttattttaatgcttttgtgttttaacttttacaccagaattaaaaatgattttctcgggcagccctggtggcgcagcagtttagcaccgcctgcaacccaggatgtgatcctggagacccgggatcaagtcccacgtcagactccctgcatggagcctgcttctctctctgcctgtgtctctgcctctctctctgtctctctctctctctctgtgtctctcatgaataaataaataaataaataaataaataaataaataaataaaatcttaaaaaatatattttcccatcactgttacagtgatatagcattccatatttgtctatattttcacctttaccaatatgtttcatactttcttaaattatcatttttctatagcattctttcatttcacttccctctaacattttttataaggcaggtcttagtggtgatgaacttcctcagcatttgtttgtctgaaaaagtctttatcttcccttctttttcgaaggacagttttgctggataaagcattcttagttggcagggtttttttctttcagcactttaaatatatcatcatcccactctttttggcctgccatgtttctgctgaaaaatctaatggtagttttattggtgtttctcagtatgtgacaagttgtccttttcctgctgctttcaaaattctctttgtctttgactttgataatttaatgtgcctcagtgtgggtttctttgggttcatcttctttaatattctttaggcatcttggatctggatgcctgtttccttcctcagttttgggaagtttccaatattatttctttgaataagcattctgcccctttgtctatcttcctcctctaagactcccataatgtgtatattgggccatttgatgatgtctcgaatcccttaagctatctttattcattcttttttcttttggcttctctggatgatttccagtaacttgttttcttttttctttctttttttttttctgtgacttgttttcagtttcactgatcctttcttctacttgctctagtctgctgttgaacacctctgttgaatttttcagttcagttattgggttttcaactctatgatttctgtttgatactttaaaatttttctctttgttgaaattttcactttcttcatgctttgctctcctaacctcagtgagcatcttaatgactattattctgaattctctgtggagtgaatcacatatctccatttcattaggattgatttcaagatatttatattgttcatttgtttggaatatatttccttgtttcttcattttctttgactctgttgatgcctgtgctttagaaaaaatagccacctctcctagtcttcatagactggcttcatacaagagatgacccttgccagtcatcccaaccaaagattaggagggtctttcaaatatttttttaaaagattttatttatttattcatgagagacacagagagagagaggcaggacacaggcagagggagaaacaggctccacacagggagcccgacataggacttgatcctgggtctccaggatcatgccctaggctgaaggtggcactaaaccgctgagccaccggggctgcccgggtctttcaaatcttaatgtgtgtttccaaaccactgtctgtgttcttagcagccaccaggaatctagagtgtgacaagtcctattagtgctccaagacaggtgaggtagaagccaattccctgagtagtagctggaaaagttgggtgcttcatgagtgatccaaggaacattctttcctcagggatattctgggagttagaatttatcactcattctgcactaggccaagaagaagagctgtgacaaatgtctgtattcttgttcagaccacatacttttaaaccattgctttgctctctgtagcccccagtggcctaatgaatgttaagccctgtcagctctcagagactggtgagttggaagcgagtctttccagtagcatctggaaaagttgcaaggctagatatatattccaactccttccaggaagaagctggaggcttgattttacttctggaacaagccagggggaagagctgcagaaagagcccacatcctcattcaagctttcgggagactagtgattacctgccttatcagctcccagaaacaagtaagttagaggctagacctttgggcattagtaagaaaagtcaggatgctagatgtgcagtctaattccttccagggagatgttggacgctgcgctttatcactcaagtgaaccagggaagaaggagccataggaggagcccatagacctattcaaaaccaccacttgttctctgtagtcccgaggagactagaccatctgtatctactagcctaattacatcatttatattttaaacagctagaaatcaactctataatgaaaatgtctaagaaacaataatctcatgtgccattagcttttctctttacaattttttttaaagattttatttattgatttcatgagagacacagagaaaggcagagacataggcagagggagaaacaggctccctgcagggaacctaatgcgggactctatcctagaaccccaggattataacctgagccaaaggcagatgctcaaccactgagccacccaggtgccctctctttacaattcttagtcaagcctaaagtgaacatctcccctttgaagaatggacctctatagcacctgagccttcttgtctaccatgtgacagatttctatccaggctacattcaaccccactggttcctgaatggacagcaggaaaacagctagagttatgtccaccaacctgatcctaataaagactggatcttccagatcctggtgatactggcaatgacccttcaccagagagatggctacacttgccaagtagagcaccccagcctggatggtcctgtcactgtggagtggagtgagttactctctgagttaggccctaaattctgaaaaacagggaatattctagttctgggatctactcattttgtcacaggtctatacgtgggggccatacctatctccatctttttcctagagaagtccctgagaatagtttagagctggggcagcagagacttgcccaccctgtcctaggaaatactaatgattcatagatctctgcccatgtcagaaaacctaggaaactcaaacaccttcctgaattatcctcacatgtgagaactgttaaatgccttcagccttttagcttatgtgagttattttgagaggcagctaccagaatcggcatgtgtgtgtccttttggaagtcacagcctaattttcagaacttgggggttctttctaaatttcctcctccttcaagttttatatctctcacagacctcatattggtattctatattaagccccagaatctcagacagtacgtgaggggtggtgcagcaggtagaggtgaaaatgacccctggtctgtgtttccctgagatacacagattctgctcagagaaatactggctagactctcaggctttgtgctggggctcatcttccttgtagtgagcatctgagtgcatactaggagcaagagaggtaagaaaacctgagagatggctgaggtttgctttcccctgacttactcaaccatcttcaattaaaaaactgatacagaaaaacaataccagagaatcctggagttcactgaaatcagattgttgggaagcaaaaatggcttgtaggaagagagaaatcccaggccagaattttatcccaaccagatgtatggagtctccaaatactctggtcatgtctgagttcatttagtaatgaattagtcttcagccagcccctgccttacttcccagtgattggaccatggcaatggagatgagatgggaaagtttatctaattgtctaagattctgttattaggtgaatacattcccttttctcctttcattattctgtgatgaggatcttgaaaaccaggtaatactcctgcttctttttcttgggagtgggttgcagaaagtcctttcattgcatcctgactctgagacgcctactgggaagaagcatacaagtgtggaaatgagcattactttgctccattgatgaaggaagcccagagaaactcttatttttcatcaggctaagactcaatctctcacgaaatttctctttcctgagatttagagtaagaaatgtcaacaacctgagacaacttttccttttacctccgctagggttcctgatctgacccaaagacctgcatgtgacctggaacaagcatttttctatctttcctcagtcccagaggctggttccggaaaagacttcagcctcccaagaacatgttactgccaagtaattgctctgaaactagtttctatagttgttctctttgattccatgcacactttctctcggggcttctatccaagttcctttagggtagttccatgagtaataaaaagccaatgttaaagcatattctcttaagaatatgcaccaagtcatctctgccactgcctttgtgtgaggattttggcaaacagtaggagttcatgaagaagttcattgttgtgtatacacaggcaagaaggaaaatgtgaaaaggggatattctaactattgggaagggtgacaaattggacatggacctcctctgaattcatactctatctttgggctgccccatatttgtatttgatactttcattcctggaggcctgggaccattcttagttattcaaggatgagcagatggtgaatacagcactgactcaacatacatgaagactgttttaccattaccattaagaaatcaaattaaggggtgcctgggtggctgagttggttgagcatctgactcttgatttcctctcaggtcatgctctgagggtcccagaatgaagccccgtatcaggttctacactcagcagggggcagggaggtttggcttctctgcgtctctctatctctctctcctgcccctcccccctctaaaataaataaataaatctttttaaaaaatcaaattaagatcagaatttaaaattggaaatataatgtaataaacctaaacccttttctttgataccatgatagtctttgaccaaacaaggcttagccttttttttttttaatattttatttatttattcatgaaagacaggcagagacataggcagagggagaagcagtctccctgcaggaagcctgatgtgggactcgattccaggatcccaggaatggctcacaacctgagccacccaggcagatgctcaaccactgagccacccaggcgctcacaggcttagcctttttaatgcaacaatttatagaagatgcgtcatcagaccaccaggcttcctgtcgtagtaattcacatagtgttaaaatgctcaaagaaatagatgcagttctcttttttaaacatacgtctgcttttacaatccaaaatgattacaggttttctgttttacgtgaaattatcctgaaagccgagctagattctaagtagttctttttgcataaagcatggagtatgacctcctgaggcacatactggggactcagaagatctctgacatacccaggtgatgcctcctctctccctgcctcctcacaagcagctcttgcctcttgtttgcccctgggcccccctgctccatcagttcccactgcttgctcctctcacactgctcccctcccatcatgccctgcatgggaccagcttcccccatttccaagagaggttgaggctgaagatgcagaagtgggtgttactgacacaggagttagcatagttggggtctgtagaaaggttggggtgattaagtgtgggagcccaggaagaaaggccctgagcatggcaaaccaaccataactcccataactcattatgtatgtgcattgctttgtttaattctaattactcagggataaggacatggttttttctttacttatctgttccaggtgcatctgcagtggccactgtgagccagacagtgaggagaaaatgaggcagagcagggcagggaggagctctgaatccaggattcatttccctatctggtgaagggagaagaggtggaagtgaaaccgctcaacagggctcacccaaccagaaaacatcagaaggggcatctcagtgtctgggaaacaagctagaaccaacatagctgagaaagccccaacctatatggggttcaggggtaagaggaagaaaataaaaatggagacatgataatcaccttcctttcaatggagttgataggaaatacatctttgaaattgatcaaattaaaaagatttttaatttgtaagtaacttgtgaatggataattttcttcatgatttcatgttgattttttgtatcaatataataatccacttgattgttattaaataatgttatattttacccttttgttcttttgataattttggaggaatctgatgtttccagacatataatcagaatgcaaaaaatattatttcacttctaaatattattcctttttatttctttttttctgctttaatctttttttaaagattttatttatttatttctgagaatacacagagaggagagagagaagcagagacacaggcagagggagaagcaggcgccatgcaaggagcctgacatgagactcaatcccgggtgtccagaatcaggccctgggccgaaggcggcgctaaaccacttgagtcacccgggctgccctttttttctgttttatttcttcttgaaatttttatcttctttatacgagatgtctctaatattttactacttagtataaaattaattctttgctttataaatttttaaaaaataaatatgtcttttttataaatttgtgtagaactgtagtaaaagcccctgatacttcttaacaaaatgatagaacttaattgttaaaattaattgtatgttgtatttattcaactgtttttgttttgaattaaacttgcaatataataatgaacatttcttgattccttactatgtgcaagactctgttttaagagctatacaaatactgagtattatcccaattagatttcccaataaaccaatgacattcactccatagtaatctccattctacatgagaggaaactagtcacagtgggttaaaaaaaaaaatcaggaacacatatcaggaatcacctgtaaattagttctcacaatatattgtgagaactatatttgatgtttaaaaattccaccccctccaaaaaaatattaaaatgcaaagaaagtatggaccccaaaggttaaaggtagggagtctgatccccctagattttcaacaccctgcttagaacttgctctgtcccagaacatgtccatgcaaggggggtggcgttctccatggaaagggaatgacattccttaggatctgctcctagggcagccccagtggcgcagcggtttggcgccgcctgcagcccagggtgtgatcctggagacccgggatcgagtcccacatcgggcttcctgcatggagcctgcttctccctctgcctgtgtctttgcctctctctcgctctctctgaatgaataaataagtaaattaaaaaaaaaaaaaaaaagagttcaggatctgctcctacggaggaaaatatataaacaatcaagacttttggctcacccagttgctcaaaatgaggatccctttcatcatactgttttcggtgaatcttaacaccttaaagaatcatgtgctttataccaaatttctgtctggtgacaattcctactaattggttcctttctcagaatgtggccacacccagaggatatgggaggctgtccaggctcattgtctctaatattttaatattatagtatatagtatataaattaatatattaatatattttaggagtggggcccattgagtgagagcctttcccaggctccaagatagtggtcctgaggatcactggggtcccaggaatggcagctctcatgatgtccttagtgatgctgagctcccctttgattcagagcagagacatgccaggtaagtgcagagctgctgcgcttagaggatccagttcagggtaatgagcttagggagctttccatgtgggaaaagagaaagtctgagaaagactttggggccctgacatcgtgcaagggctactattctcaccagaaagagaagaagatcagggtgtgcctgtgatggagacaatggtacctggtggtctggagtgattttggagggacaaggttctcacaaaggggtcatcaaaatgacatttcaacacccatcagaaatcagaaaggggaaattatggttagcctgccttgtccaagaactgaagatgactctgtagaatcagtgctccaggtaggggccccttgcacagaaccaggcaggaaccctactggaaccagtgaggaaccagtgatggccagagcagcagaagggagtgataaagacaagctatggttaaagcccataggttacatactgaagctaaccatccccccaccttcccatgtctggaacttccacatccagcacagtaggatagggccagagaggaagcaagaaacaggatgtggcattctccttaagctgccccttatgcataatttaatattataacttctggttttctgtattaaatcctcatagcacctcttaatttctagtttcaattcaccaccaagaccatacataatagaatggtgagcagtttatgttaaaattctccatctggaacatatttatccatagccccatactttgctccagggccaggaaccctgtgggagacatgaccttaattgacaattggaattcagatatccgtaaactggctaacatcctgggatctgcaaagatggttacagatgcccctgaaaaaatatggggggaataaagtaaagcctggcaggatagggcaggtgtatcagaagactagtgggtagagtacaatacaatgtggtataaaagaagacagtaagtcagtaaaggcttatcatcactatgggaaactcctgcaaaaccgtgtgtctactggaagatggatcttttctgctgcctggaagaggagaggagcccttgggtcagagtccaaaagtggccagggttctgggtgaaataaaaggggagtgaacaaaggaggctagcaacaggatggagaagatgatatgaatcgtttagagtaaatcaaccccacagtacaccatctttatgccttataccccatgctataggttagggaagtaccctaacttggggtacttggggagcagagcaaacattatccagacctggcaggctcagatactgcagtaactatatccacattacaggtccaggatatgtgctcctagggaattgaagatagagaaaaggccctggagtcacaaagaaggcaccagagatgtctagcacacacggtatttattggtccttgggattactcagaaaggatactctgtagagaggagtcacagaagaaaccagggcctatagaccatccagtgtgggggccaaattgtcaccatacatcaaatttcaacatttattaagtacttcctatgtatcaggccctttgcaggtgctaagtactagtaggatcacagacaggaaggaattggagaggtctttggagacatcaatcattggtgttgaggagcacagagattcaaaggcactggacctttaaaatagatctgatgctggggattcccctatgtcctcttctgtcacatatgggttgtcacctgcagtagaataaacacagtggggttgggactcttgggttagcattacatgctctagccctttacacctgcctcttttttctttttttttttttaatttttatgatagtcacagagagagagagagagaggcagagacacgggcagagggagaagcaggctccatgcaccgggagcccgacgtgggattcgatcccgggtctacaggatcgcgccctgggccaaaggcaggcgccaaaccgctgcgccacccagggatccccctgcatttttttttttttttttttatgatagtcacagagagagagagaaaggcagagacacaggcagagggagaagcaggctccatgcgccgggagcccgatgtgggattcgatcctgggtctccaggatcgcgccctaggccaaaggcaggcgccaaaccgctgcgccacctagggatccccatttttttttaagtagactctgtgctgggcatggagccagtgtaggcttgaactcataaccctgagatcaagatctgagctgagatcaagagtcagacactcaaccaactgagccatccaggaaccctcttgcattttatataataaaaataagataggaggtactgatgcacaaatcgtgtgatgtctagctttcactcatgttgcatgtccagtgtgtcagcaagatagcgctgctaattatagttactcagggagcaaggctgacagatctttgacacctgttcccataatttcccaagcagagtgaaggaccctactgaatcatacaatggctcttaatgatccctcttggaaataatgaatcacttctcacatttcattatacaaagcaaatcacatggataatttcaaaagagttggaatctttggaggtagaaagtattccataagtagacattaaataaatgatatattactcacttgagaacctactatgtgtaaggaagtatgctaggtcttgtgggtaaaaggagcttctagctcctaaaaggtttacaaattatccctaaagaggacctctggggtgttggcaatgttcttttccttgacctaggtactagttacatgggtgttcacttgacaatcattggctgtacattaatgttttgtgtatttcttacatatgtctgctagttcacagtaaaatggtttaaaaggagaggcaaagaaggatattggtaatttgaggcaaaaacaagaaatcaatgaatcaagtagaaataatgagctttaataatggttggaataaagaatatttagatgaaactagtgggactcctgcaactgaagaataattaataaacaagagctcagactgagaaatactctcaagggcagtatacgaaagattaaacaatgaaagattaaacaaaaaaaatgataaaaaagaaaaatgataagatataaaggatcaaaactgacatcctggcatcttgataattagatacctagaaagtggggaaaatagtaaaaggagatgaaatgtctgaaacaaagaatagattgctaggctttaaagaaagacggaatgactgtttgacatagtgcattgatcaatttttaaaaaacatctctctttaaaaagcacacatgtctagatgcattataagaaaattgtaagaatgtcaaagacaaaaagaaaattctcaacacttgcagagagagcagttccacctataaaagaacaagagcagatccatctagaaaaaaacaatcaaactgacatcattcctatcaacagcagcacttaatgccaatgggatgttacttgcatagaattgaagaaaaagaactttcaatcccaaaatgtataccacaacaaatggtcattttaatacaacatgaatagtctcaaacatttcaaccttagattctttactattcaaaaaaccacttctaaaaaattttttgaaaagcaccccctaaaaaaacagagacacatctaagagagatgtggaataaaagaaagatcaaataattttttaagtttattattaaacttaatagaggctgaagcagaggctgaatttaaaaaatattaaaaagcagaggctgaatttttttaaataagaaaagtgtatttaaaacaaaccaaaactctggcagccccggtggctcagcggtttagcgccgccttcagcccagggcctgatcctggagatgcgggatcaagtcccacattgggttccctgcatggagcctgcttctccctctgcctctctctctctctctcatgaataaataaataaaatattttttaaaaatagctgtaaaacaaaccaaaactaaaaatgtagttagtattaacataatggaggtgctaggtagtgataataggagaaattaaagtattataaagttcttgtctctttttgcagggcaggataaatagagggatctatcagtgttttttaatcaaagtaattaagagcattaagctattttatgaggataattagaaaatacaactgttaaagtaacagaatttggcctagcctttaggaactgagagatgagaaaaatgaacaagaataaagtatattaaataaagcattttaatatgatagtacatttttaatctaataataattgcaatatatcaaatgagctaaacaattaattaaaaagcagtgactctcagattgtatcttccagtctaataaaatcagatagcataaatgaatatcaaaaggttgaaaaccaaataatggaaaaagagatttgaggcaggtaagcaaagataactgacataacaaatttcacatctgccaaaaaaaaaaaaaattaaaggcaagtgtaaaaactagagcaagaaactataatgaacacgaacatatatccccctgaaaataaaaccttaaaatacaagagcaacaaatgacagaaatatgcagagaaggactctaacaattgaaaatcttaaaattaaactgcagattttaacatatcctcaaaaactaagagcaggagcagccctggtggcccagtggtttagtgccgccttcagggatgtgatcctggagatgcggatcaagttccacgttgggctccctgcatggagcctgcttctccctctgcctatgtctctgcctctctctctctctgtgtcggtcatgaataaataaataaaatctttttaaaaaaaaaactaagagcagaagcaaaaagaaagatatagaagatctaaataatacaagaaaaggctcaaataactacagagatattcacaaccaacaatatgcacgtttttgagcacacatggcacatttataaaaataacatttattaagacacaaagaaggcctcagtgtgttcaaattaattatcacagatgttctttggccataatgcaactgaagtctaaattgggtgcacctgggtggctcagcggttcagcgtctgcttttggctcaggtcatgaccctggggtccgggatcgagtcccacatcaggctccctgcatggagcctgcttctccctctgcctgtgtctctgcctctctgtgtgtgtctttcatgaataaataaataaaatcttaaaaaaaaaaagagagagagaaagtcataagcatcaaagacaccagcttgggaagcaaagaacaccttcccaacagcccctgtcctaatgtggcacctaggacatttcaaatacaagtcgttcttctcttatacatgtcattttagaacacagagaggaacaaaagccttccaaatcatcttatgaggctggtgcatctttattttcagagccagctaaggatatagattaatgtcagtcatgtcactgaatccaacaatgtattacaagcatgattcatttcaatcaaataagattactaatactaggattgtgtgagagcctgaccattagcttattttattgtaatgtaagtgcctgacattaagcttttgattgccgaggtattcatttcaaagatatctatcaaaagatacatattgcctgatatacaactagataaacagtcaggctgcaccctgcccccatgcagttccccttttagaaagccttgggtgacctagataacagaccccttgagtgaccctgcttttcccttcctatgcttttaattccagctcttatgttttaaattcaccaataaagagtgacctcatgaattccgaggcacctcttcctcaaccccaataatggcagatcccgaggtctctcctgcccctcacaacttcactgtgtagctctgggcatgccctgtaccccccagggctgtgggtaataaattaataaatcttgtttatttcaaagttccctgatggttgttgctaaggaatgaactgcagtcataagaaccacaagggccagttgggccctaacattggctcctgtctgagaagtgtctgtgggagctcaccacaaataatagggacccaggtgagtacccccaggcattcctagctgattgcatcaccatcattaggctgggaccacaaaatacctaggcatgcagtgaagtttcaaggtaagaaaatcagtaatatgaccctaaaaatcagtaaaccaaaaaagaacattcatattaatttcaactgaattcaataattgtataaacaatttgatcaattttaccacatggtaaagattataaaccaaaaacctatagcaaatatatttatggagaaattaaatgcattccctttgcaaaaggtaggatatcttttataattataaatgtttaatattggaggttctagacatcactatgttgtcatagtttcttctgttgaagaaaaccaaggttatgaagattgtcagggagagataaaatggctgcatattagataagactgagcctctggagccccaatacctgagttcaaatccagactctgcctttcaagttgtgtggccttggacagattccttcactcttcttcatgtctgcttccccctctgtatcatggggaaagaatggtaccaacttccaaaaataagtaagtgaatacctaattttaggttttttccaaatgaatggcggaaaaataaaacggcagagccaggcagtaggtttgagagtgctttaatggggagcgctcccgggagaggttccgtgacttggagaggtggcccgagtcagggaagtcgcgccggggttggggagtgtgggggtttttaagcctcattggttctgggtctggatctgggtgggtcccttgccaaattaggcaagggaacaccgtgtccctaggtgattgactgggggtgggatagtacagacaatgggggggtggtccctggctggaaggtcctgggtggaaagtttcagtttctcatctaggcttcgatttactggagatgatgtggtggtcattaccgctttggcgggaagatcagccattttgacccaatttgagatgtctgccattttgagtgcccctgtctctcagccagtccaacacctaagaaatttatagaatggtgcctggtaaatagtaagcacctcaactgatgctcattatcattgtattgttttcctttagttcagtgattttgaaatgcaaagtgctcaagaacccgtgtcgaagttcttctctttctcatctaccacccataccatgctgtctcttcctttgcactgtgtccttagtaccagctctgggatgactcccgggggcctctggcaatgctttcaggcctcctggtcttcaggacaatggcgccagtgatgatacctgccatgcctgctaccagacccagggcacagaccacagtctccctctcttaggcacctggatcagctcctaggcctctggggcacaaaggaaagagttagaaggtgcagagggcaggaggtggcttcagatgtaggggtataaaggattaggaaccatgagatcaccagtgaggtttgaataaagtgacaataaaacacacgagattaaggaaagcagatgctgcagagagatggatcctggaaataaagatggttgtcaggacagcgtgggcaaagggcgggagttccataccccagtgctgaaggagtggctggtccaggccccagtgctccaccttgcagtcatagatgtcttcagggcagcccggatggctcagcaatttggcgctgcctttggcccagggcgtgatcctggagacccgggatcaagtcccacgtcgggctccctgcatggagcctgcttctccctctgcctgtgtctctgcctctctctctctgtgtgcctatgaataaataaataaaatcttaaaaaaaaaaaaaaaaagaaagaaagaaagaaagaaatgcttccacgggacgcctgggtggctcagtggttgagcgtttgccttgggctcgggtcgtgatcctggggtcctgggatcgaatcctgcattgggttcctcacggggagcctgcttctccctctgcctgtgtctctgcctctctctctctctctctctgtgtgtgtgtgtgtgtgtgtgtatgtgtgtgtgtgtctctcatgaataaataaaatcttaaaaaaaaaaaggaagcagaaaaggcttcctcagccccatattcattattatattctcctctatattcttatgttaacctcatagtttactcccctcagagctttactgtctaccagagacggagcacctgctacgagctcaacgagctcaacgggacgcaccacttgctacacacagagctcttcgcgcaattggacagcgcggcgggggtgttcgcggccgtgtccgagctgggccgagtaactgccaggaactggaacgtccccgggagttcctggcactgagacagagcgccgtggacacagcgtgcaagcacatcttcgacctggaccagggtttcacgctgcagcgcagaggtgacagggcgggtgtgaaggagacactctgggaggagagggcggggcttgggcagcagaggaggggagcgccccagcacccccctccccgcgccccagaggaagccaggaaacacttaggttaaaatgaagaacaaatcaagctatttcatttcttctctctctctctcttttttttaaagatttatttataaaaaataaaaataaaaaaaataaagatttatttatttattcatgtgagagagagagaggcagagacataggcagaggaagaagcaggctcttcccaggagccgtacgtgggactcgatcccagatcccgggatcatgacctgaaccaaaggcagccgcccaactgctgagccacccaggtgtccctatttcttctctttttttaaggagaggatcagactgctagatcaaaggaaatctataggctgaatatattcggatttcaagatagtatctctcaggattacacatccttttgacccagatgagaacatgtaaattcagggagctcccatagctggttcaagatttctgctcaaagaattttagttactgtcacttacatttctggcaaaaaatgttacagagcacagactctggccctcttctgttctttgctctttctttactggtcatttacaaggtcattcttagaacattggaatgtttcattccatttttcctactgtgttgcccatcttctcccgctaagtagcttcataggtgataggactcatctttaacatctgagaagtcaatgtgacaagaaaacagctaaatgcactgctctggccatctcagctgtcataacaagattctctttccctcctagtccagcctaaagtgaacgtctccccctccaagaagggacgcctgcagcatcacaacctgcttgcaggccacgtgtcagatttctctacaggccacattcaagtccgctggttcttttttttttttttttttttgtgatagtcacagagagagagagagaatgaggcagagacacaggcagagggagaagcaggctccatgcaccgggagcccgacgtgggattcgatcccgggtctccaggatcgcgccctgggccaaaggcaggcgccaaaccgctgcgccacccagggatcccatgtccgctggttcttgaatggacaggaggaaacagctgttttttttttttttaaagatttttatttatttatcatgacagacacagagagaaagagaggcagagacacaggcagagggagaagcaggctccatgcagggagcccgacgtgggatttgatcctgagtctctagcatcacgccctgggccgaaggcagcgctaaaccactgagccacccagggatcccaacagctggggttttatccaccaatttgatccataatggagactggaccttccagatcctggtgatgttggaaatgacccttcagcagggagacatctacacctgccaagtagagcaccccagcctggacggtcctgtcactgtggaatggagtgagttactccctgctggccctccagactccaggctctgaggtctgctcattttgtcttgtgtcactacactatactacaactacactaccccatgttgttcctcatccacccaacggtggtcttggctgggaacagtgaaggtctggcaattctcccgtacgtttatcctgctctgggggagtctaaagaatctctccttgtcaaataacaactcagaaaggcagtcaccttcatgactggccctcagacatgacaacacctctcccttcggtctcttaagtttggacttaataggctgatctaaaactcgcatttgcctcctgtagaagtcatcactctgaggcccagaactttagagtgccttctgcctctaccccttttccatagtgcctccaagcttggcctttcttttctctccgtggtagattagatcaggctccaggtgtcaaacagggccttgaggttgtggcaggtggaggtgagactcaccctgacttctgttccccaggggtacatcagattctgcctggagcaagatgctggctggagttggaggctttgtgctagggctcattgccctcttggtgagcttcattctccattttagaagccagtgaggtaagaaacttctggaaaggggttgatactgtctttccactgtctcactactcttcagtgatgaagttgtgacaaaaaggcaaaacaagagactgaaagaggcctctgaaatcagatgctgataagccaaaggcagccctggaggaaagaagatgcctagccaaggtctgatccaataagataccggaggctgccaaagttaccctatcctacagggtgttcttttcagcctggggtagactcacacctaaagtgtgacatggggactgtggtggaaatttttggataattttctaagatgctgttgctccttactctctagatgaccaaattcatcttccctcaggatgacagggacctcaaccaacagatggtatttctgctcccttcttccttcttgggatataattcatgtcattgcaacataagactgggagcattcaatgagtatgctatgttcaggatagatcatagaaagtgccctgagaatgaggagaaactcaaacactccacctttcttgcaagttgagccaaattgcccccaactcttgatgccattttcctctttaggtggatgtggccacagagcatgactttgctccattgctgaaggaaacttcagaaactctcttccattgctcagtaggccaacattcagcctacctctgtaatttttttctctcttttctcttttttctctagagggaaagaaaatgtagcctttgagcttcagatgttttaaattcttcttctgaggcacctgagtggctcagttggttaagcatctgccttcggctcaggtcatgatctcagggtcctgggatggagccccgtgtccctgggatcaagccctgggtagagctccctgctcagtggggagtctgcttctccctctgctccttcctctaccccccagtctccaccccccactggtgcttgctttcatactctttctttttctctctctccctcaaataaataaataaattctttaaaaataaatggaaataaataaattctcattcttcttcgtagggttcctgaactgatctcaaacatcacatgtagccttgaaacaagcagttctgctattcctgttatccagtaaagtcccacctccagaaaggagattatggctaaattgtgccccctgatatcagtttccgagtcgcagcattttcattcaatttacttctttctcaagttctcccaatctatagagtgaccttccctgaggaacataaactatctaaatccaatattattctcttttttttttttttgagaggagggagataaatatggtcatgtgaccatgtttatggttgaagggttcgatgatcattgttgtttcacgcaggcatggagaaataaccttcttgatgggttattgattgacccattctccttattgaatagaaggccaactgataatgaatctcctaaaatttgctctacttcattgtagatgattaaattcatgctgcattcttactagcgaggggtggaaccattactcctagaaatcccagatggaacagacactgagcctggattttgccattgacatttatataggactaataaagcatgtcaatcattaataatatgctttccaagtgtaaaagtcaacataagatcagaattgtaaataataggtttattagatcacccaaaacactttcccttctgagtcattcagtagaaagtacatctctagttccaaaaaggtcaaagatatgtgtataccagatttttcagacataggccagcttttagaatacagttcattatacttcttataaatctctttaattaatgttttagactaagacagaaatcatatttttttcagacatttcatggtatgatgtgccacctaagaccattactattactatataatagtcatcaggaaaactaattcttgtaatatttatagattagtatcatttttcaaaatgacagtgccttagccaagcttaaagagtttttctgggcagcccgggtggctcagcggtttagcgctgccttcagcccagggtgtggtcctggacacccaggatcgagtcccacatcaggctccctgcatggagcctgcttctccctctgcctgtgtctctgcctctctctctctctctgtgtctctcatgataaataaataaaatcttaaaaaaaaaaaaaaacaatgcttatgggacacctgggtggctcagcggttaagtgtctgccttcgactcagggcatgatcctggggtcccaggatcaagtccctcataggactccctgcgtggagcctgcttctccctctgcctctgtgtctctcatgaataaataaataaaatcttaaaaaaaaaagagtttttctttcttaactgaccttctacataaaatcaatttgattaaatattataaactatgactataagttagtttttggtgattttaaatacaagatagccaccttgtgatcaaatatggggctgtgtcaggggtctccatgaccacccagattaggttattcactaggaggaatcatatagttgtactcatggcttagatttattacagcaaaggtttacaaagcagagtcagtcaagggaaaaggtacatgtggcaaagcccagaaaaaccaggtgcaagcttccaaaagccctctccctttggagccagagggcacacttaattcctccagccatgagttgtgactacacaaatattgtctgccaggaaagctcagcacacggcactcaggatttttactggggcctggtcatgtaagcaccatctacctagcacatacaaaaattccagagtcacagaaggaaagcaggtgttcagcataaaccatatttttatacagtttaggtacaatttaggcacattcttattagatctgagaattcaagttcccagatgccaggcagaggccacctttgtactcaggccaaaaaaatagtagatggacctgctatgttacatctttcctgcacaggagcaagccatccattttgctgacaatttttaaaataacatgagtacccatttttaaaaaagattttatgtatttattcacgagagacacacacacagaggcagagacataggcagagggaaaagcaggttccctgcggggactccaatgcaagacccgattccatgacctcgagatcatgacctgagctgaaggcagatgctcaaccactgagccacccaggtgtccccatgagtattcatttttctcaaagaaagacatacattgatacagaatgcacccttgaagactagttttctggaaacatgggttgttgcggaagacatagagttaaattcatataatatttttcattattgttattatgtgaaattattattatattttatgaatcctattagcatttaagcgggtttttaagaagtaatccctatgcccaataggtgactcgaactcacaaccgcgagaccaagagctgctctcttcaatgtcagaaccaccctggtttccttggatttaacagtttttgaatagctgaagtacaagcaaaggatgcagatgaaggtaatctgttccttgaagtttttatcttttgttcaatgatatgagaaattacacgtgcttcctagcctgtgatatttctagtagaggacatgggtagcccacctctcagtgccccaaatgagaaagttaagctgtagttcatatgtctactctcaattgccttggaaaaatgagaaaggcaatccacttagtgcccaaagaatttcacatgcaagaagattgactatgaatgagcctgtcattgcctgcactgcctaaaataagagacatttcactacttcagattttgataagaacaaacaagtcttgtcaacagaggactgataaaccagcatttctaaagcataattgttaatttaatattatcttgagtcataattaaaagcgacttagttttaaaacatttgcctattatcttagagtcctgaacatttcaccctctgtttattttttaaaaagattttatttattcatgagagacacacacacacagagagagagggaggcagagacacaggcagagggagaagcaggctccgcgctgggagcccgatacgagactcgatccccagactccgggatcacgccctgagccaaaggcagatattcaacctctgagccacccaggtgtccctgcttattttttttttaagattttattgatttatttgacagagacagagagagcacaagcagggcgagaggaaaagggagagggagaagcaagctccccatgtagagcctgatgtggggttcaatcccaggaccccaggatcatgacctgagccgaaggcagccgcttagccaactgagccaccagattcccctcaccctctgcttatagaacagaaccaatacattagtttagggtttgacaaggaggaggggggtctctctgattttctgtttgccaagaattcctcctcacatgacgtcatcagaggacagtcaaaaagcctgagttacttagaattctaactattgagtcaggttctgaagcatgccctcttgagggtagaggattgtcatttggaaatataataggaaaatttctttttcataacagataaattacttagtgcttctgtcctttccttctttttaaaaaacctacattgacgctttatttgaaacagttctgagtttaagggttctctccttaaaaaaaaaaaaaaaattaaataagctccacacccaaagtggagcttgaactcaaaccctgagaccaagggtcccatgctctctctacctgctgagccagccaggaaccactgactgcactggccaggcaccaagggttctttcttggatgaaatgagtgagaacccaaagcaaggaggggaaaaaaagaaaaaagatacttatcagtttgaaagtcccagtttatctttctacaattaaattaggaggagaaaaatgaagaacaccctggtagcaggaagaagcaagagtcttccagggtctggcatttgatgagctagatattcagttactatgcatttccacacgcatgcctgactccaggttactcttctgtcctataactacattgctggcaggactgttgttgccacagtagctggctgtgccccagacaaacagggtgtgggtctgttcccacagatctttatcccagtcttcatagcaaggagggcactgccatgtgctctcagccagtctcttgtcctaggtttctgatttggttgacaacatccttctcagtacagcctttatcaccacagcctgagggtgtgatgactgatctcagccccaggaacctggtggtgagcactgaaggacaaacagccaatttgcctcatcaggatgattctttctgcacttgataaggaaaccagcaggtccctatctgacgggttagaaacccatcacaggggcattgaataggttttcaggctccagggactcggtgtaagcttcttccgtgttgtacatgaaggagctgagcccaagcgctcggtcaacagccttctcgccgcaaccgcgccccagctccgctcacttccgactcctgacggtagggggttgtcctttccttctttattcaacaactgtaggtattaaaactgtagggtatttttaatcctcgtgagaaatgctcccttttttttgtttgtttgttttgttttgtttgtttgtttgtttgttttttaggaagaagcattgcaaggatctgaattttaaatgtgctttaaagctcaaaaatatcaggtgggatcccgtcatcacctagtggccaacagtggaatccacacttggaacaagatgtgagggaatttgtcaatttgggaaagtgccagcgtttttagcaaaaaagttagagaaaaagttaggcatacaaaagccaaaataaatatggccaaatgtagaggctttggcagcgccagtgcttcagtggtctggctctgcctttaacagcagccacgaaaatatgctaatcattgctctgtcactaaacaaaccctagtcatatttttacatgactgaatataaagaaaacataccaagagaaggaaacccttcaacatcaactttggaaagaagaaggactacataactagagagagttagtatctgtaaagtgaatgtgatcatcagaaaacatctagaccctgtgcttgtccaacagaacttcctgctatggtagaaaatgtcctgtgtctgagctgtcccatcaagtagccactggccacaggtacttttgggcattgaaaatgctaatggctagtgcactaaggagatgaatttttcatttaattttaaattgtttacatttaaattgtcctagccacatgtgactaatagctactggagaggcagagtagagtctacaatctttctctaaaaacatgtaggccctctcttagtagcttttggtggaggcagaaacatctgcaggtgaaaactgctagagaattgaaaagtgaaaaaaaattagagaagcaagagaagatggaaataaactgtcttgtctggtcacagctcattaaatttggggatatgagagtccccaaaacataacaagcccactagcaagttaataaaattacagaggagggtaaggaagcaccagcaatccaattctaccacatacagacgcctcaaccatagaaatgatcttggcaagctttcaactcactcagtttcaaagtgctgggaaccaagccaaaggaaatcacaaagacaaagagctcataaacttgacgaacacatttctcctggtacagaaagggagcgcttcagcacacctcctttcattcctctgtaagtttaaagagttttgccctgaagatcaagccagaccccctccaaggacagcactaaaaaggcccaaggtctgtccctccagacctgttacaatattagatctgtctggagacactctagactctgtagaacactttggaccaaggaaaatatcccagaattctaggaaccttgggatacaggatcaacagcaacttttaattaggaaaatctaatctaataagagggctatttttaatattgggacatgtggaggacaagcatctaaggtgacagcagttgagataacattgaaggagtgacgcctgggtggctcagcagttgggtgcctgccttcggctcagggcgtgatccttgagtcctgggattgagtcccacatcaggctccccccagggagcctgcttctccctctgcctgtgtctctgcctctctctctttctctctctctctgtgtctcatgaataaataaataaaatattttttaaaaagagaggtaacattgaaggagtttagtttacagaaaacccaaaaagtttcagtggtgatttcacctgtccctgggtatgttatttgactttactaatgcaactctggaaattggaaaagctaccacttcgaacctctggagttccacttccccacacaaaataataataataataataagaagaagaagaagaagaagaagaagaagaagagaatatgtaaaataacaattatgataaaatagttggagaacctagagatacccatcccaccaatagaactcattgacagtcaaaaggtagttaactgtgaatcatagcaatattaggaagattagctaatctttaagtagtacttaataaatgccaggggctgttctaagtacaaatatttaactcatctagttgtaaaaataaataaataaataaataaataaataaataaataaataaataaataaaatgtggctagcactgtacctgctatcatttcctcagtaaaagatcttgctaaatctatccttgactagcatacatgcatccatctggctggtgcattcttttgaataccaataaattatgttcaccatcagtttgctttcatttggctgccgcaacaagccacattggctatattaccacagtgacttcttccaccctgaggcataatccaataaaacagaatttaaacagatgacctgataggtgatgggtattaatgaaggcactcattgtgatgagcactggctgttgtatgtaagagatgaatcgctgaattctactccagaaaccaatattgtactgtgtgttaactgagtaaaatttagattaaaaaaaaaaaaagaaagagggacacctgggtggctcggcagttgagcatctgccttcagctcagggcatgattctggtgtggggattgagtcccgcattgggctccctatctagctatctgtgagactgcttctccctctgcctatgtctctgcctctctctctctgtgtctctcatggataaataaataaaatctttttttaatttaatttaatttaaaaaaaaaaaaaaaaaaagaagggtgcctgggtggctcagtaggtcaggcctttggctcaggttagttagtatcccagagttctgggatcaagccctgcattggtctccctgctcagtggggagcctgcttctccctctctctctgaccctctcccccaactcctgcactcatgctctcgctttctctctctctctctctctctctccctccctccctccctccctttttaaaaaagattttatttattcatgagggacagagagagcggcagagacacaggcagagggagaagcaggctccccgtggaagcctgatgagggactcaatcccaggatcccaggattacaatctgagccaaaagcagatgctcaaccactgaaccacccaggtgccccctttctctctttcttatctcaaatacataaataaagtctttaaaaaaaaaaaaagaaagaaaataaacagataacctaaatccaattcaggtattaaaattgttcattacactaatgacaaactaaccaggaatcacttgaaaacaattgtacccgtgaggaacttttttttgggggggggaagggagcatagcctctaccttgattgttgtggtgattacacaatgaatgtttgtcaaaactcctagaacaattcagctaagaaggataaattttactgggtataaatcatatctcagtaatactgatttttaaaaagtactgcacccaaaaactctgtcttcccttattgattttatgattaaaatttcagtaaacttttgggaagaaaaattcttcccgagatcaggcaaaagcctttgcccttgaaactctccacccaagaaaggataaaaggaatcaattggtatgttttaattctccatatcccacatccaaattaaacttggggctcttcaccaattagtaaaaacggatccaaatttatttttttttatccaaatttagacagtccttaaagagcaagatgcctttgcgctgtgctaatgcagcagccactagtgacatatggctacttagattaattaaataaaataaaaaataaaattccttaggggtgctaatcacatttcaaacgctcaatagctatctagggccagtggccaccatactggatcgcacagaagtagaatatttccatcatcccagaaagttatattagataatacggctttagaggctaaataggtcttcagatcactggagtctggtgatttaagacatacataactagggatgcctggatggctcagccgttggccatctacattcggctcagggtgtgatcccggagttctgggatcgagtcccacattgggctccctgcatggagcctgcttctccctctgcctgtgtctctgcctctctgtgtctctcatgaataaataaataaaatctttaaaagaaaaagacctacataactatatggcatatgtctctgagaattcaactggatggccttgctaacaaattaaaatcatctttaaaggatgcatattgtagctattctactgatgctccaataaggccaatgacctcagagacaggcaaatcaatagaggcaacccatggtggagtcatgaaggaaagtgtgttgctctgggtgcctccaaaacagcctccagaaatccctagtaggaagtttgccagcaaaacaaaataagcagcctatttgtttttaatctcctgtttcatgctttgcctagaactgttggcatttaggccaccattgatgggtagattacattggattgtccctcccctcattaaggcaagaagtatgcttttaaactaatgatttttatggaaattaagagactgccttattgataaaagccgctgcacaatcccccatttctggatcttactcaaaaaattgtttagagacatggcacagcagaaaacactactctttccccaatatccataatccctgattccttaatagaattttccattttacgagggcacatggacttccagaatcagtactagtttcccattctcctctccagttatgtacagtcacacataaattctgttcactaaaggagtagtggaaggggaggtgagaagggggatggggtgactgggtgacgggcactgaggggggcacttgacgggatgagcactggatgttcatcccatgaacactgggtggcaaatcgaacactggatggcaaatcgaactccaataaaaaatacacagaaaaaattctgttcagtaacctttatgcaaaacagctgtgtgcaacttctagaaagtgaccttagaaaaagggagatgggttcttctttcctcttccccctttctgctgattggaatatagacatgaaagctggaactcaagcagtcagtcatcctggacccgagcaggaagagccatgttgaagctggcggaacaagatagaaggaatctgaatccctgacactgtgagagaccgtaccaggcctggggttctacgtgagaaagacatgtctatcctggttaagccacgattgctctcccagttcaacctaatcttaagcaacatatacagcatctctggttcacgccaaaacataacaaaagtagactcacagaaatataaaatggagctctcggcgcgcacctccctcgagcagcagatccagtaaaatggcagaatggcttcctccagtcctggcacagcacttcactaactgctcgctcacaagctgtttatcttcttggtaatcgcaccttacgtggtgcctcgtccaacatcacacatctccatggtgcttgttagtaaggagcaagtgaggttctgtgcaccccagaaatgggatgaggaaggataccagacgccgctgtgtgtggcactgggcgcgtggtgagtgtagggccatcgctaatgatttcaggaaggacctggtatagacttatttgtggaaatcaatcaatatcacacctcagtggcagttacacatttcagtttcccgtgttgcatctacatgtgccatatacaagatttagtatcttcaaaataatttgcagtaccataaaattgctctttaaagacacaaaaaaaaataaaaaaaaataaagacacaacagtgcagtatcgggcatgtttacagttaaatggtgtcagatatttctaacacatcttttcttaggtgatgaatgtcacgtttgacagtgacagaaacagaacagcagctataataacaacagcaacaaaaaagtgcttacagtttagccaaagaaaatatgtaagaattcaccccatggtgccctgctttgctgacttaatggctaactcagtctaaaattaccaccattgttcgactttacaagtcctgcccagggaaggaaattggatactgacttcccacatactgatccaactggtgtgtggcagacgctgtggtttggctgaccccacaccatactcatcctgaccccactttccccttcccagacttccttgcaattaaggatggcagtgcgacccaaaagtctgctaaagaaacaggtatggctgtctctgtgactcacttcttccatcttgactgttgtcgtgatagtgagttgtagcagccactttggggacatgaggtgacaagtacacgcaaggaagggtaacgttgtgagatggtggagtacaaagatacagcctggggtccaatagcatcaacgagtggtcaaaccaacaccaccagctgtcttcctcagatttcttgctatatgagaaaaattaatgtctatttgtttttagtcactgttttttttaattgaagttcaatttgccaacatataacatgacacccagtgctcatcccgccaagtgcccccctcagtgcccgtcacccagtcaccccatccccccgtccacctccccttccactaccccttgttggtttcccagagttaggagtctctcatgttttgacaccttctctaatttttcccacttttccctcctttcccctataatccctttcactattttttatattccccgtatgaatgagaccatatgattgtcctcctccaattgacttacttcactcagcataataccctccagttccatccacatcgaaacacatggtgggtatttgtccttcctgagggctaatatctcattgtatacatagaccacatcttctttgtccattcatctattgatggacatcgaggctccttccacagtttggctattgtggacattgctgctatgaacattggggtgaaagtgtcccggtgtttcactgtatctatagctttggggtaaatacccagtagtgcaattattagccactgttatttggggttccgtgcctactcttgcaggcatttctactggatacagggggccctttaagtcctagggctgctttcttactctatcctttagcttatttcctgcaggtctctgagcagagattcacaacccaggttgcactttgaattcacctggggaacttttacaaaagtacctttgcccaggccccatgccaggtgaattgaatccacatctctgagggtgggaacaagggatgagtaatggtttttccccctcaggactcttttatactcttaaaaattattgagaatcccaaaaggctttccttgtgtgtattgtgttattgatatttatagtattcaaaatgaaaactgaaaaaagtaatagttattacttattttaaaaggaaataaaaagccacttttatatgtttaaaattttccataataaaaaatgtaaataaaaataacttagggaacaaggggggttcccccccccccgcttttttttaaatgtaggctccgtgcccagtgtggagcctaacacagagcttgaattcatgaccctgagatcaagacctgagttcaactgggtgatatgctatatgttggcaaattgaatttaaataaaaaatttttaaaaagaaaagacctgagctaagagttgaatgcccaaccgactgagccgcccagatgtcccaagaaatatggtggtgtttttttttttttttttagattttatttatttatttatttatttgagaaacagagtaagagagagcacaaataaggtgagggcagaaggagaagcagacccctgctgagcagggagcccgatgtgggacttaatcctggaagtccaggatcatgacgtgagctgaaagcagacatttaacctagtgagccacccaggcacccaagaaatatgtttttaaagacttcatagagggattcctgagtggcgcagcggtttagcatccgcctttggcccagggtgtgatcctggagacccgggatcgaatcccacgtcgggctcccggtgcatggagcctgcttctccctctgcctgtgtctctgcctctctctctctctctctgtgtgactatcataaaaaaaaaaaaaaaaaagacttcatagagtttgatctactccatttggattatgatttaaacaaacacacatacacacaacttaggacatctgaacactgagtggatatttgataataagaatgattattaatttttagatgtaacattagaattgtgatcatatttgtaagagtctttatctcagtgctacctactgaaaagttcacagagggaatcatgggatatctgggacgacttcaaaataatccaatgaggagaaaggagtcagtgaggtagagacaaaacaagactggccatgagttgaaagtttttatcaactcacagctgatggatagcagaagattcattttaccattctctatatgttagtatgtttgaaattttccattaaaaatgttctaaaaatagacaataggcatcatatagaaaccaggtaatgcaaatgagaaaaaacaaggttttttgacgttaaacaaaatatcctgattaagataaaattcagcaaacaggaagagggatttttttattaataaagcataaaatcttcactaaagatacagtcagggcccagttatccatttggcaaagtagacacacaaaagtccacagtacttttggggattcatgaaaatgtttacatttcttttaaaatagaaaatgaacttttagattgaagaaaatatctaaatatataatatgaatatatttatcatgtccaacacagtcataaatacagttctgaattttgtttttgaagaaagggtacaggaaggcaaatgtggtagggcctatagaaatcttaatgtggccctggctatcatggtcatagatgtctatgtgctgaagagcaaagcaacaagatacaaacaacagagatgctggactctagaattagacagctcatgaccttgtggttacaactgctgaacatgactttgggttggccctttgaggtgagggtgagtcaggaagtaccagtgtggtcatgaacagggtggttggatcatgctggtcaaatgtacagaagggggtctgtgtagagggaaaggtagcaagcacctcttggggtgtcttctcagtaaccctaccttatgtgggaagagtgcccccaacacctccctttcaccatcctagtgcttcatataagttatctgttgtcactgtgggccatcagccagaaaatgttggctctcagggggacagctgaccagaaagccaggccaatcagactgggactccaggaacctgaaccatggagcccagagacacagaggcggaaagtggattgcttgggctgtgtttgtgtccacactcagggacaaagtctatgaacctctgaggtctcagaaccacccttgctctcccctacaaagaggaaacacttctttcaaatactgagtaccccgatatttttataataaatttcctttggggcttaagctgttatgaatcagattttatgtttgtaacaaaaagaaactagctcagttgttagaacatgtgactcttgacctcaaggtcatgagttcaagccccatgttgggtatgatgccaacttgaaatttaaaaaaaggaaagaaactttagaagtatgggatcttgacagcagtaagatcagaggtttgaaagggtgcaagcagtgtgccccagacaccagtgtgtctgcagtaacaaagccagaagatttaaccaaggcaatatggccagttgccctcccttgtctttccagtgcagaggttgtcaccgtgacccacatagttggtcagacactctatggagtcccagccctgtagagatgcagtggcaagacctggaacatgacctttccaccagttgccatagtagccaatgtggcttttatctgttatattttagaaaactccacacctatttcatggcattcaaaaggccttctacttggaagtaagatgttactaatagaggggtgtatcggtggcccagtccattgggcatttgccttcagctctggttgtgatcccagagcttcacagggaagcagctccactgctcagtgggaagtctgcttctccctctccctctgcaccctccaacactcatgctcgctccctctctctcaaataaatacataaaatcttttttttaatgttactaatagaaaagaagccagagcaaaatagacacgtggattttcatgcacctgctacctgagggaaggcacagtgatgggctgactctcactgagccatattctgccatcgtggatactggagggcagccctagggggggggtgcccccagatgttgctggtcttcattcaaggaccagtgggacaggtcttccctactgagatagcagtcagctggcactgccagttcccatgaaactaccctgaggatgagaagaaataaaatgaaagaaagccaattgcaagcacccaggggtgatttctgctcacctgaacaggtttgagctaggaaacgttaccgcggcctatgacctgcacagctggccggggaaaaaactaggatatggccctaacagtccctgctgacaccaaacttgcaggaataggggcttcataaccacaaaactgggtcaccaccttctttctgaggcaactacagccttaccttggcccactccgttccctatccgtctctatctacaccactctgatccattcagaaactacacatcccagcatgcaacacagccaaggaggggaaggccttctgggataggtagtgctcccaggtacagtgatctaagtggtccaaattttacaagttgttttttgaccataagttaccatgtcaaaaatgttggcgcagggctaagatgcagctccaagagtgtgaagggctagagcacccatccccaggcgttctcgctaaatctcactaccctcctgtggttggttggctgggggtctgtgtctgagcccttcacagccttatccagcctgggtggggccttaatacacaaacctgtcatatctcttatctctccaaacatcagtagtgaccccctcctcactgcgttcaagttaaacttgtttgagaggcagtcaagagtttcagaaccagcccttcctgcaagagtttgtgttctgacccactcagacccaaagtagctctccaaagcctctctttttatgcccgccccaccctatccagaagcctccaatgcccacaatccactggagccactgccagcacccacatgtttagatctcagggcaactgcgctacccacacccagccccatcccaaaattcccacctctggagccctgcccttcaaatcctcccatctttccttagagccaggcccccgcttgccccggaggaggcagaaatcccgctgcaaggagagggctgtggttctggcatcgtcagcggcaacttggcacagaatcgcttgtaaaactgttgtctgggactggttggcattctagctaaataggcttttgtggattggcctgggacccaactgccgtgtataaatgttatttgagtgaatgtatggcattgtttccatggagaaaagccctctgagctcagagcatctgaccaaaagtgacctttggggacactcccctttgtgctttgggggcagcctctgtgggtttggctccagtttgagagccccgagaagcctcagcgctgggccagctaggctgggagtgagtgtggccgaggatctatgtaggtctgcccttccgtccagcggaggcccaggaggaaggggagaggtctgcccggagcatcaggacttggagattgagaccgaggacgtaagggatccagaaacccatgcaccgcctcaccccggaaagacgggatcaggggcttcccctccatgcggactcctcttgggtttggggagtggggtcgggagggttcagtgggtgacggaggaagggacagcgagttaggaacgtcttactccgtcttactccgcttgcgctttaggaggccggagtcttggcaccggcaccagggggcagcagaggcggagagatgcgctggcgggggagagggaggggtggtttttggtttttatctgcaaacggttttcctgcccaccgtggatttcaggctgcacttccagaccataaaagagcttctttgggggaagcctgggtggctcagtggttgggcgtctgccttcggttcagggcgtgatcccgggatccggaatcgagtcccacctcgggctccctgcttctccctctgcctgtctctctgctgctctctcttagaataaataaaatcttaaaaaaaaaaaaaaaaaaaaaagtttcctcctgtcgacactgagccagatccacccctccaagggttcagagattggggttctgtccttggggcggggacgatcaaggctgtgacgcctgggatccaccgggagggacggggcgccgcctccagggactcgggtcctgcaggtgcgcgacgctcaccggcacacgcgcagcccggcttccagcgaagaaggggcctccgggttgggaggaggccctgaaataagttttattctactgccaggacgggcgggagccaggaagtgctgctgtggggatgggaagccccaggagaggtgggaggccagctaggggtgcccggccagcggctgccctgaacagaagggccctgcccagacccggagggcacagagctactgagtaagccctgaaaggagccgctgggaaaggagtaagtgggggccgtgccgctctcggtgggacgagcactgggcaccttgacgcagagtagccgataatgcaggtgcaggtggccttggaccatacagcagccaggaccatggcatacttgaaggggaaggaggaggtgaccagaggcacaggggcaggaaacgttgtcctggacatgagcctcagtcctctcatttgcagagtttagaccagaccagggaaggcccccctttcaaccctgaggtccctaaagatggccagtgggggtgctgggatgtcgtgtttgacccagacacgaggaagacgggcacaccctcacccagaaacagcccagcacctgcatcacacagaagcctgggctcctgcctgatgggctcgtgagtctggacttgtcagccaggttttatgaattctttctgggccccagcaccacaaaaggacaggccctctgggcaaaaggtttaagccttccatttctggaaaaggctcagctggcaaagagggggtactgggcagggttggggttagggttgaaataacaacacaagcaccacacacacatgtgccctagaggagacgatcacattatttagccatcagtcagaaaggaaactggtcggagggctggacaaggtcccgggagtcccttccatccagatgccacacattaacccttccattatgggatcagggaaggggagagggtgctcaggggtgggaccagagtggccagggtggtagtggattgctcgggggctcagagccatggtgactggctggctgataaggacgagttttggtattttgacagtgctgaaagcagccctgctctcacccctcacccttccactccccctgccccggggggaaggggtgggaagtggtggaggcctgctcaccaggtaacagtcagttcctgcaagtcccagaccaagtgagacacagcctgtgtgtgggtcggggagccaaacaccctggtggagccgagaaagcccctgggcagagagagtcagaccctgaggcaaaggagaccatatattccaacattcacagtgggtgctacaggcaggctgagggagggggggttggcctggaaacggctccccatagtcgctgaggaagccctgaggcaaggagtagggtgagccctgtctccaaagtctgctggttcctgttggcatttctctctttatcttttttgttttgttttccgctctttaaataattaattaattacttttaaatacaaaatacacagtgtcctttctcttctcttctgcttgtttaggggcgatcgggaggtgagttttaaataagggtcccggctgcctaacaggtcacaggctccgggtgggagggccaagagccccaggtgccacccctcccctggggtgcccggcacgcttcaccctcccttggtgtgccccagactgggggctctcggtgccctggcccaaagccctctagatggtgaggagccctcttgggaggtggcacagagctgatgctgtgagattcctggtgggcctgctttcggcggacagagtcaggcagagaaggtcctagcccatgaagcacacaggccccaacagcacccctccccgccttgggggggcccccaggtctgagaaggaggcgtccagcaccggtagctgctccagcacaggagtccgcacctccagcaccgtccggccttgctgtgtcttgagaggaagatggaagagagggagcagtgagcttggtggaggcacacacagagcccacagatcccccagcctcaggcccaggttcccctctcctctgaggccctgaggtgctatcccccctactcctctgcccatccttgtcatgtggtcagacttgctagattttcttcctcaaatttcttccagagagtcaggattaggaaagctaggaagattggatttgtgtgcacatgtgtgtgcacgcacacatgtgtgctcatgagcctgtctacagctttgggttcatcttggagatcatctacctgtggtagttgtgcgagtctgtgtgaaccccacgtgtctgtggtgtcactgtgtgatgatatctgacatgattccacatgtgtatgtccatgtgtgaccctgtccaggcaactctggggatgtctgtacaggctgggagtgtctgtgcgctcctgtgccttcagggtgtgggaggtggtttgcacacctgtgtgcttgtcgggcaacctgtgtaaatgtgtgcacgagcctgtatgattcactctgcatgctgctggtgggcgcaccaaaggtgaatcccaccttccatctttcccaccctcctcgcccctgtctgagctccctcgaatacatctgacaccaagaagctggactcctcctggtcttccaggtgcctctacccaacaggtcttctgcagcctgactctgggatgcgccccatccagctcttcctgcctcccacctgacagccatctctgaattccttgacataggggctggtctccaagctcagctcatcctcattggccccccggagcttcaggggaccctctcgggccacccccaagcatgggtaggagacatcttggtgggctgagacgctgagcagccgcaggaaggtaagctggaccacaccaatcggggagccctctgagtccacgtaagagaactggggggagagaggacagcgatgaggggcagacagagcagggcttgcgaagcatctacagacacaaggtccccagcccagggttcttggtggggactcactgggcagaaagggctgggggataaatgggccagagtgggagacagggaggacttactgagggcaaacaaaaggcaaactctgtcttgggttgtcaagggaaggagacagagtggcagagggctggtaagaggataaaagccagggaaagaaggggcaaaggctctgtaggggccagggcacctgtcacataaacccagaagccactgggctgcacagaggagcaggggaggaaagtcaggggccagctctcacttgcgtgacatcatctctgggagtcacacacgtttcccctcctgctgtaaaattgcagaaaacccggaaggcatcccgagcacagccctggttggggtcaacccagtactctcctgtcagggaagggagaaggaagggtcagggcccccacaggcaggactcaagacactccttgacccctttcccactccccgccctgctgttccaaaccccacttctccccaccacgcccttggtctcccggccccactctcccccagagtccctacaataccacccccacccatacttcattccatcatcaccctacactctgcccatctgagggaccccttccctcagcagtacccccaggctcccacaggggaggcaggagcactgacaccctcacatcagtacaataggtggttgtagatgcacacatgtgcccgttagtataaatgcaagcacaagtgtacacatgcatgtgtgtgcatgtgtgccacttcctgtaggcagcgggctgatcatgagctggtgcacactgggaggaccagatcagccgttaaatattgaaatacttctgacctggttggtaaagaactgctgtcccaagccccgagctccgagcccccaccccacaccttcccccaagagcccctacatccatctggcttttcattccgttgtctcctgagcctggcactgaccatcaggcagctctgggtggcagagcttcaggtcctggcaggtgcgggcagggctgtcctgggtccctgtcggccgcctcatctgctcaatctcctcccgcagggagtcgagggaaccaaaaatctcctccagccccccagcactgcccggagcgcccccagccggtatggcctcgtcctcctgcatcaggcggcttccatccaccgagcgccgagtcttcttgggcatctggatgggcaggggctggatcacttcgcctggggggccctgggtggagggatgggtggagagggtgagagacaaggatgatatgagggggaaacgacaggcacagtcagagaagcaggccctgacttgtaactcaccgggtgtcctggaggaccctggatgcccttctcgcccttgggtccagctgggccctgccagaggagtaaatgaggtcatggtggagtcaaggggtcaagcaagcaatgaaggtcacagaagggtcaaatcaatctctgggctgggaatgaggagtttccctgggagagagcatgtttgccctggaaagtgtcaagtctggctggcggaagggagcagagctcagagttggctggggcatcactcactgtggctcctttggctcctttggggccagcaggtccctatgaaatgaggaataagaaagaggtagtcaccacaggggacggttgggatatggaggaatggagaggcaaagtcatgagtccacaagaccctggctttcctacaggatgggcaggcatgaggggactcggagacatatgggaggccctggaagggtgggggaggaaacactgcaggtgtaaggacatatggaggacactggggcctattcttgtttgctggctgttgccatggaagccattgggggattatggaggggggagcattggggtttaggggatttaatgaggaacagatggggtactcacggggaggccaggaggccctccaggaccaatagggccagatgctcctgggataccctaggaagaagagaggcatggttcaagtgggtcttcctccacatcctccgtccccctacgctgagtctccattgccaccccacccacccccaacatgaatccccacactcatcctcccagaccttccaggaccatgtcctcaccgtctctcccttctgtccagcagagccctgagggccaggaagtccccgatcacccttctctccctgctctccagggggaccaatcagtccgatgagacctgggtgaccctggaggagggacaggtggtcagggggtggcaaagaggagacacagggatgcagaagaaggaacctacaagggtcagagcccagaagacaagagagactcgggcccagggtctgagtaaggaccctccaaagactcagtgctggaggtctgaagcacagtgctgggcactcagggtgtggatgaggggagatgcccagccataagtctgtcactcaccttctcgcccttggctccaacatcaccccggaggccaggaagccctgggggtccctgtggggagacaggaagtcactctctccatgggaaggtgggaccaagctctcctcactgccatttcccacttggtccaaggcctccgctgcatgcccactgccaggcgacagcaccatcgtcctcacccccaccctccccacccaatccacaatcactcaccacaggacctggaggtccagcctggcctgtggccccaggacggccttgctgaccctgcagagccaaagggaccacagaggtcaggagaactgtcctcatatgggcaccctccaaaggcccctgacccctcctaccccagccaagcctctccactccatgacttaccactgagcctgggagtcccctgagaccatcaggaccagttttccctgctgggcctgctggacccacagggcctgtcttccctggggcacccacagcaccaggatccccctgaaacacatgcacggaatgagtcttaaaatgcagaggaaagggatatggttgggggtaaggagttcaaggcagatgggatgaggcagaaaggagaggctagtccccaggagcccctggagcaggaataagtatagggaaccctcatcagggcaagaggctcaacatggaggagctcgacatgccatagatgtctggagagaggaatctgagaaaccagaagtgccaggggatagagggaacactccagcattcaggatggcctctccctcaccttggctcccttctctccttgccgcccctcaggaccaggcatgccagcaggaccctgcagatgaagacaggaaggaaaagctgataggtagggagttgccaggctcaactgctttcccctcctgtccttctggcctccagtgactgtgcgcatgtgagcatgcatgcacacacagacttccttgtgcgcgcacacacacacttgtgcatgcagagtcacagaagctgattcacagacgagctggtatagctgtaccacttgttaaaatactgaggagttctgtgtattctgtgaagagccacttgcccccacaccatctagtgcccttctactgcagcaactggagagttaatccagttaatccaccgagcgggggggggggggggggcccggggaccagccaggggcctagcccggggcgggggcagggtggggaagccctctgggaaagctagccccttcctccagtgtccactctgatcagttggtgattcccaccacccctggcaagaagatacatagcaaaacccaggaatggacgaactcacttatatagggcacactcacagatacaaatgttcacacacatatgcaccccatcccaggcacctccctgcccatcccatttgccactcccctctatccaccctgcccagggactgcacttcaaggtcctggatgtccacctcacttacccgctttccaagtggtccagggggtccattctccccagtgggaccaggagatccctatggagggaggaataaggatgcgtgagcatttagcttccagtccatggaactttcaggagcagggcatcaaaaggggacaatgggcctgaaggcttgggctcagtggtgaagggagggggcactagtcactcacaggctgtcctggctcgccatcttctcctcggtcacccttcgcaccatcctggccctgcaaggacaaagcaaggtcaagggttgccacaacctggctggcatcacccccaaaagtgccaatctttccaactctctgcctgccctgccataccccccagcttcccacactcaagcccatcagccacacaaagtcctgtccaggtacctactctctatccgccattctctccctagggaagactcacccgagggccgccttctccaggagggccaggatcaccaggaaaaccaacaggaccctaatgcagagaacaaggtcaaggtcataagcccctaagcctacccagaactaacacagacccccatgtcacacctctccttctctgcccatagtgcccgcctgcatgccctgcgaaggtggtctcctgcacttgcttttcctcacttcctgcacttcatgctttccgatgctgtcaggcaatcagaaggcatctctcactttctctggatttcatatgtcccttccagaagacctcattcccagagcctcccacccaagtatcccccactcttgggctccccctactccaagatcctctcactcaaacacacctacattcccaggtctctcattcacaagcctccccttccagccctgcccccccaaactcacagggttccctttggggccatcatcaccggtggggcctttgggccctggtggtcctgcctctcctggttgcccggactctcctttctccccacgctccccgcgtggaccctgaaggatgagtagagggtacagatggtcccaaagggctctcgaaagtcaaggatgcagcccctgcttccaagacaccttcagcctcccctctaccccctcagtgacagcgggatgcatacatcaagtcaagcccatagggagtcctctggtccctcttcccttcaaagaaagagcgtggggctcactcagacccagaggtccagcctcacagagtgtcgggggcacaggctcctaggctgtggaggggctccagctccaagagatcacagcaaccaggggctggggttgattagggtgatggggattagggagcagggtctcagagttttcactcaccttgacacctggctcaccctggacccctggagatcctgactctcctggctccccctgcaaggagactggggtcaaacacttccttccaccccccaaaaaaatcctgatatttcagtctctcacatataattctctcttgccaaaactggcagaaacccaacactcataccaccccgaagacaagtccattcactcatctccttccctgttaccttctctccagggggacccaggttcccaacacctcctgggggaccttgtgggccctggaagaggaacagaaataggagtcgttgcttaaaggaggaggtgccattccaggggcagagcctgaatgaacacccgagtcatagcagtgagacagtgggaggccttccagggcaggtggcttctcgtggcagctgagatgagactagagtttatagtctagggaaagggaggcaggactggccatggtgatctgcagggagagaggctgagaggactcacatcagctccattgggtccagctgggcctctaggtcctggggggccgggtggtccctggggaaacagatacagcaaagatggggaagcgaagagaaagaaagagcagtaggcacataagaatgccagagggttgggggaggcagacatcttgagagggtggcaagagaggggggcagccacgccagagagcagccggcagggagcaggggatgctggaggtgctggataggggtgactagtaggtggggttgggcccagggggtcgcactcaccatagggcccacatctccggtttctcccttctcacccgaggggcctggcaaaccctgtgttgggggggggacagggtacagacacagatgaccaagccaccagagcacagctccaagtagacagaccctgcagtgcccttcccttccatcccacatgccccccagtcctcagcagcaggggccagtagggggcagcagacccatgctgacctcacctctcagcccctgcctctagcccccaactcacttgcaggccaatgggtcctgggggcccattgaatcctcttgttccttcatcgcctttggccccgaagtgtccctggggtccccgagctccgggctccccatctgctccctgaggtggaggaagggcaggggcaaggacacagagatggtcctgggtcaggagatctctattcccaaaccccacatcgagctgtgcactaggcccagagccccgtccccacactcagccccaggggcgaaggggaactgggggcagattggaggctgcccacacctctgagggtggggatgaggcatcagtcactcaccgctgctccaggctgccccacaggacccaggggcccagggggtccaggagggccctggggagaaaaggagagtcagagagaccaggacagggagagagaccaggtggaaatgaggttaaaggcgagaggtcagaagtcaaaagtcacagtcacttacatgttcacccttattccctttagtgcccttctgtccgggatctcccacctcaccctgcagggacaaggcaggtgagatattagcataaggacctgggtaggcagggaaaataaggcaggggtgggggggtaggaggcgtgcacagatcaatgatctcatctggaaagactggcccagggtctgtaagtccccacaccttgtctccatcctctcctgccacgcccgggggtccagcagggccagggagccccacgggaccctgtaccccatctcggccagttggaccaatggggcctttctcaccctgtaggaaatgaagaaagaagtcatgacccggagacaaccctcatcctccatggcccagcagctcacagctcacagacccctccccagtgtctccccccaccaacccggggatcccgcactcaccgggacacctttctctcctgcggctccagggggaccctgtgggcctggtcgccctggggggccaatgggtcccccagatcctgctgcacctcgctccccaggggagccctgagacaggaaatggagtcagacccccaaggaggacatcacagcccacccacatcagaggagtcctgaccatggttcccaggagaatagcccaaaattgaacacactatggctgatcctagataccctctgcccagtcccacagcctgcctagatccagatgccactcttcatccttccttacccactctttcctggttcctccctcctgccccccaaagcccccagactcactgcagggccagggggaccagccggaccttcgtttcccttcaaaccgagtccaccctatgaaccagagatttaagcaacagatatgagatgggaaggtgggatattttaagaatgagggtccaagggacacgcagggaaggacaaggggagggaggggagacaggctcagggaaacaggagtgggggtgatgcccagtgatttgtttctcctgctgggagacggggatcacactcacggcagtgccggggaggcctctctctcccgggaagcccctcagaccagcaggtccatccttccctggggcccctgggggaccaggatcaccctaaaatgaaacaaaatgtgatgagccacatagccatgctcccaaattggacagagagatctctggcctttgtcaaatccccaattatctgttccctttagcaacgtccctccacccccgactctagtcctcacaagttcccctctgcctgaccctttactcacctttgtcccttcttttccagctgttccagtcagtccctgctctccagggggtcctgggggccctgggtgacctcgctcccccatgggccccgtctctcctgctgctccctggggatgagacggaaagactccaagctcatcctctgccccttggccaaagaggccacccttgccaccctaagataagccccctggagcccttatccctgccccaaggctattgaggaattcctggggctctcctaggccgctgtgctggggcctaattccccagtttgcagttaactgcaccacccagggttcccactgcggaactgcccctctgggacacaatgagatgagaactggcccaggaaccaggctgaagttgagatccctgctccaaatccccacccagggcacctggggcaggtagagcaggggctaggccatgtgatcaggaaaagggaaaagaggagcagatgacctccacggtctggggtccactctcccccgagggcagacatacctgaggtcccaccacccctggagggccaggggggccagtcttcccttggaaaccctgagagaggaaggagagagagcagtcaaagcacgtcaggcatagacactgggatagaccccaggttcctggagaaaaggcagagtcaccaccgagtccttggtcatgggtctgagcagcaccagcttctgactctgccacaacaacctccctggtgggccttctagacggctctggactgtgaaggtccgagggggccaggtcgttacttaccacttctcctctctggcctgggtgtcccggcagcccatccttcccagggggaccctggaaggggtttagatgtcaagcaaactctgggctgggaaggaggatggaggagaagaaggattcatagaaccagaggccgtcagaggtcagaggtcatcttaccggaggtcctttggggccaggaaatccattggggccttggggtccagggagaccctagagacagagccgggttgaatcaggagaataagcaaggggtgcagcttcccccaccctaccccaggggtgagagatgagggcttcactcaggcccctcaggaagcgctagggagcaggagactcaagctgcactcaccctttctccagggggtccatgggggccgtcaccacctgatgttccctgttgggggaagagagtcagggggaaagaggaactgccttctagcatctggaggtcagaggagggagaccacagggagctggattaagcagcagatggcagaagaagccctgccaagaccactaaccttagctccagacttcccagtggcacctcggggtccccgctgaccccgtggaccctaaagagaggggaggggagttgtcagaaaaacccaaatgcacctctttggctcttgatttccatgtctgccctccacacttaccgtggggccccgctctccccgaggccctgatttccccgacaggccctggtgggaaagaagcagaaacaacacctcacccggggccaattccaccaacagagcagccctgcactccacaccctctcccttccccgggcttacccgggctcccttctctccactggcgccgggaaaaccaggaaatcccagagacccctgatgaggtggagagaaggaaagatttgagaagtcctgaaaagggggcagcagggtgggagatctgggctctaccagtaactaggcagccttggacaacccccagtccgcccctgctgctctctggctctctattctcccatctgtagaatgggattaggctaaattcgctctagggccccccactgctgtcagtctcttcttcctggaatcaggagtcagaggagggaagaagaggaggagacacacatcgggcatcaaatcaccttgggaccctggcgtccagggtagccgggcagaccaggaacacctaacttgccctgtagagagacagggagcaattaggggcaagaggagtcacagaccatctatccatggagatcccaagtcccagagacaggagccagctcctacccatcaaggctccccagcaaaccttcagccccctggcccctcatctcgtactccatgggctgcctggcttttgtaatctctccttcctgagagtggattttcccccactgatgctgggcatctcacctcttctgtgtctttaaatccgtggctccatgaagttcctggggattgtgatctagcccttgcctacctgtggacctcagcttcccttctccggcacacactcctactccaccaagaccagtcccctggcaggcccgcacacaccatgctcaggatggcctctggccatgtccccataccaccccaagtccctctggcacgcacccccttcctcctgatgcttcagggcctgccttgcccagccagctgcggagcagaggttaggtggagggattctgcagcctgactactaggggtcaaacccaggctatgcccttcatgggctgggttactgagaagcatcttcacttgctgggacttcagtgaaagctgtctgcaacaggaggctgtagggtggctgccccacaggactcataagacaagcaggtgcagtgttggcactcagtgagggcttactgacagctctgcaggtctgttcttacctcctctgactcccccttcttggaattcctgctgctctgagtctggactcatttccattctgcctcatacctacattccttatgccagcttcatgccttgtccccacctccgtatcacgtaaattctcacgacagactattccatgacttcttctatagccccacctccactccaactgtcagtggaaggcgatgccttctacagagaggagcataattaatatataatggtcttcaaatgcctcattgactccagctattggcatcccacgcccatcctgatccagtgcctaggccctcatcccctccacgttcctgtcaccttttcacccatgagccccggtgggccagggtctccagtgggtccagtacgccccttcggcccctcaggtccatcttcgcccctggaaccaggaactccaacctctccctgggtaagaaggttgaagaggtgtcagggactggtggcattggctgggccccaagaggagaggtgggcctcggtgaggctgagtagggtcccagaaactactgcaggacaggaagccccacaggaacaggaagagtgttgtgactattgggttggtgagatgaaggctgcagggtcaggctctaagaggagaagagcacgggagatggggagtctggggttttgggaactaggctggtaattgggggctccaatatggaggaacatcaggacttagcattgggggccatgtgtgggtttctactcaccctgtcacctttcacacccatgtcccctttgaacccgggaaagccatcctcgccctgagaaagacagggatgagaagtcaccagagatgatagggggcagtcaggagataaaatggagcatttcagaaaacatgggtggaagggtagatttcaaagctggagagcagtgcagggcaggctggatggaaggaagtggggggaagagctgggcagaagaggtgatggggcaggatggaggtgctgggtagctgggggcacatcactcaccttttcacccttatgaccctttagaccacgaattccatccacaccctagagttacaagggagacagagagagagattgaggacggaggttaggttggaaggatcgagctcctgagatcccagctggctgccccgacatagtcctttatctcccagcctagttgtccattaccttaacgcctcgaggtcctgggtatcctagaggaccctgaggtccagatggaccctggaagaagaaagaaaggtatctaaaaaggggtggaaccctcaaggggtggaagaaacagtagagacaacctcggagtctggatacctagaatacttcagagccacatgaatgataaaacaaggaaattccaaggactttgaggccctagagtctgggtggaaactccctcaggggtgaaagcaggtatggaagatctcacctggtttcctttggttccagggggaccttccttcccagggtgaccctggggatagggaaaggagaatgtgaccactggccactgtcaccttccctgcatgcctccctttacttctttaacccaacttctccttgtgaccctgatgaagccaactgaccacgggcaggcaccaccagtggaccccccagtgtgaaggacacactgcatagatggtcaccaaagacatctggaggtcattcactggggtggagagtcaagttgaatttggattaagaggtgggcacctactcaccggaggtccatctgagccaggcatgccagggagccctggtttccctcgaggaccctgcaggaagacaaggaggctcagggtcacaggaaggatcagatcagaccatggctgaagtcctagccatacatttaaggctcttcctacatccctccagcacatgccctgtccctcaaatcacttagtcacttactttctctccatgagggccaatggcaccctgggggccgggaagaccctacagggacagagagagagagagagagaggttacaggagcctcacaggggtgggctgctctctcccatagccaacatccccgttcagggcatgagtggtggggcttgagacccttaatttccatccaaggtctgacccactggggaagcccggatggggacaggttgcacaggatggctcacctgggttccaggagtgccctgttgtccaggaggtcctggctctccctggggtccctaaaaacaagcaaccaggtagaggtcaaaagaagatggggacagaacaaacttagggtagagacctgagtcccaacagggacagcaggagggcaagaaccagaagcaggtggcgggagggtgggggggtgggggttgtcaaaatgatcaccaaggaaacaggaccttggctaacattcaggtggtgcctctgtgcccattactcaccaagctccctttgggaccatggggaccatccatgcctcggactccctgaaacaggagaggggcatgagcaggctggaagatggggccagggccctgggcagacctgtggtttctgagagacccggtcattccagagggtgggacggggcagccttacattggtcagacctccagatcatcccaaagctaagcaaacacagccagcccagatctacagggcgtaggtctatgggtctgtgggtttgtggggttttgttttgtttttctgcaaaaaatgtnnnnnnnnnnnnnnnnnnnnnnnnnnnnnnnnnnnnnnnnnnnnnnnnnnnnnnncactgtatcatatgaccctagaagggcacctgggcttatatgctggagcagagctaggttggggcagggtgggggacctggaggtgagggaagagaggcagctaggaagggtggagtgttggaaaggtcagggggtgaggccagggtcaggagtcaaggatagtcacataccgggggtccaggaataccaggtgggcctttggggcccaggagacctcgaggtccctgcaataaggtgagggaaagatatggtatgtgtgggaaagagataatgggtccctcctgtgtccatacccctcccctggcagcccccagagccaaccccaacccaaccccctctcaccgactctccaggcagtccccgaggcccaatctccccatcatctccctggaggaggaggacatagtaaatcagcttcaccctccacacttctcccataccaagcccctgtcctggccacaatacttacccgctctccatcctcaccgggtgggccaggaaggccctgggcaccagtatcaccctggaaaatgggggactaggtaagagggaccccagagcccccagtacagccagacactgaccctcttaaattaaccaaccagtttcatccattaagctcctgctggcatgctcagcctccttccctcaccttgagatccctcctccacaccactccatagaaagttcaccccctcatcactcacaatgcattacccccaagatactcaccctgtgtcccttctctccaggtagccctgggagtccatcaaaacctcggtcaccctagggaaagaggggcaggcctaatgaggtcccagcccctttcccactccatccacccctactgtgtcctgcatggagaggtgccacttcatgggaaaccttggtcaccccaaaaaaacaaataagcttagatggggctggaagtcacaggcatcagaaagggacccatgcctggtaccttcactccaggctctccaggcattcctcgggctccatcagcacctgctcggccctagggatgcaaagcaaggctcagagcaaacagaggcacagtcccccacaccccgatccctgtctcctaccgacacccaccacaccccactcacccttcgcccagccttgccaggagggcctgtgaggccttgaggtcctctggggccctggggagggagagtcaggagcagggttaaagagcatggaccaaaagggaggcactggatgggggaatcagatgggtgggacttgtcacctgaggtcctaggtctccagattctcccttcaggccagggctcccaggttgtccctgggacagagaagagaggttggctaagttgaaggacacacccaacaaggacttcaaagccctccccaaaagtagcaaaataactttcaacctggtccctttccagaactgtccatacccacacacacaaataaagaactccctatcccaatacccaactcactcaccaagggtccagggcggcctgtgtatcccatggggccagggggtccccggagcgccagctacgggagcaggggacacagtacagctgaggaagaggcagcaggagaactccctacgccagtacaccctccaaattcacccctccactcctaatcctcactttacggtcttggattctccccaacctccctctcagctccaaatcaacccagaccttaccctgccccacatttactccaacctacccttccaacccctcctaaagtcttcacttgctctccatatccctcccttcaccaagatcccttctagacttactcacccgtgcctgctgcagaatcgcctgggcctgagcctcctgggctgccaccacaggacccttgtcacccccaccactgccaaaccggaactgaggggtagagagaaagaaaggtccagattctcttccaggaaacccatgtgaccctcccagcccaaggcttcatccaacacttctgccccatctcccaggttcagggacacctcccaccccataccctcctcgagtgtctccatggaaggttttagagaatcatgcagcagttttcagaaactctactcctgtcttcctcccccgctctctggcttcttcctctagaaaaactgtcctttggttctagagtccctgaaacataggattttctgcccagttctagatgatccatgttttgttctaggtcatctaatgaggcctagtccatccaactcaaagatcaatttctttgtgttgatgttctttagagattcctccttagtttcctggtctcctggtttttggtgatagaacacagttctcctgctgttcccactccaaaccccagaagacaactcactgggagcataagagatgtgccaggagggccaggtgccccatctgatccagggagtcctgcccggccaggggggccctggaatagggagaaaatgaacataggtgagagttagggaatgttagggtcctggcatcattataagagcctcttacagaataaatatagacttatttacatctttcctaaaccccacccccaccccatacagaaaatgagggcgagacaccagattactcccctctgtaaccagaggtgttaggtcctcctttctgggtgttagggagcacccttgttcattaatcagctagctaatgaggaactgctgagcttggtaccctgttgagtactagaggctccactgaagtcctacacaaacacagagacacacagacacagaggctactctcttaccctctcgccagggtctccaactgggcctgggttgccctggatgccagggggaccaatcaacccctgaggaacaaaaaacaagtgagtcagctgagggcattcagatagaagagggatatgtggctgcggggtcgtctctacaaaagagatttgaggatctgggaagctttggaaggattctccagagttctgagaaggaggcctgggtatatgtgggggaaggcataggtgagtgtgtaagaagggtctctgagaaaaggctaatgggtcacagctacacttaccgcagggccttctgggccaggaggcccctcgactagcattccctgtagagtcaaaggttaaaagtcagagactatagggctagcacccccacttccttttcctcttccccctgcctttagtgactaacagtgacttacaggctccagcaccgcgggttctcccttctctcccttcagccctcggggtcctcgggcagcctgaaggagacacacatgtaacccccagtggggcctgtgagcagccaggacaccagggctgcccccatcccaactcccaccttccttcactctcagatcctctggagacctctccaaccctacgtataaaatcccccagccctcccctaagactccctcttcacagaccactcaggccttccaaggccttcctgcccttccacagaccacagggctctccacctcccaattcgcagccccatcttagcaaataaacttcctcatatccttgtggacctctttcaggaaggtcttcacacccttcctggaatcccaaacccttcaaccttcccaaactctcttctggagaactttaccctattccccaaactccctctgagtccaggaatccttagaactttaagaaactatcaacttcctccaccttactgcaagccaccaaataagcatttctctaagattgtggattgatttttattggggtttaaagggagggcatgaatccatataagaatctgatataatccatgaagtcttttccaggaaagaaaaagtatatgcccttatgcacagaatttttcttagaatttcaaggggctcacaagttaaaaactctccagaagttaaacatccatactgtaagtggaattggagggcagtccccactgatatcccaaactcagatctcataactagttttgggaaaaatatagctcttgggctgttgcttaagccccagaacagactccctagttcccctcccagcaaggacactacactcttcctctggccctcatttatattccaaacccaaccagttctttctttttcatacttctcagatgcccacccccaacactaaggccagaaccaaaataaggatgggaagaatggaaattactctccaccactctccaactctcccaacaaagatcttcagaatgtcccctctacctccatcctgacccaacagcaatgatgaatttccaaactcccccatatcccagatcaaccccaaatttccagaaggcagcaaaagggaaaggagcatagagtcagggtggcaatattagagaagggaagtgtaggatgaggtagcagggtagaggaggcagctctaattgcaaggcaagcaaaagatgaatggcgtaggcaggaaatattccaactgagatggagtggttgaagacatgggaaacaattaagggagacatttcaaagggacaaacacttggaagcaaaaatgaggtcagggccaagaaaaattaaacatggccaagagggctagaaaatgaactagacaaacaggaagtggctggacagacaggaagcagccaagaaaagaggatccaggaagtggaccttcaacaacaacatggctaccatgacaagagaaagaagaagctcacaaaacagacaaaaagtgactcctggagaggggattatgacaatgaaaggcaattcttccagaaaacacaaacatttaggctagtacacagaggaaatagccatgataaatatctaggcccgtaatggaaacttcatgatttggatgccctgaaacacacaggaagtggcttattagcaaaggaaattgttacaagacagcatgaaaaactagagccaaaacataaataagtccctttcagtacaaactgtcacagtcaccaagatggatgccatggccaagaaagacaggaaaggacagacagggagtggcctatcagttagaaaacgtgacataggaagttagaatatttgacagcaacatggataagaaactgtttttattaagaagaaatgatggagacagattgacaatggacaaaaagtaggggcttattgaccaaaagctttatgaaatacagtttggttaagatagaaagtggccaagaaagacaggaagtggccataggattaaaaaagaaaaaaaaatcccaactgccctgggcagagggatccacaaagtgatacagggcaagatatttggcgagggaaagcaggaagttatccttttaagcaacatatacatcttacatgaacagaaaatggcaagtcatcaatgggaagtagcttgcagccaacagacattaatcagaaacaacaggaagcaattcttacggctcccactggagatcaagaatggaagaggagctcctttcacttacggctcccaagggggctgtctctgcagacaaggcagggccaagctccgtctcctcacgataatcatccccatagccataggtgtaatcgtagggccctgctggggggtctgtgccaccctccccatattcctctgtcaggaacctgtcggctgtggaggggacctggagatctgtctgctccttcccggggatggggagggagaggggtagatgggggcattagggctgagaggaggtttttccctggaccccgacggtgtggcaatttctggcccaaaggattctgggggtaactgggaccagagattttctcccaagaagatcaagggaagtggttgtatagaaaggggagggccatcaaaggcctgaaatgaggagggatgcccccaaaattgggcctggagggaagaaatgatgaattacaagtaggaagaagggtggccggagggctggacacagagtagacagacagtctgcggagacaagggaatccagagaataataaaagaaatggagggaaaaaaacagagaagaaaaaaagtgataacagcactggacagcagataactcctgggaagaaaaatatgataaaaacaccaacatggggaggaggttgtcccagaatcaaagaataatggcaggagacatggacactgaagaaaaatggctgtacttagaaaaacaagcagaccaataggtctggagtgactagaaggccacaaatggagatgacaaagagccctccggccagaggaagggctgattcaccaagatatcatggggcaagggggctgggtcacagatgcccactgcccccagctggggtgaaggtgggggatggagttacctcctcaggggatggcaagggacttgattccaggattccttcctcttcacctggggtggggtcctaaccccaaggagagtggggagaagagtaacatggtggaaaggaaggagagaggttagcgggaggggaggcaaagcagcatcttgtcccccaccgtgcgcagtatctgtctgtaccgtaccggggagtgggggcaatctcagatcttgcagcccctttggaggggggacagtttggggagagtaaatctccaggtcatagaagttaggggacacagatctggatgccccagctctacctgccggtaactgcttcctctggacctggggggagcctgggcagtggggagaagatgcctgctaagctgggcatcggaagggggtaggcaggtcccgtgctgggccagaacctccaattctagaggacctccagcctggtgaggggggcgcctgccaggctgctgatctcttggcaggtggggtaggctttctgggaggggtccgacaccccctgggggagggggagccctgcggttggggcttgatggcctctgtagcagagagacatgggaaggcgcagtgaggaaactcccataatctaaataaatgatgtctctccctacatgttaagagggaaggaaggtgtcttaggagatctttacaaggggtgatgggaggaaaggaagaaattaaggggtccctcatgtttacctgataatcaggggtcgtctctgtagtcatcacatcgtaatagggggtctcgtagttatagtagaaagactcagtggactaggatttgggaaagggcaatgggaatagtaggaagaggtaggagtgtaagggtgaggagagggagacaaggggatggtgtgggagtttggaaatagggtaggagttggggatgaaaggagaggttaggggtcaggagagagaagaggagaggtagaaagggggggtgggtcccacatgtgggacagaagcagacatgattaagagattgaccttccaaacttcagaccactgatcccagatcatatctgtcaccctaaccatctggaacccaagcctcctccttccccctctccccagccctttaccctgtaccttccaatgaattccatagaattccacagaattccacaggcccagcactctttcaagattttccctatctcctgctcctccccatttctcctcctaagtcttaccatttcatcttttctcccttgctctgtctctcccatcctctgtccctgcatcttatcccacacacacaatgccccccaatctcttaattcaaaaaaagggatgggaaacccaaggacacagttacagaaaagactggcagaggaaagaagacatgagcaggggacacagctcccagccatggattctttcataaagactctttttattttttattgaaaataaaaaggttgatgaatgaggactgggaggaggagtggtggttgaaagagggaggcatggttggagagtggctctaatggaggggaggacaggagcccaaaataggatgaggagctctgagacattgggggaattccctggggaggtgtctgggtgccttccctccctggagtgtgctgtagtctagggttcacccagctccctcacctgttgctgaggttcctggttttgtggcctatgaagtcttgatggctgctgctttggagatctctgggctctgtgtttctgaggtttctccttccaagccccctcacactccagctccttctgttcacaggattcataggcagcttgtacccctgggacaatgacaagctcctggatgtcaccctgcaaagacatgaggaaggaacttcaatggaaggaggcagaggggggttcagaaatagacagagggttaagtctggaacaagggctaccagcccgtcctaggtaaaacaacataatgggagaagatcattatcagccctcccatgtacatagcccttttcagttttcaaaggaccttctcatccatgatcccactggaccttcaccacaactgggaaaatcagtagggcaaggatatttatgcctattgtttgatatattccactcaggaaagcccaaagagacaatgactggcacaaggtcacttgcaatgatggactcagactagaaattcaaatattccaactctaaatccaacattgtttgcctatccccggccccttgtggtaatgcatgaaactttccacaaggcttctgaaaacagtgtcccagccttacttgcttggaccttccaatggcagaaatgatgagaattctcgggacctctagaaatgggggagagggaagccacttttgaattccaatgccatttatctgtgcccacatgtggtgcttagcacaccttgccatatattatagtttggagttactgtctcatcttcaaagaggacctgggagctcctgaggatgacagagatcttacagtattcttctgtgttccctcttgagactgggacagcaagtattcaaagaatattgactagcgaggtgggtggatggatggatggatgagggctcagatgcatgactgactgaatgggagggttagtggatggtgaatgaatgaatgagagggttggtgggtagataaatggaggtatggagtagagagaacagattgataggtaggtagatgggtggaagtgaatatgtgaatgaatgaatgaatgaatgaatgaatgaatagatggggagtgcgtgggtgaatgaggggacggatgaatacatgcatcctcatatgcatgggtagatgggctaggtgggtggatgaatgattgaataaatggatgggttaaaggtgaatagactgacggatgagtgaagaagaaagtggctgggcagaggaaaatgggcaaatgggtggatacaaacttgaatgcttgattggtgggtaagtgcataaatgggtgggtgggttttagatgagtacatgaatgggtgggtgtagatagagagattagttgaagggataaatggataggtggactgatgaagacagctgtcctgccatagaagtgggtgcctaattctcctacagagaaagttagccttgaggatagaaaatggaaatataaattcatgagagctcaaatgaagggccagagtataagaagatggagagctggggccagaaggggaatagacacaatatatgggataagaaatcactctgttctctgttctggttacctcaaacacttcttcatccaggatacgggcaccaaagataatcactccatgggtgtccaacaatggacgagcacttcgggggagaggccgggtgactcgcttcttgcagtcaactatgagagtgacagactggcccttcacagccacagccacacggtgccacctggtcatggggcgggggggggagtggttcaagtgactgagggggtgggctcaacagggccagagaacagttagttgatggagaggttggagccaaggataacgataataggaatcacagtagctactatttattgaatgtttacaatgcaccaggcaatacttttctcatttgattctcgtgatcctaccatccctattttatagccatagaaactgaggcttaaaaaagttaacttgcccaaggcacaggctagtaccacatgcaaggatctaaactctgaagtccaaaccctaaaccaacaatgtctgaactttgggcagtaggtagatgaggtgtggccaaaagggttggcagggtttcctagtgtagggactgggggttctggggcagtggccagaggggagctcccgaaggggcagtgcaggcagaccagaggagcaaactgacttacttgccatctgctaggctgaggcctcggaagactggctgagctgggggttgaggccgtccagtctggtcctcatacaggaagcggaagggtcggccaagctccaggcccagctgttgaacaccctgggcactgtagagtgtcaggaggggagcctgaaggccaggacgggtccggacagcagtcagcaatgagaaatctttgggaaaacctcctggtacccgaaagaaacacaaccaggtgcaatgagagtaaaaagagccataaaaccctcccctcctggtgtctgattctagaccccaccctgtgaccttgccccagctctctctattccaccatgtcacccatacctggaaagagctggcgggtgggtgcactgagctgggcaggtcgggacactcggtaggccacatcagccggacagatgcctctggccctccggacgccatcaggaagggagggaaacctcagggccctgagcacatccacagggggtacacctgggaaagtccatgagagtcaggaaaagggacacatcctcaggagggccaagacatggggacatttggagtctggaactgaacctcctagggctcaagctctctgaaggcaaaggtcacctctcccttaacttgcctctgaatgggctctgagtggatgggaatcgagagtcacctggaagagggtggcactagctgtgtattcagctccacatggccctctgcctcccagtgtgtctcgctcagtctctccctatctctgtctttcaacccatgaatcctctctactctccaccatccccccttctctctcactcttcctatctctggatctgtagatctctctctctccctgtgtcttctggtttcgtccacctctcttacactctgtgcttttctcttccctgtctttctccctctctcactccctctccatatctctgggtctctggcctccttcccgtatctccagcagaaacaacatctgggcaatcgatcatcctgggcataggaggtgcagaggggccaccaggcagagtggagaggcagatctatggggatggggcttcaagctgcttcagttcctgcatttggggagttggggacaactctgaccatgctgaggaaggagatagcagaaagagccaccccaggagcctatacccctggctcaggagatgggctgggggggcgggggcagaggggaggactgaagctgccacgaggagccggagcaggtccagggccccaagccacacatctgtggatcccatcagagtccttgcccaaaaccaggcaagctccccacacctggaacttcaaccctgcccccccccaaccaactcttggatccaaagattcaagacccagggtatctgccctatccacctagaattcagcttcctcaggctcaaactccctggaagacaaaggtcacctttccctctcttgttcctccatacacacactcctcacaccatcagctccagattggaaaaatcccagagaaagtccagcaaaattttcatagaagcacagggtgggcagggcaggggccagagcgatcagaagagtagggctgggtggggtgggtgaggtgcagcggagaggcagagaaaaggctctttgagtccaggagctgggaaaccacggccttgccctccccttcaccaccaccccgcctcgccctagcctggcccctgagtgtggcagctccacaaacaccaacacacaagggctgctttgagagaggaagggtgagtgagacagagacagagactcacagagaccccaggccaaagagacctcagagcccccgccccttcaccaaatcccacaggagtatggttccatcctatagacgatctacccacaggtctgcccacccatctgccaacctcaagccacatatgtgcccccactggctctggcctcaatctgtcccacaggctccccactggtagccccatctcccccatcagtctacctttgccccatttttttactcttatgaattccacagtagcccatttccctgtagagtcccatctctggccactcagccccaaaataagagaatcatctcagccatgcctagcctccatgctagagggttccttgttccttttctccctaagaaaggctccaagaatccacagacatcacgcgcttcaatttcctgtcccttagcctcatgctccttgcatcttggaagttcttcctcctgtgatctaatctaaatcctttatgctgctattctgaccattttctctccagaagagagaagaaatgaatagtggagttatacgcaaatcagctggaggcaaatcagttaggtcctgcctgcctaggacccaggcgctcccagccccctccgtccagcatcaaatcccttacctaggtcccaggacttctggatcctgagaaaaaagaaggaaaagattggggtgtggacaccggggtcccaggggagccctgctggccagagggggaggggtgaggcaggaatgcaaagagttggctcccgcctcagacacctgatcccagcctgtccagcggccgtcctgttggcagccagccccagtgctccccagagccagccgcgtggcagcatcgagggcacagggagggggaaggggatcctatcggggaagccagggggacaaatagtccaggcgtcccttctttccttacttactgctctgctctgacccacagatgctcctcccctctcaccccagacatagatagaaagcccagaagacacacacaatcctcacccgtcaacactgacatctgcctcctcaccccagcatcagctggacttcaccagccctggccatcttcggctctccctggagtccctcagcatccagtcccactctttaaggtgagcctccacctttcagccttacctgctctggcccagtcactgcaaggaggcaaagagatccctaccgtggttccaaggtgacctgccctccagcctggatccttggcccccaaaatccccttcttgaactgagaacctggcccccagcatcagctgtcccctacccaggggttactgagagctaccgcctgactctgaggatccagcgccgggactcctcttacctgcccaggcagggactacgctcagccccagcaccagcggtaccagcaggaagaggcgatggcagcggctgcaccgctccatggcttgcgaccctaacgccgggtcccagggacctagggccggccagaggcgctgtacggcccaaggctgacaggggagaaaagcaggctttgagcctcggacgctggggttccgtagagatcagaggctgtcgggtagcaacagctctcagtggcccagctccatgcaaccgggcgccgtcggggcttcagcactgctccctcctcggtggccgccgctcctgtgtgtccccggccacccctgcggcccagagcccccaccccgcccccgtcctggcccagcccccgcctccagccgcccgcccacaggcaccgaagggaaaccccaccctcgatctccacctggtttggggtggggggacaggagccctcgttccctgcccctcgtgctgctttcctctgctccttgcagactgaatggcctgtacccaagattacctttttgggaaccccaatatctcttccccggccccttccttttctaggacccagacctccagtcgaagcccccacctcaactccctcccacctggctgcccagagcctcttttcagcagtcctgggcgggacttaggacacagtgggaggggagaggcgggcctgggggggtctctctccccccccaatcaagtctccataattacttcccttcgccccgcccagtgtaattacaggggtggcctgggatggggtatttatagacaaggctatagatagcaatggggtacctgctacccgacagctgcgagtggtggggaggggggcaggtggttacaggaggggaagcgggggggagggtgcggcgtgggggcggtgagagccagacgctggacagcccaccacgcacaggataatcaggtccaaggagatgaagagggcggcgggacgaggccagggagtccgggagcccaggtggcaagggaccccgcggagagacgaggggccgtcgaagctagctggaagagcgcggggaacagggtcactcggggacgagacgccggtccgggcgggcaatgcctgagggggcctccgtgctccgcacccagcgcgcccccaccgacgggcacggcgccgggtctgcccggagcccgcagcgcggccggcgagggctggagctagccgaggcgccgccgcccgctggcgctaggagggcgcgggcgaacaaggcgcctttgagaatcagccgcccccctcttcctcctccggccggccccgcccccagcctggcacaccctctcccccctccccgacaaagcgcgccttgtgtcccccacccggtgtctgcctctcgggccccagggaacctcggcggcggcagcgtcaagggagcgcggccccggagctcccgactggataccctccctgccccccaccactcggcgggtgccccgatgcagtgctgctcccctcaacacagtcacctcagtccagaaaacagcgattttaatttgaaagctagtttatgtgtgagtgaaagagaagggaaaggaaccccagagaaaagagctgcagggcaaaaatcatgcagccccagcacctcatctccgcaggctaaccatcccccctcacttctcaggccagggtcctgtgctccccccaccccagtctacactgtgtgtgcccaggtctggggggaggctgtcaaaggaagggcctgaggactgctcaccaaaccatcccaggcccctccctctacttagacaagaagagatggggagggggttgggaaagccagggcttgaagggccccatggacagaccatctcagggcccagccttaacaaacaccacctccaccactggcatttcttagtcaatctgggaaagtacagtacttctttgagtctaactgcaagtctctatcctcagaggaaattaaaaatagcagatgggttcctacatctccacccacccctcaaccactactaccttttcatttttcagtctgactgcagcaggaggtgaagtgtgagacagactctggacaggagacagtgacaaggctcctccttctaccagagtagcccccacctgccgggctactgtcaaggctgtcaaggtctcaaggaaggcctgtcagagtgctactcccatgtccatcagtttgaggggcctgccccccaacatccatctctgggcgagttcccattttctctcttcacatgggtagctaagtgaggcaagatgagaaggaagcaaggtcctgtgagcaaggccagtgctttgtgctaggggaaggagagatcgttccaggcagggcgtgagaactcaccccaaatcatggcagacccacacaagttcagagactcaaggccactgaagggagaggtccagccctcacaaggatcgggggtcccctctgatttgggacatcacgcaaatcccctggaaggtttatggatccccttggaggtctcagttctgccctgtactcctcacctcaccaaggttctagggcatggcccctcccaccatgccccaagtctggagtccccctcatgtatactcctcaggtgtgaggagcaccacatttaggtctgggctcaggccagctggtggggagcctcaagcatctccatgaggaaggtgtcaataggggtgtctccaatgagcttgaagaaaaacagatgctctagacacttaaggccgatggacctgagggcaggaagacgtagcagcagcttggcaaacctgaggtagaggtgggaaaagacagctggaaccacatgggctctgatggcaccccacaattccttgcccccacagctccttctcaccgtccctgctgctcagggtacttctgcttgcaataggtctccagtgatgcatacactttctcccgcagaacctccacctcactagggttggaaaggcccttggcatctgggatggcaaggaaaagaggaggaagaagcagcaggacaaatcaagtcaggacaaatgtggagatgtggcccacacgataccctctttgggccccacctaaagcctctttaccagatgcctggcaaggaagcagggcaagttatggaatggggtcaaaagggaacgtatcagtggatgtgggtttttcctggtcagctgggaggtttccgggttgaggggggatagctgggtaatttaggagtctctggagaagaggaggctccaaggttgccttggtcttaaaagacaagggtaatcctcctcttacctggattgaacagaatgattgccctcaggcagccaagctctgtcttgtccatcctcatgtcacgcattttggacactagctctgtcagcaccctggagagggacctgcaggtcactcaaaggtcacagctcagccagccttggacacggaccagcctatagccccaccccctctacctacaggccagcccagcagcgggccactgaccgatcaaagatggctcccacgcctgcagaatgggctgagttgcggtgcacatgaagacctgtggcaaggaggatgccatctcggacatcaatggatcggtgggagaaggaagcaatgaggagctcgttccagcctgggtagggggcagcaagggtcaggagccagggatcagaccatgggagtcaaagcatatcaggggaagagaagaagtggtgaggtcaatgaacctggcccccttggtatgtaagtatccactggggtcactgaaggccagaaggtcaagtaggggtcaaatgtcaagaactcaaggggatgcaaggtcactgacctgcccgcagcaatatgacctggtcatccagaggcaaggaggaaaagtgtgggatcctcttcgcccactcaacaagcgtgaatagctgtttgtcagctgcctgacagatgttagtcacagggtcatttggctgcaggggatggggggggggtgcaagagttacagaaggtctggaaatacaatggaacccccccagttttaagaggtttctgatatcacctcctcatacagagtctcccttcaaaaccatgaaccaatccctgtaagtcaggcttctcctctggcatttgtgaaaacaattacgtatttaggacttgcctgtggttctgccactgggttgttttgggatggggacagaaaactatcacacccacctcagatgtttgacaaaccttgtttggcagcacttccagtcccaagcagtgttgtggggggaggtgggggtagggttgggagggaaagggagtggagagggaaatagaaccaacctagactcccatccccccaccccccatcaggaaagagactggattgaccccatcactcacgctgctgccactacccccggttcccccaggaccctcaacgccctggtcactcttctgctccacagcaagctctgcctccaggatcctgtccacaggcatctcctccggggctcccccagccccttccccatccccgtccttgtccttcccccgctgacgctcctcctgaactgctgcaagtgggaaggggaagagaagaaaaagtggaaagtcaacagtcagccacgaagggttctgaaatgtccttaggtctcatcagggttcttatggcccttaggagatatttacaggaactggggaagttactagcaacagtggactaggagcagtctggaaacgagttatacaagtgcagataaacaagccaagaaggaggaggggatgggagggtaaaggaattagggagaaagctaacatttaaactgaggcccaactacgttctaagaaatgtgaaaagaaatgtaaaatgtgaaacattttatagttccctcaaattattttaagaatcatgtgagctcttacccctgttgctaagatgaagaatttagggcttggagaagttagatagcttgcccaagttcacataatgcccggcaagtcatccatctaaatccaagtttgcctgactgccaaagagatgctcttctgattcagtgaagagatagtgaaaggatcaccagcctgggtcttcaaggatgggttctgatcccagccctgcccctcttttgttccatgacctcaggaaaaccaggcctcaagcccatttgactaagatactctaaagtgtttgaaaattccagcatcagacttaagacaagacaaagaaaagggaaggcagccctgaggtcttcaataaagtctgcaacttaaaagagtagagttccagactttggaggaaggaccacagataaacaatcatttgggtcaaagaggagggactattcaagctgagaagaggagacagagaagcccatcacaggtaaggaaaagctatcctaccctagtactggggggggggggggcaccccagtggggcaggccacagaaaagccccccccttaagaaggaaatgagaacagaacaggataccaggaagaagagctgatgaggaggggagagagaaatcaaatatcgccctctggaggaggagagagaacagtccagtcctacggagagatgtagactaaggtttcctgcagtctccctccacctcctccctcctctcccacagggtagccaaggaagcccggctgatgtggacccttaccctccctcttcatgccagtggccaggcacttctgatagcggcagtactgacagcggtttcgctggcgcttgtccacggtgcagtccttgttgtcccggcatgagtaggtcagatccttacggatggtgcgcttgaagaagcctttgcagccctcacagctgtaaaccccatagtgtttgcctaagaggagaggggaagagcaacaaggctgcatgtagatccctcaccattaagtctctcaccaacttcccctcagcaaacttcgtttaaatccactgtgtttgccaaatagagatggggaacccagaaatgagggatgatccagtcccactctcctcactgttcaaaccctgtaccagccctcccttttctctgaccatccccctcccacatctgagcttcaggtcccttaactatcatcaagcttccccccacccacttgctccaatgcaaccctgtgagcctgtggcaatcccacaggtgatggtaaatgtcagatgctctctttcttcctttttggtgatcacctgagcctcgtacctgagcttcggtccccgcagattgcacacagccttttgccagccccaggaccacctggagggggtggacagtgcaggccccggacccctaagactggtggcttcacatcttcaggggggccagacccacccccagggagcgacactgttgagttaatctgggatgggggaaatagggaagtcacagggagactcaatgggaaggagaatctctcaaaggtcatggaaatcatcccctaccacctaggcagggcctgcattgcacattacagagaacattatttacattgtagtctctgtgaagggccacccctggagcacaaccccaaagagattagacatacagttctccctgagactgtgtaatacaggagccctgaagggcatgtatctcaggacaacagatgggtcacaaagggcaaaaataactgatagatgagtgggacgtcagcatagggtcagcatagggacccttttatagggttgggaaggaagcatgcactgaaagatcagtcacctcaggaagggcaaggggtctcacaaggaccacaggcctgccaggattagaggactggaaggtcagtgggccatggggaagttcacacaaggatctggggtcacaaggaaaacaaggaaatgaaagtggagaggcagtcagtgagccatgacctctcacctggggactgctgacaggcccggagaatcctgggggagctggagggggcaaaccaggggaccccatggaagagctgatgactgggaagggggagcccagttgggggggtggcatcgggggtgggggtggggccccggagcctccaagggttggggctgatgaaggggggaggggtaacccagggggagaagggggaggagccccctgggaaaggggattcggggaggaactgtctgggcttcgggagtctgagggaagggtacatagaggcacagagacacacagacagaaagacaaaaagagaaaatgagtcttagatcatccaactggagactttaattctctctctaacccccactgcacccctccaccccacccatcctcgtgtccagaaacacccggttgtcaaacaacggtttaactcctaattgtggtgagaagagggggttgacaaaagacaggagagttcgggtgagaaagaattccaagcaatatacttggtcacccccagctaggcagatcttatgtgggtggggcagcacgtggggtggaacggacagcccctccattcccagcttgaagccggatcgtacaatggaaaggggcggaagagacccttcctcggacgcaggatctgccttcaaacgtccagagcccccaaactcgaggactcgtgtcccacgcacgggacctcaggactgcagggcctcaaacagccaaagccaggagggcggaagctccccctccccgccccgccccggggggggagggcgctagggccctccggagggaggggacgcgtgtttacaaacaaggaggcgggagcgccagggaaggagcgccaggggacgggggggaggggtcgcagataacgcggtcactggttcgcctgtccgtccgctaggacactcaccccgcccgctgtcgcccatcccgtcccgtccagcctcccccggctccggctccggggtttgttgttctccggctgctgccgccgccgccgccgctgcgggatccagccagggccgtcgccgccgccaccgggaggcgaccccacaatgcatttcttttcgcacccccaccggcccacactgccctgcggcatgccgctgggggaggaagggcgggcgagcggcccaagacatgattcttggctgagtgcaaggataccgaagaggtaccagggattcccagatattgaccgggggaccagacgagcacaaggaagccccagagaaaaagactctagcctgaaccgggtcgaattaagcacttcgctcggctctgtaccaaaatgacagcgacgatatggcagccatcttggtatagacgggaagtctccgcgctagttcccgccccctcgtctagttggaaacggaggaggcggtctcctcagccctgttagcgggcctcgcccagcctcccctcaaataacctccagacttgcgcatgcgcgccagagtagggcagcttggcggcctccagagtgcagccatattggtaaaggtattgggaccgaggggcgacggaatttcctgttctcgcgggagccagaggcaggactgccacgtccgagcaaaccgggaaaggagaggatcccgaagccggtgagaattccctgccttgccctactgtcctttccaggccttttccactagctagtgggtcatagagactagggcccagagagtccgtaaagtgaaggaagaagcctagagcgatgtcccgggggccctatatccgggagggggttggagataaagaaaccaagtcttgggagcaatgtgggtgggcatagagcggaatgggggagcgtcccatagaagtggacggagggcacgaatgaagtaaagctgaccccgcataggtatagagttgagggtcaagtggagtcactgtctctgtcccctctggtcagcgtgatggccagaggcctgggggccccccactgggtggccgtgggactgctgacgtgggcggccctggggctgctagtggccggacacgggggtcatggcgacctgcacgaggacctgcacgaggacttccatggccacagccacaggcgctcacatgaggatttccaccatggacacagttatgcccatggccatggccacacgcacgagagcatctggcatgggcatacccacggtcacgaacatggacatgcacatgaggatttgcaccatggccatagccatggccaatcacatgagagcctctaccacagaggacatggacatgaccatgagcatagccatggaggctatggggagtctggggctccgggcatcaagcaggacctggacactgtcactctctgggcctatgtgagtccccaagggataggggagagaggggctggttctggattgttgggaatctccacaccacttgacccctgactttcccctcaccaggcactgggggccacagttctgatctctgcagctccattttttgtcctcttccttatccctgtggaatcaaactctccccggcaccgctctctgctccagatcttgctgagttttgcttcgggtgggctcctaggagatgcctttctgcacctcatccctcatgccctgggtaagtgatccttggcaactactgcaaatcttaatgtattttattctttaggcaaaaggcttctttcatctttgtcacccctgactttgcagtattcccccaaatgcacgctacttgggcaggctattccctcatttggccttttctccccctttctctagaacctcattcacaccaccctctggagcagcctggacatggacattcccacagtggtgaggaaggggtggatgaagatgtgttggaatgttgccgaatgggaccatgtttccctcccagaatggggccatgtttccctccctattctcttgcacttggggaagaagagtctggagtccacatctcccttaatgtctcaatgcctctgtttccaggccagggccctattctgtctgtgggactttgggtcctcagtggaattgttgcctttctggtggtggagaaatttgtgagacatgtgaaaggaggacatggacacagtcatggacatggacacactcatggtcatacacaaggaagtcatgggcatggaacacagagtaagtctaggaagaactttccttgaaaaacaccttagctgcaaaaaggaagagacttcctttttggggatatttttggagatctctgttctccactcttaaacaacttcttccctcagagtatccttcaaaggagaaacagagctcagaggaagaagaaaaggaagcaaatgggtctcggaagaggaaaggagggagcacgaggctcaaagatgggccactgagacctcagaattctgaagaagaaaaaacaggttcaggtgagagccagggttattgataaacttgggtaaagtgtatcatgttttacttggagtatgcactgtggataatggcagctgtctggaaaacatgaaggggctggtgtgaagtggtctcttggggggaagaggtaataatggctgataagggctagaactaggggtgttagatgcctctaatcattttgtctttctttccacttttacaagacctacgtgtatcagggtacctgaatctggctgctgacctggcacacaacttcacagatggtctggccattggtgcttcatttagaggaggtcgggggctagggatcctgaccacaatgactgtcctgctacacgaagtgccccatgaagtgggggatttcgccatcctggtccaatctgggtgcagcaaaaagcaggttggtgatgatgtgcatcagacatgattgcctcgaactctacctcctactcacccatccaaaactcagaattgcctctcagtagttccaaacaagttgtactgttaagaacaacaaattctccagaaatgagggcagagaaattctgtttctttgtcctttggctgagtatttcttgaactatgctccacactccatctgaatactttgagggtctttcacactgctctcgaccctgacctactcaatcagaaggtctggaaaggatctccttggtattttaagattttacggaaagtgtctattctagatccttctctttttgccttcctttttagttcccagagacatccaccttgtccatatatacctataccctaccagccatgcctaaccactgatcatatttagatgttgttgagtgtcttctgtttttttctgcccaccaggcgatgcgtctgcaactactgacggcgataggggcactggcaggcacagcctgtgccctcctaactgaaggaggggcagtgggaagtgaagttgcgggtggcacaggttctggttgggttctgccattcactgcaggtggctttatctacgtagcaacggtgtctgtgttgcctgagctgttgagggaggcatcaccattgcagtcacttctggaggtgctggggctgttgggaggagttgtcatgatggtgctgattgcccacctcgagtgagaggtggggtaaaccacccccgccccaatcccaaacctctagcctctctaagccctccaggtcaggggtctgtggagtttgggggccctggccagggacatctgccgaaggaagttgtatcgtagggaagtgttaactttggcatttgggccatcaagattttgcagtcttaaaggagctgcagaagtgagagtgaaaagtcagaacgaccatagtgttagtaatgtgctgaccatcttgggtttgaggctaattgaggccatgaagacggctggaaaagagaggggggtgttgacagcctactcggtgtaccctacgcaacctgttttagaggaccaagccaaccacacaggtttctccgaggtccgcctccccctctcacctgttggtggaagcttcagggaagatcagagccctggaaagaggcagtagcaggaggagtcagggatatacatcaattgaacatcaatcgtgtgtcctgatttgggagtgattgagggaggaggtgggttgctaatctcatggcctgatttttttttttttttctattgatatcactgttagaatcgaggggtaggggtggtgaccggaaataaagtcctcggatcttccgccccacatgcggtctttgtcttttttgggagaatgggggcccctcatctcgcgactgcccaggcccccaagtggtggtgtctggccacgcccccgcggtgggaggtcggcctgcgctggtggccgcagatggccccgcgctggtcgcgcctagattggcgcggctgcgccctggccacgccccctggctgggattggctgagtgctgggtgtccgcccgcccgcccgcctgacatggcgtctccgctcaggctccgctccgcgctggccctggtcacaggttgaggggatgctacccccgggcgggttggggtgccggagtgttgtcggggtcatgccctcggcgcctgcagcttctgtgacctctggcccctggtccagattttcctaattttgcgccctgttgacctgtgacccctgcccactcgtccctttctccccctccgcgtgttgtctcccacttcaggcgcgggtagcggcatcggcagggccgtcagtgtacgcctggccaaagagggggccactgtggccgcttgcgacttggaccgggcggcggcttgcgagacggtgtggctgctgggcgggcaggggagcgagaaggtggcgcccggcggggcccacaccgccttccaggctgacgtgtctgaggccggggcggtcaggcgcctgctggaacaagtacaggtgaacgcgacacgacctcgccctctttaacgagctggcatggcctccactgcccgggcttgggttttgggttttggtgtgtaaccgcccccttccacaggcctgcttttctcgcccgccatctgtcgtcgtctcctgtgcaggcctcaccagggatgagtttctgctccgcatgtctgaggatgactgggacagagtcatagctgtcaacctcaaggtggcgacctctgtatctgttacttcttgctccaccagccgggagaagactgtcaccccagctgatcccttctgttttgttactctttcctcaccagggcatctttctagtcactcaggctgcagcccaagccctggtgtccagtggttgccgtgggtccatcatcaacatcagtagcatcgtagggaaggtcaggttgagctgggatgaggtcagtcagctagttgggcatagagaggagaacccgtccttgggactcctgactcatcccaaatctctgacttacctataggtagggaacgtgggacagacaaactatgcagcatccaaggctggagtgattggcctgacccagactgcagctcgggagcttggacggttggtcagacacccctgggggtacagagggatttgctgaggtatgtgggaggtctgggggccaggtcagtgctcagtcctttccagagtcagcagccaatctcctttccacagacacgggatccgctgtaactctgtcctcccagggttcattacaacacccatgacacagaaagtgccacagaaagtgctggacaaggtaggaggctgtgggtagagggcagaggacagaatcattcagatactcagtctctctgggcttcagagagaatctgggcacagggccaggcgaataatagatattcaataagtgtacaaggaatgaagacaaaagaaaaaagagtcacaaacttaaccaccaacaacaaaattccataaaagaaactttcagtcacttaggagtattttcttacaggtgattggaatgattccgatgggacatttgggggatcctgagggtgagcactgaacgaggaggaggccctagggagggggtccaaatgaagaaataccaaagtttgtggtatctgagaggatttcactaggattggtggttggagtgtgtgtgttggtggggaagggttctggtgggaggtgatcactttggatctatgagagtgagtaggattccatctcccccccacccccaccattcccatagatgtcgcagatgcggtcacattcttggcgtctgaagacagtggatacatcacaggcgcctcagtggaagtcactggtatgaggccatcgtggggagggagagggtagagaagtggaacccagatgataagagaaagcagatgaagggagtctggagccactgagggaagagcagaagttcccataggcgagggaccacagtgggtgcccccagcccatttgtctccacctatgcatctgtccaaatgtttctgcccctgccaggaggtcttttcatgtaactgcctcacggaccctggactctgctcactcccccaccactccaaccggcctcctgctgatgaggactctgagttcccaggctacaaaaggcgcagcagtgtatggctctggaatgctgaatatgggaggcaggggtgcttgtgaccctaataaattccaaatcctcttccctgccacctccggttcttcttgtgtctaagccctcagaccctttcccacctccccctcctttgcctttcccaaaggattgttccctttcactgcctggtctcccagggcaacccccgccgccgggtgtgagaggagagagtgtgtgtcactgtgtatgtgtgacattatgggttttttttttagaggggggggtctctgccccacccctttccactagtcatgcagcctcagtcccctccccccaattccctgggtccttatggtccccaagggtggtttgttggtggccccatcccagtgtccagtatggccttgggagggggtcttggaacaggtggccctcccccaccggtctcccttctctcagtaccccctcccctttctctccaccttacaatagctgcagccggcctggggtcgggtgggggggattaggggagggggccaggattaggggaatggaccagccgaagaaaggggctggaggagagcagaagggagggggctgggaggaggaggaggaaggggagggggtccgagctaatcgactctggagcccacataaggactggccacggactgaaggagaggacagggaagtaggggggaactgggggagggggagaggggacccactgctgccttgtcccagaaacaggctaccccctggcagctgcagcccaagtccgggaaccccagcttaggctagaggagacaggacgcccaccgcggcctctttccccttggtatctcatcccctgccctcaatggggatcgctctgccccttcctcttctctctcctccccgaccccttcctttactgcaaagtcccggaggaggcttctgcccgcttcccactccagacattctgccccttgtgcccctacccacccacacgcgcacaccccccccggaggggccccatcttgtgtgtgtgtccctgcttccgcgtggtgtctccattcccccgttcctcccgtgcgcctccctcccccgccccgggccgcggctcttgattgtccaaacgcaattctcgagtctctggctctggccgagagttgagtctggacgtcccgagccgccgcccccaaacctcgaggggagagcgggtcggagggtctagggagagcccaagcggagggtggaccaagtccccagggtggtgaggggaatcccgggcattcaccggacgggaggaccgaagcggcaggggatcctttgcagccgccccacctccgctccccggaatgccgggctgcggtgacggagaagttgtggggaggaggacagctgctccccggagccgctaggggacgaggagtgggggatgtggccccttttcccaccccctcggtcccctcccggggtcctagagatcccaggccccgccctccggagcggaggccccgggtggggacctcgggcggggaacggcggccaaggtgggcagcgcgacggtgcgggcctggggactgagactgcggcccccacgtagctcgggactccggggacgccggctctcccgcgcagcaggcgcgtcccgagggcggggtaccccggcgcccacgtcgcgtcccccccccacccccagccccgagcggcgggtgacgtctccgccggcgggggtggggggtgtagcggagggacaggcggaagtgacgtaggccccagcgcccgggccatggcggcggcggcggcgggagctgctgtctgagcagcggctgcggaccgagcggactggggccgggagcccgggccgggagagaggcgctgcggcagcggggcgcggacggctggagcccggtgaggggcggcgcggcggggcggaggggcggggggagccccggaggggcggggtctgcgcgacggcggcccccctaacaccccttccctctacccccgctccccagcctacctctcctcctcctccgccgcagcggagccccggtgggggtctgtgcccggtcaccatgacgacgccggcgaatgcccagaatgccagcaaaacgtgggaactgagtctgtacgagctccaccggaccccgcaggtgacaaggactctccctccacagctcactccctttcccagacccttccatccacacaccccatctcacggcctcttttccattttttttgccctattctgccgaccctgcccgatgtcacagactcccttggccctacctttgaatcaccttaatctttacgagcacttcacatttatctagtttaatcctcacatcagctagtcccacggatttaccgcaagtatgactgccttcatctgaaaggtagtaaacaaaaattaccttcactgttcctcagctcaatgtcacaagtcagcgcacagaagactctccttccaattttagtaaaaatagagcctctcggccttcccccacctcccagcattctgatacaatagagatggggccctggaatctgcgttttaaacaagtcccctgggggattttaatatagcttgaacctggaccatgctataagaaatcctattgaaaaagtcctccccaaactccaagtctgtgccaccacaagccccagacctctcgccaaacctcagatcctcctgtttcgaagctcctacttttagttaatggacactaatcctttcttttttcattctctcccaagtcaaagctcctctcagaattaccatcttccctagcaggccaacatggggtactcagattctgctatttcactgtacttctcaaaattcccatttcatggaccattttttctaaatcctctaccccccccccaacccaccatcacatttccactcactgatgcctccaggaagccatcatggatggcacagagatcgcggtttcccctcggtcactgcattcagaactcatgtgccccatctgcctggacatgctgaagaataccatgaccaccaaggagtgcctccatcgattctgctctgactgtattgtcacagccctgcggagcgggtaacaggagggatgtgtttgagatggggtgaagggtacagacttggaacctcattgccctggtgactgactgttcagagcctcctctctcctaccccaggaacaaggagtgccccacctgccgcaagaagctggtatccaagcggtctctgcggccagaccccaactttgatgccctgatctctaagatctatcccagccgggaggagtacgaggcccatcaagaccgggtgctcatccgcctcagtcgtctgcacaaccagcaggcactgagctccagcattgaggaggggctgcgcatgcaggccatgcacaggttcgagctgggggagaggctgtagcagggctggtgggacagatgcgtgggtcaaacacctggtgctgtctctgccacctgccagcctctaagccttagcatcctaatagctagccacaccctgattgtcaaagcctggaagtcagggatgtaaattgaagcttcttagttagcaaccagcactactattcttaaggagaaattatctcaccctctaactttctagaagttagaacagtggagtgactttgagcataagctctgggaattaaatgacctccgaggccagcattgttcagtctttaatgtgaatccagattacctgaaggtcttgttaaaaatgcaaattctaattcagtaggtctggagttgaccctgaaattctgcatttctacaaatctatgctactttttctgggaattcatgaggagcggcaaggggctgtgatcgaaccaagttagttctaagcctctaagcctcagtttcctcaaccataaatagaataataatcacctgcttctaggatttgtactatgtgaggcaataagtgcaaaatacttcgcagcgtgcttggcatgtagttagtgtttaataaatgttgggtgtcatccgtaagatgtccctgatctcttgttctctcctaagtttaaagtctaaaccccttatccttggcgctttctaacctcaaccacttctttctacagggcccagcgtgtgaggcggccgatgcccgggtcagatcagaccaccacgatgagtgggggggaaggagagcctggggagggagagggggatggagaggatgtgagctcagactccgcccctgactctgccccaggccctgctcccaagcgaccccgtggcgggggcgcgggcgggagcagtgtagggacggggggaggcggcgctggtggggtgggtgggggcgccggttctgaagactctggcgaccgaggagggaccttgggagggggaaccctaggccccccgagccctcccggggcccccagccccccggagccaggtggagaaattgagctcgtgttccggccccaccccctgctcgtggagaagggagaatactgccagactaggtgagagccctgtcttcccgaccgctgagaaaccagacagcgcctagccttccatcggaagggggcttcacccaaatccagcaacgacccctagctcagaggccctgctggaaagcccctgcttcccttgtccatttaaagatttctgtggcctaaacctgccctctttcccacttcaggtatgtgaagacaaccgggaatgccacagtggaccatctttccaagtacttggccctgcgtattgcccttgagcggaggcagcagcaagaggccggggagccaggagggcctggagggggcgcctctgatgccgggggacctgatgggggtggcggggagggtgggggtaccagaggcggtgacggccctgaggagcctgccttgcccagtctggaaggtgtcagtgaaaagcagtacaccatctacatcgcccctgggggcggagctttcacggtgagagcctctgagagcggtgctataagaggagagaggcggggagggtggcctggggccacacggaaccatagattctgacttctaactggcccaccctcccctctccctctgcatcgcccatctctgtcttttcttctccccccatcactccctgtgccccggctttgccccatctcttgctcctgcttttttctttcttcctcccttgatcattttctgccttattcatatcctttatcaccttctccaactttcttttttcttaccttgcctctctctcccaacccctctgtagacactgaatggctcgctgaccctggaactggtgaatgagaagttctggaaggtgtcccggccactggagctctgctatgcccccaccaaggatccaaagtgaccccacaaagggacagccagaggatggggaccatgggatgtccctttgtcctggcctaccacccccagcttctttgtcccccagggtcccccaacctggccagccagcaagaggacacaaatgaggacaagtggcttttatacaaagtatctatatcagattcttctatattgtacagaacggggcatgcgcccccatctactgccttttctattgcccccccaacctcccagctatctaagatgttggggaaggtgaagaaccctccccttcatgccctcctaccaacaacaacaagtttgcttcttttcctctttgaaacctgcagttctgtgtctctgttcatcagggatgtactagaaggggaaaaacaaaaaaaagtgggggagacaagcctggaaatcatgtggaatcagcctgggaaatggggaggaaatgtcaaaggttattcacggtgtgtaaatcccaattttatgaatcccaagtcagcatatatgtatgaaaatagtggggaacaatccatgaagctggaagagacaggatggagagccgagcggtgtctgaagtcagatctcaaacctgccccctaaaacctgaatcgccctgcctgaaatccggggtttcaatatcaaagggaaaataggagagtggctcaagacagcaaggcatgcttgtagacgccaacgggacctgcagttccgaagcctaattcctcaccgctgcgagaagctggagagacgcggggagcgccgccgaacctccctgctgggcatcctggccgccccacgaaggcgggcagggccggggactacagctcccaggagcgcgcgagaggagagggtgcccgccgcgccgcgccgcgcggttctgctgctgtcccggcggcggccgagagccgaggggtgggggcctccggggaggccgtcgcctcgaggcgcgcggcggggtccgggggacaggggagctcggctgcacgcggggtcccgggcagtgcgggggtcggggaggctgatgctccctctacccccttcagcccctctgcccatcacttcctgtttccgtcgcccttcgtgcccccaccccgatccgcctcaaattcctgcggcttctcagttctctgccccgctggcagaggagtcagcctcggtgcgacccacagacccgagggcgccccaccccacgcttggggtttcctggttttcccctggtccctaggaccttcagaaccgaccgggcatctcccgcccgcgcaggtcccgcagccctggcggcccggagctcacccccgcggccctctggccctgcagacaaggacacgcgcttcacccttgcaggagcccctccctataccctcgcccgggagggacccttgaccccggctccctcctccccaagcccagcgttcccgggacggtggggcgcgggagggaggtgggcgtcgctcccggagtttcggagagaaacagccgcggaggagtcgggaaggataccgaggcggaggatggagagtagggaacgagcccggcttctcctctggctccagggactgctgggagtcaccccctcactttcctcattctctccaggcctgacggacccgcggcctcttctgcctccgttcccgccctcccctgagtcctggaacagcccgcggcccctcgtccctgtcccggccctcgatccctcctcggaccccacacaacagcaccccgccctccgcttctctccacttctcacatttctgccgcttgtcccttctctgcagcccccaggactgcacttcgaagatgcgcctgtttatttccgtgacatcatgtgggagacagcccaaactgttgccctaggtgtctccctcacccacgcaggaaggagaagtaactaccctccttaagcaggtgttctccttccctagtgccgggagaaggaactgttggggtgggggggagcagcagctcagattctcttgcaccctgagcttccctgggttagtttccccaaatcattcatgtctcatgtcagttatgcccgcatatataggcgaggcaaagccagaaatacaaagtacacaaaaagaactggactattttgttgaggacctagatacatgcaggagaataacgttgcaaaggagcaaggtagagaaagagaggtcactggaggcagggtgggattaaatctccaccctgccagcatgaaactcggggtggggggacattataacaacccctcccggggattctgatgtgcaccaaggcagagagaagcagtagagcagatgctccatgacatgttagctctgtccttaaagggtgaacgcaagtgccccacacagaaggggctccacacctgtggagcagggggatcgctgggaacccttggggtggctgggaagggcctcacagaggaggtgggatccagccaggatccaagtgaagggaagaagagagtctggagggggtggggagcctctctctcccttactcttccataatcccacctcttccctcgcccgggcttctcagtccccaaaccatagcagatcatgtgtctggacgtggcagtgagagcactgtgtgagacgacacacgtgagacatctcagaaaaacttaggaccgcctcggctacaaatgtcgccagggagacggctcatcccttcttctgttttctccccacccccaccccatgttgtcacgctccaaaactagcactagcacttcctgccctgctatttgtacttcttctacaaaattgtttgctcactgtcctcttctcatgctgggcaactgattttggccagtcagcaggaagtcccacagaagtgtccctccagatggtgcccctggccccagcctggtgccggggaggatgctattaccattcacccttgtagaaggttctgttggaggagttactcccttgggcaacactcgcagtgacattattgttactattcatgttaaaagataaggtagatctgagttcttgcattaactgcccctaagtatactctttagaatttggaaaatttctccctactgaggcatccaagaggctgattactgactcgtgcaaggactgaaagaactttagaggtaaaaggatcacctgggagacgactagtcagtttcaccttttcaggaagttctactgatgccaccacctaaagggggctgttctgggacctggggattacaaacaggtgtctgattggcccctgccctggagggatgggatgtagaggtgttcgtagtgagcatctcagtactgaatccacctgcactccgatcagttgtatccactatactatctctcaagtctgttccccttctccgtccctccacttccctggtcccgccaccagctgaaacatctggctctcctgaatccccgcggtagtgagagagcctgggaatggccatctctaacgcgtgccgcacacctgagttagaggcctttttgaaatgcaaatctgattgttttaggctctctgcttaaccccagccagcggcttcccattgatcttaggttaaagacccaagtccttaccctggcccctaaggccctgtcaggtgtagctctgctggtctctccagattcttctcccgtcactctcaccctctgtgtgagggtccacttcctgtctgcccagtgcttcctcctgcagagagcattcatgcaggctgggctctcagcctgagagcctctttctcccatttctcttttagctagctcctcttcattcttcagatctcagcgtctctgccacatcctcaggaaaggtatcctgcccttccttcctggatcagattcccctcttctgagctcccacaccaaggggcaccttccctccgaggcacttggcgcgactgcagttctgtatttgttcattatttgatggaggcctcttttccccagaggatgtaagctccctgagggcagggattgtggctgcagatgctcactcttgtcatacaggggggaccctgaactggacactccaaaaatattgagtcgaaatattggtttaatggaggcatgggtgccaggatccggagtagagggccaaatattccaggatctcagagacgatggtttgaggccatgattttccttccctccagcagctgcagcccaggagttccatatgccattttctttcgtctttctttcttctttcttctttctttctttctttctttctttctttctttctttctttctttctttctttctttcttctttctttctctttctttctttctttctttctttctttctttctttcttttatgacatcttattttgttttttaaaaaaaagattttagggacgactcggtggctcagtggttgagcatctgccttgggctcagggtgtgatcctgggatcttgtgatcgagtcacacattgggcttctcatgggaagcctgcttctccctctgcctgtgtctctgcctctctctgtaggtctctcataaataaataaacaaaatcttttaaaaaatctaaacacaccatcacctggaaatactggataaaatatggggaaaggtaagcaagactgagttctcaaaaggaaactaaaatcccaagtgctagacaaagagaaaactgaaagccagagaataagcggatcatggcaatggttgctagaaggggactgggagagaattggttctattaaccaaaaagtgttttaactagccaccaaaggatgagagatgaggtcttggttctttttttttttaagattttatttattcattcatgagagagagagagagagagagaggcagagacacaggcagaggagaagcaggctccatgcagggagcctgatgtggactcgattccgggtctccaggatcacaccgaaggtggtgctaaactgctgagccacccaggctgcccgaggtcttggttctgacgaggtgtagaaatcagatgacaagtgatcaaagttgtctcaagaactagaaaacctgagcagatctataaattctaacaaattgaatgagaggttaaaacacacacatgcccccatctagatggttttatggatgtattatcctgccaactcttttttttttaagatttttatgtatttattcatgagagacacagtcagagggagaagcaggcttcctgcagggagccggatgtgggactcgatcccaagaccccaagatcaccactgagccacccaggcatctctatttcttttcttttttttttctttttttttttttttaaataagctctatacctaatgtgaggcttgaactcacgacctcaagatcaagtcacatattccacagactgagccagccaggggtccctatcttgccaactcttaagaaccatttgtttatctacttatacaaactgtcacagacaatggaaaaaagggacaatagcacttataagactaaaatcctaaataagatattagcaaactgaatgtggtggagtttgtgcaagtctgtgtgtgtgtgagagagagtgtgtgtgtgtatgcttgaccaagcagactttactgcaggaatgcaaggatggtgtactttaaaaatctattaatgatatttatattttttcatactaaagggaaaatatgattgtctcagtaggtgcagagaacatactgggtaatgtttaacacgaattcatttttcttaaatctacctaagattcgaaaataacttccaaagtcaagtatactagtttttactatttctttttttaatttaaattcaattaattaacatatagtgtattattagtttcagaggtagtgttcagtgattcatcagttgtatatcaaaacacttaattctttttaaaaagttttattaatttaagtaatctttacatagacccaacatggggcttgaactcatgactctgaggtcaatagtcacttgcttttctgactgagccagccagatgcctccctagtttttactgtttctattcaacttgtgctagcgggtgtgaaatggagcaataagaaaaagaagaatcaggaggatccccgggtggttcagcggtttagcgcctgccttcggcccaggacgtgatcctggagtcctgggatcgagtgtctggatcaagtccctggatcgagtcccgcctggttctccctcactctgcctgtgtctctccctgtgtctctgcttctctctctctctctcatgaataaataaaacctttaaaaaaaaagaaaaagaagaatcaaagtcgtcattatacatagataattaattaatgacaaaatttacgagaagccacaaacaattagaactaatatatccctttccagggacaagataatatgcaaacatcaatttgtccataccacaccaataaacaaatagaagattctgtcttaagaaaatgccgtttataatagcaacaaggactatagaatactgagaagtaaatatgacaaaatatgtgcatgatctttatggagaaaattataaaaccttattggagaacattttgaaaagaagacaaaaaagaatggagggatattctatgctcaagaagaggaaaattcaatataaagctggtaatttaaaaaaaaaaataaagctggtaatttgtctcaaatctataaatgtcagttcaattctaattgaaaccacaacaatatatttcatggcacttgacaaactgttcttaaaattcttataaagaagtaaatggccaagaaaagccaacatgagtttgaagcagaagaatactagaggggctactcatgccgtatatcatatatcacaactttgctatagaaagccagagtgatcaaagcatgtagtcctggcacatgggcaagtacataaactactgttacagagtagaacttcttgactcagaccttcaaagatatgagaacttggtatatgacaaaagtgacataaatcagtggaaaaagatggactgtctgttagattatcttgggtcaggatccctgggtggcgcagcggttttggcgcctgcctttggcccacggcgcgatcgtggagacccgggatcaaatcccacgtcaggctcccggtgcatggagcctgcttctccctctgcctgtgtctctgcctctctctctctctgtgtgtgtgtgtgtgactatcataaataaataaaaattttaaaaaagattatcttgggttaattgactatgcaaatagaaaaaaaaaaaaacgacaacaacagatccctacattacaacatacaccaaaattcagatagcttaaatatgtgaaaaacaaaattttaaactgcttgaagaaactctaagacaatatattgatggtatcagagtagggaaggatttcttaagatacaaagaacagaagaaataaaaggaaatatagacacatatgactctatctttattttttttaacttttacaagataagagacatcacaacaaaataaaaatacaagcaagccacagacttggagaatatttacaacctaaaagattaatgaagatttggtatccaagatgtataaagaactcttgcagctcactaggaaaaggacaaggcagtagaaaatgagcaaaagctacataccggcaagtcaccaaaaaaggaaacccaaatgatcaataaatacatgaaaagatgcttaacttcattagtaatgaacaaatgagaatcaaaaccatgagacagtattttacacatactaattcagcaaaattaaaatctctctgataggggcgcctggctgactcagtccatggagcttgcaactcttgatcacagggttatgagttcgagccccaggatgagtgtagagattacttaaaaataatatctctgaaaaaacaaaataactccgaaaacgccaagaattgaccaaaatgtgggacaattagaaactcccacattttgggttgaaatgtagacagctacgagacatttgaagagaaatgtggctataaatatagttgacccttgaacaacacagcggttagggttgctgacccaccacacagcggaagacccacatacaacttctgattccccaaaatttaacctctactaataatagcctactgttgactagaaaccttaccaataacataaacagttgattaatgcatattttgtacaatctttcttacagtaaagtaagccagaaaaaagaaaatgttattaagaaaatcataatgaagagaagatgtatttacagtatataatgtaaaaaaatctgcatgtaactggacccacacagttaaaatccacgttgttcaagagtcaacatacttaacgctaaaaatacacatatcctaatacccagcaaccttgctttgatatgtgttccccagaaaagtatttctacacgtgcacaaaaaggcaagaatcagaataggcacagcaggatgatttcactgtcaagaaaagtgagcggaggtatccctgggtggcgcagtggtttggcgcctgcctttgtccccgggcgcgatcctggagacccgggatcgaatcccacgtcgggctcccggtgcatggagcctgcttctccctctgcctgtgtctctccctctctctttctctctctctctctctctctctctctctgtgactatcataaataaataaatatttaaaaaaaagagaaaagtgagtggagggcagtcccggtggtacagcggtttggcgctgcctgcagcccagggcgtcatcctggagaccctggattgagtcccacgtcgggctctctacgtggagcctgcttctccctctgcctgtgtctctgcctctgtgtgtgtgcgtttctctctgatgaatacatgaataaaatattaaaaaacaacaaacaaaaaaaaaaaaccaagactctgatgcctgatgctacgtaggtggagagagctggcatccctacctattcttatctcctcttattccacatgaggtctcactcctatttatgcctggtaatcttaggcaagttgcgtcattgctacatgcctcagtttcctcatctataagatgcacatgttaaaagtgcctgtctcctagctttgctgtgagatttaagtaggttaatagagcttggaacagttcctagcttagagtaactacactagaaggtggttgttgctgttgatgatgatattagtgttcttggggatcaccttcagctgcatataaattcttttttaaaaaaagatttatttatttatttgagagtgtactcatgcaagcagtgagggggggtagagttggggagcagcgggagaaggagagagaggcagagaagcagaccctttgctgagtgcagagcccgatgtgaggctccatcccaggatcccaacatcatgacttgagctgagaccaagagttggaggattcactgactgcccatgtgtaaattattttttaatctcaggttttatttatttttaaatattttatttatttatagagacacagagtgagaggcagagacacgagcagagacatgggcagagggagaagcaggctccaagcctgacatgggactcgatccagggtctccaggatgatgccctgggctgccggcggcgctaaaccgctgcgccacctgggctgccctaatctcaggttttaaaatctcttaagaaccttatattgcaatgaaagtgcccgctatctgagatgccccagactctgccttcaaggagctacattaaggcctgaaaactcccatctctgtgaaagccaggcaggtaatgtgccaagtgcaaggttgtccagagaggcaacagctcgtggttcggtgttgccttgtaggaattcagagctagcattgccacatttaaaactttttttttttttgcaatactataagtcccaatttttctgtaaaatttctccattttgaagtgttgcagttaattcaaaagaatcataaaagcacattgtgaaccagatgaaatatttgagtgggttgccagtttctgggctctgagacggaggctaccacagagatagatgtaggagcaggtcttaaaaatacagtgtaattagggagatccctggatggctcagtggtttagcgcctgcctttgacccagggcatgatcctggggtcccgggatggagtcccgcatcaggctcctgacgtggagcctgcttctccctcctcctgtgtctctgcctctctctctctctctatcgtaaataaataaaaaataaatctttaaaaaatacagtgtaattaaagctacataaaggcaagtgacgagtgcactcagagcatgggggattgaagatggcagcagattctttgtcactctttccattaagatgtacagtctatcttcccttctcttgagtccaggctggccctgtgacctgttttgacctacagaatgtggcaggagtgaatgtgtaacttctgagattgggtcttatgaggtctgcagcttccacttttgccacctggaacattctccttggaaccaacccagtcaccatgctgagaggagcctgagcagccaccgagagacccatatgaattagacctaaggcccccagatgccagcagtggctgagctgcagctggcagccagtatcaactacttgccaagtgatgaggctgctttggaacatgcaaccaccccagggccctggccaacacttagtgaagcagaattgcccaggcaacctgcagaattgtgagaaacaatacacttctgttaaaacactaatatttagggtggcttgcagaacagggatagataaccaaaacaaggcagcattagaaaaaaggtgtcactttacctagaagagtcagagatgggttcatagcacttgagttttgagctaatccttgaaaaagacatacattggccctttgtgcggagggggagtggatcaaaagtagtgaactttccagaaggaggaaaaagcatgcctacagcatggacaacgaaaagcatgacatactctgtgattcccaattaagtcagttttgctgattggaacataaagtgcaaggactggggtgggggaggcgggcaggcagggaacaatcacaaacatttcttgagcacttactacctgccaggctcagtgacacacacttcacagaatcataaatcatgagtcctgggatgcctgggtggctcagcggttgagcgcctgcctttggcttagggtgtgattccaggatctgggatcgagtcccacattgggctccttgtggggagcctgcttcttgctctgcctgtgtctctgactctctctctctctctctctctctgtcgttcatgaataaataaataaaatctttttaaaaataaataaatcattaatcctcacaacatccctatctccattttacacatgaggttgcggtccagactaacttatcaaagatcacagagcctagaaatggcagagcgaggtttaaagccgctcgtaaaaagtgtgctcttcccaccatacttcatatagtaagtcagatcctgaaggtcctggtgtgccaggtgaacaagtggggattttacctgaaggggagacacagccattaaggaactgtgagtaagtgagaggctctggctttcactttagaagcatctctctagggcagcccaggtggctcagtgatttagtgccaccttcagcccagggcatgatcctggagactagggatcgagtcacatgtcacacgtcaggctccctgcatagagcctgcttctccctctgcctgtgtctctgcctctctctctctctgtttctcatgaataaataaataaaatctttttaaaaatgatttagaagcatctctctagcagctgggaagagcaagggctaaagagggggtggcaaactagaagcagaggaccaagtaaagagacatcttcaaaggtctgggtggggagtgctgcattccctcctcatggggactagcagaggacacctgtggctgaccaagtggctaagttgggggctaggttcagggggaaaagtaggatgaagattgtctccgaagctcatagaacactgaaaaccatgccacagtccaacagtgaaaactgagtcaagccctagaatccagaagtccagagatgagatttaggttggagctctagagctgagagttagaagctggaaagaagcaagactgggggagtaggtgaagaatgaccaggagaggggcacctgggtggctcagtcagttaagcttctgcctttggctcagatcatgatcctgggatcctggggtcctgggatcaagcctcacattgggttctctgctcagcggagagcctgcttcttcctctccctctgcctgccgctccccctgcttgtgctctctcatgctctctctgtcaaataaataaaggaaatctttttaaaaaaatgaccagcaggggtcctaagcagaggccccaaagcccaaggagagcttgtgattcatctgtgaagtgggtgggcacatggtgctaggggcttggggaaggccagaggttggtaggcaggcagtggcagcagggttggtaatgtaatgatatgctgattagctagacagtaaaatcactaggacttggttatagaatgggagtgggatgaggtgagtcaagaaagagtgtgacttgggaatccttccaggtttctggcatgggcaactaggtggttgatgattctgtcaactgaaaccaggattaaggaagaaggagcaggtgtgggagaaggcacaaactgcaaattagggaatgtctgctcaataggttgaaactgaaacattaatttttaagcaactggggacagtcaaatggaaagattcatgagaatctgattcatgagaatcaggtatctgagagtaaaggtcaaaggagagatctgggttaaaaatacacatttcagagtcaaccagcatagcaatgggcatgagagtgcctagggaaaatgtgcagatgaggagagaagagagcctggaccaagagatagaaagtagcttgagaaaggctgggaagacaggcagaaggacaaatgagaggagagaacacaagagagtgattttacaaaaaccagcagagaaaagaattttatagggtagtcaacagggtcaactgctccaagaaagaaaaacaaaacaaaggtgaaaaaaatgtccattagatttgcaaagagaagatctactgtgtgaaagcaggttcagtggaagggaaagaagtagagtggatgacagtgaattgaggaggttgtattagttacccacgcagcataacaaagtaacaaacagtagctggttacaacttaatagtttacaacagcaataaccatacattatcctgtggattctacaggtaggaatttgggcagggcatagctagggcctcctgtgtcttccctacaatgtcctgggactgcactgaaagtgactggacggctgggagctaaattgtctggaggcttttgcttgcatgtctgccagccaatgctcgtagttggttgaaaccttagttgaggttgtaggctcccacccctgatggctgggttcctggggagcaagcctcctgaggggaagagagagaagttctgacatttgagggggtacagataaagaatatgaagttgcaaggacttaatcttctggttcagcttgtggatttgagaaaaatgagcaagaaaatgattttatcaaatctacagcttgaacaaatcagataaaattacacaacttcatattctttattgatttagttacagatcacaacaatgaagatacacatggtcttcatttgtactcttttctcactttttaaatatctcagtaaattgcttccttggagatgctccatttttctttgagttccacattcatagtttctacttctatcttttttaaaaagattttatttgcttattcatgagagacagagagagagagaggcagagacataagcagaggaagaaagcaggctccatgcggggagcctgatgtgggactccatctcaggactccaggatcacaccctgagctaaaggcagacactcaaccgctgagccacccaggcatccctctacttctatcatgatttgaaggtgtactcattctcaatcatctatgatttaaatatatatatgcatataattatagccaacgtttacaaaatttaaatgtatttttatcaaaatatgtaaatgtaaaaaacttaaaatcattttagatgttatattttcttctaaaatactcaaaattatgaattgaaaaaggcaaaataaaaattataactaatgactattaatattctaaatcaaattaatttaaataaactcttttctgcttactttaaaaatcctatcaaatagctttatagaaatcaaactatttgcaatctagtattcaatgttcattcgcttaccaaacagaaaatcaatatgatactgcacaaaagttatgcctagacatacatgtatactagtttaacagtaataaaaatcatttaatattgcaaaatgttcctcagttgtcatttgcaactgtcatttgtgaatgcagcataatataaatcaatacctctggaacacaaagagaagcaagaaaaatggatactcaacactattgggaaatgatactttatcatgccatttgaaagctaatatttgacaaattaattaagttgcattttctcttacctaagtgtttctgccacttaaatcctgcttacacagcaacccagtgtgcacctctgaatctggcagaggcatagcctaaattttcacaggactcagttgtggtcatcttttgtttccaggatacagggcaaaagattgcagaagcatttccctggggcccagatggtgttaattattgagagcagatgttcagggtttcaggttgtgctgtgccagcactgagggccagattccaagtgcctgggtgtcatttaataatttttgtgtgtgataaggacccctaaagtatgtgggccagggcaaggcccttgtggtccagatatgatgatgacactgtgggggaagatcatgatttagtttcaaatatgctatgtttgtggtacctttgagacatccaagtagggttcccaatgtaagcagtcagatatacaagactggagatcagagaaaaaatacaaattttagagtgatcagctgatagcagttgaagccatgggtcaggtgtgatgagtcccctggagggaggatatagcatgagaagagggatttgggactcactgcccttgatgaattctactatggctagatagtgcaggatgagcccacaaagaagcaaggagaagccagagggaaaggaagaaaatcagaaaagtgctcagtcctagaaactaaatgaagataatgtttcaagaaagaattggtcaacacagttgactactgggatgaattcaagcaggggaaaacgggaaaaatggatttaatggcagaaatcattgcaaaagcagtcaagtggcatgagagaggtggacactcacctgcaggggttgaggaatgagtggaagtgagggaatggagaagtttttcccaattttttatcatgaaaagtttcaaacatagataaaaggtgaaagtatactacaattatcatttgtgcgtccactactttacttagatttaacagttctttttttttgatttaacagttcttatttatacatacatacaaatatttatgtgtttatatactttttaaaaagattttatttgtttgtttatttatctatttgagagacagagcgtgcacacaagtcaggagaggagtagagggggagggagagagactcaagcagactccgtgctgagtgcagaacccaatgtgaggctcaatcccaaaaccccaaggtcatgacctgagctgaaaccaagagttggacacttaaccaactgagctacccagacacaccagtacttatgtatattcttgaaccttgtgaaaacttaggaaatcatgagccttcacactttaatacttcagcatatacatccttaaactggagactttctcctatggtaaccacaatgccatcgttacaataggaaaatcaccattggtccctaatatcatctcatatgcaaaatatattcaaattcaccccaattcacctgcaaatgtcttttgtccccccccacccccaaccaggatgcaatcaaggcacacacacactttgtgtgagtcaggctggataaggtgattaaaaggtgctgggaatagtggaaggagagggggaggagagagaggttgaagataaaggaaggggaaagggatccagaacatggtagagagactggccttgggtgggagaaaggcagctcctctacatcagtggttctcaaagcgggggccccacaccagcagccataagcatcacctgggaactagttacaaatgaaaattctagcccccctcgcccaaactaatgaaacagaaatacatggttagcatgccctcgaggcaattgtgacacacagaaattgaacttatgctctcacgtgaggaacaaggggatagtataaatttggtaatggatgtttaagggagttcacctctgagggcttcaatttcccccatgacataagtgagattatcaagtgagagagatgagacagaggagagcttcacaggtcccaggatccgggagtttaaagtagccactgaccagtgcaatgtggttggatcactaaggaatgctggggctggtggccacgaataaggcatggtaactatttcccagttgtgcatcttccttcaatgtttctgggccatcagagtaaaatcctgaagaaaatagatccctggactcatctaggggtggggctttgccaggtaggagcaaaaggtgaaaatataagaggggcaaaggagttcgggacattgtcaagacagttgctgaaatgaaaggccatgcagggacgcctgggtgattcaggtggttgaatgtctgccttctgctcaggatgtgatcctagagtcccgggatcgagtcccacatcaggctccctgtatggagcctgcttctcctccctctgcctatgtcactgcctctctgtgtgtctctcatgaataaataaataaaatctttaaaaacaaaaagaaaagaaaagaaaggccatgtagctgaaagtgaataggacggactgatgggttggaagaagggaaatatcattgacctgaaggtaccgggaggctgagaaacggtggtgaggggctagacagggtgatggctgcaaggtcagaacatggaggccacatcatgcaggttgcttgaacaagggattttcaaagaggggctccttcagatgtccggggtgtgacaaagggagtggtggctggcttagagtgcagaaggtcctgggatgatgtcattgagttgctaagaggccaggtggggaatgggtcctccgtgtgggcaatgagatgggaagacacaatccactgggtgccagtgtccccttgagagaggtaaagcgaggtaaggtggtctggcaggtggcagatggtaagcagagaggagagggcaatttagttgaatgcccgagccacagaagcagagggtaattttaaattcaaaactggagcctggaggaggtatagtttggaggcagccatctagagcaaggaaagtaccctcacctataagaaaataaacagctcttatttcagaagacagcagaggaggtagtgcccccaggggagagttatgtttcatccaaagccgggaactgaagggagccctctaaggagaagctaagggaatgagggggtctgcagtttataagagcccatgagggtagctcagggaggggcaagtggagagctgggtcaggaccagagtacagggtgtcatggagacaaagacactgtagtgtagagtaggtgggcctctctataaaatggagatgacaagagtactgacctcagtgggctgctgtggggattaaatgacttgctgtgctaagtctctgggtagttgcctcacatacacttggctgtagctcccaaactgctggcacagcagcctgtttccccacttggaccctgcccctgtgctaggtggaaagcacaagcggcaagcacttggattggaaggacaagttgcatgagcagttgggaatgcaagaattacatggagatatcaagaagatcctaatgaaaagatggattctttcaggtagcagctggctgatacctcctataagtgggatctggatgagaaggcttcgttccctgagagcacaggaggttatattgctacacataaggccacttgtggcttctccaataatgatgatcatctctgtagctgtgtcctgggtttctcccaccacagcccacctcccaggaacagtgtcaacctcctttgactctgatctgatcctgaacttaaagttgactctgatcctaattccactttagagacaataggatattgcagttccatagacacatgactccttcccttccccaaacccagtgtaaggtacacccaaagtgtgttaaaatacacaaaacagaattcagcaaagttaaatgaaaaaaaaatccatgttcatagtgtgtgactttggaacaccattctcaataactgataggaaaaaaacacaaggaaaaatcagtaactgtatagaacatctgaagaacacaattaacaacttgacctattcgacaaatatacaacacttcccccaacagcaaaaaaaatccacattcttttgtatattgaattttacttactaaaaataaccccatgctatgtcacagaacaagcttcaaaaaaagtgtcaaaggattgaaaccattcagtatatgttttctggaagatagaaatcaagaataaaatttttaaaatactgaactgctcagatatcaagccacatactcctacataatccttgcattatggaagccttcacaatagaaattaggaaatctattgaactgaataacaatagaaagagataaaagatataaaaacttgtgagatacacctaaacagtgtttagagggaaaggttatagcattaagtcctgttagaaaaggagacggggctgacaaccaatgattcgaaattcatcttaactaaaaaaaagactagcatatcaaactcaaacacagcaaattgaagaaataataaagagatggcattaataaaatagaaaaagcaatgtccgatgaagaaattcaacaaagtgggggagaaaagcagtgccttgtaaagaacaagccctggatatgtggcagtcacattattatcactcaggacaggtggacacgaggctcaaagacagcttggatcctagccctggagtagactggtccaaaagcctacagatcccaccctgagtggagtgagatgagatttgggatggggaggttgaaggagggaaagagaagtctcaaaagggtgtgtgtgtgtgtgtgtgtgtgtgtgtgtaaaatagacactgttaattgttaaacccctgtgtgtgcagtgggataccaactgaggtgaagtggaagagggcaggaccacagagagaagtgttttgtcactaacactgttatagaatcgttggtgcatgatgagaacaataaaaagtgaatttcagtattattttaacattttctttttttttaatttttttaaatgtttatttatttatgatagtcacagagagagaaagagagagaggcagagacacaggcagagggagaagcaggctccatgcaccagaagctcgatgtgggattcgatcccgggtctccaggatcgcgccctgggccaaaggcaggcgccaaaacgctgcaccacccagggatccctattttaacattttctacagacaacacatcctcttgctcctgcactggagcaacctctccctctgcttgctgtcagtaagctgcagcccaggtgacccatgtgaataaacagtccatctcctctaccagattgggagtccttataggaagccatgtcaagtgaggattattttgcacgtgatggcatagttccgagcagcaaaaataaaaaataaatttaaaaatgtgtgatatataataacattcagtgtaggtctaaccactatcaaaactataaagcaatgatgagcacacatgacattttaagatttctgcaactggaaggtgatgtgatataaaagcatctgatttctattgatgacagtcacagatactgctaattctgctgtggtttgttgtctacacttttcattggaggaaatgctacatttccattagaggttcgtgaaaataatacgtaattttttctaattctcaatcacagagcctttaggatcttggttaagagtcctgcatgagggacacctgagtggctcagtggctaactgtctgccttcggctcagggcgtgatcccggggtcctgggatggaggattctgcatccggctccccgcagggagcctgcttctccctctgcctatgtctctgcctctctctgtgtctctcatgaataaattaaatatttttttaaatgcttctaaaaacagcttaaagggggtgtggagtgggtggttaggctgaaggaaaactccctccgtcctttcagagagatgggagccctgggggaaccttcgcagccacctgccgcgagaccaagcagcccggaacaactccatctcctggtcgatgctgccccctggaggtctgtgtgggtaccgcggctccctttcaccccattgcgacttcgcgggtccttgagagtccgttggagatctcctgggtgcccggggagatggatgtccccaaacactgtgagctacaataaaatgggaatgccttccggctccctaatcaagagcttcctcagactccggcaccgcccctcagccctgcaaaatgacgcgcttaccggttgtttgaatatttatttgcattcgggaatggacaggagtggcctgtaccgagtaaagtcaaagtgcctgccagcgcagcccttctcccacgggagcgtgagaggctttccacgaaggcgtctatcatggaggtagtctccctcgtgggggatccggagacctttgctctgggaaactgctctttgtcaaagccgcccgtgccgcctccgtcccgagtcccaaaccctgagcgaaccttctcctgaggctggagtcgggtcatataggagaactggctcccccaaggttgaaagtagaagcaggggagggtgtaggtgggcgggagaggcaggcaggaggacagaaggtcccggggcgagctgcggccctcgaagcccagcgcacctccgcctagagcgcggcgggcctcggggaacggctggggccgagtcaggcgcggtaacgctggaagggcgcccggagccgagggagcggcggcgccgggaggggtcggctgaggacactgccccggcccgcccctgaggcgtctgggccaatcaggagccgcccatgccccccgccgcccgacacccggcggcctcgggcgccaaggctccccaaactgaggacgccgctcggcggtcggcctcccagtcgcagcgcggttcccgagggagggggaaggcgccctcccgccacgcccccgcctcgcggcagccaatcgcaagagcccgcccgccgggaccgccctggccccgccccaccgccgccgccggcctagaggcaccctctcctccacccagccccaggcccggctcgcgtccagagagcccgcgccgggggtggaattctttttccttcagtagctcgctgggacttgggaagcaatgctcgggccatgtgggagaaggaaacagaggaaacatccccaaattaccattttctcccgactgcctgcgcctttcccgttaggactaaaaaggcgcccccgtgtctcttctgtctagagtctgagttcaaacgaggtgtaggggtgcagtaggaagcaaacacagaaatagatgaaacaggcacgctgcaaacctgtcccacccccgccctggtgtgagtgctacagccctccagccccccatgcaagttaagcccctgttagggaatcaaggtagcctgtggaacagtgcctgaggctgtacaaccgtgttcccagcccttgagggatctgcccctttttttttttttttgaggtatttgccatttttaaccaggggccaccttcctccaccaggctggttactcacgacacagtcccctccctaaaaccaacgctgctacttctttggcctgaagcagctagagattagaagttactatctgtaccccttcttctggacacccaccagaagggagataagcccaggagagagccagaacaaaaaagtgatcctggagcagaggtgggggccacttgaaggccccaggaagaaggaggaaggaaatgagagaagagtattatgtcatattaaatatttattgttttctgcagactgaccttggagtaactctcaagccaggagaggtcttgttagtgttcaagttgctgagatcttaggtcaaaaagctacagaaaagaaatcactgagtgaaaggggaaaaaaaaaaatcaatgacttgccttgccaccaattccaagagttgaggcgttgcacctcaggccatggtgacaagagttgagactgaaacagtaaagattttactgggggaagagaacttgggtgtgggggaaggggtggtgaaatcagggaaatgataaaggcttttggaagcccggggggagtggtcctgggaacccaaaaacaaggtgatccagcttattctgatgaggcagggtgaggcatgtcaaggacctgggaggcaggtggacaactgttaaggaaaccccagatgaagaagagtctgggatggggtacggaagtccatggagaaggcgggtggatcccagggtctggcgcatcaaaagttgggcttgtgcttcttgagctccaccataaggtgatgaatgttgataagctctgcccgggcagggagagctcggagctggggctgagagagtacccggtggaagcgatgatagagctggatcagctgggtcaaagctccctggtcagagaaagtcatgaaagatcaggctgtggagtggtgctagagatggtatcaggaatcaggctagggctcatccagaactttgggcatgctggtagttgaaggtcatgggtcacctggatgatgctgagcccagagaaaacaactaatgataggggttggagggaagggaggcctggaagctgcaagttacctggatgatactggttccatttctgaagttggtgaaactccgcattacatcctgactcagagactccactgatgatttccaggaactaccaaagccacggatcagttgagtaacccgggctgatggcaggagcaaagagagagggtctcagaaaaggacttggctaggtgatctttaacccttacgtcctccccaaggcacagccctcttccacatccaatctcattttcctgctctaccccctcctcatggaatctgcctcctctcatttttcttttccactccccttaccattaactccaccacctgaccacatcatctgcataccttcttcccctcgaagtcgctcagcctgtccacgttcaattaaagcctcggcttccttcacaaatgccaccagacccccaaaagggggagacaacaactcttcaatgaattcctgtagaaataagcacacacacatacacatagtcaaatgtcctggtatcaagacattttcccacttctggcatcatgaatgactagatcctcagaatattgccagagcaaattacatactttaagacaccaatggtcccaaaacactaaacttgaactggggagcaaagcacaagtaattgggatcagagccagaaccagaaaggtaggaagctgggagaggcaaggctgccagaagacaaatggcgatggcaactctgctatctggaatctgagcctgatgccagactcaagtggagaagcggagcctgggcctcttgtgagagcctcaaaggggtgctgacataaatcgaggtggattaggtctttcagtaatttgcctaccgtaaacgcagaggcaaatcctcttgacagaaaaatatcctcaatctcattttaggcccatatgactccccctgattaagacagagcaatgaactcaaagatcgtcagacacatatgaaaggaaactaccatgagaaacagtataaacaataagcaatggacttagactggtataccaaagactgccaacatcagaactgtcagatacgggcagccctggtggcactgcggtttggcgccgcctgcagtctggggtgtgatcctggagacctgggatcgagtcccacatcgggctcccggcatggagcctgcttctccctctccctctgcctgtgtctctgcctctctctctgtgtctatgaataaataaataaaatctttaaaaaaaaactgtcatatacacagcagttgtgagttctgtatgaaacattcaaagaattaaaaatatagacacaaagatgacgactcaacaagatgaggaatggacagacttgaaacaaaatgaaactttcaagagatgacttaaaaattaaaagtctttaattttaaaaagtcaacaggttatacagcagattagaaatacctgaagaatgatacagcaaattgaattttataattgaagaaatgacttaaaatgtagcacagatgagatgggaaattttgagacattgagggttatggaaatctagttcatggatgtaggcagtgatcactgatggctattgacagaaaaggaaccaagaaaccattatgtgcccccaatggaagtacataccactagctctcaactatccttggggcggggggggcgggggggtgggcaactaactgcaaactgatcaagacttttcatctaactacacatttatggaaaaaaagaaaaaagtctagccataccatggaatgcaatctgcaaaatctagactgtattctgttattctaacatgacagatgactcagttacttggtttcttccacagataaattgcagaggaggtaagcaaagatggaagggcactctatagatcacaaagagacatatgtatgtaccatacatggatgttaatttgaactataaaaaccatttatggggatccctgggtggcgcagcggtttggcgcctgcctttggcccagggcgcgatcctggagacccgggatcgaatcccacatcaggctcccggtgcatggagcctgcttctccctctgcctatgtctctgcctctctctctttctctctctgtgactatcataaataaataaaaattaaaaaaaaaaaaaagtcaaaaaccatttatgactgagaaaatctgaacactagctcttttaagatcatttttttaaagtgtgataatatattgtgggttttctttttttaaagattttatttattcatgagagacacacagaaagagagaggcggagacacaggcagagggagaagcaggttccatgcaaagagcctgacgtgggactcgatcccaggtctccaggatcacaccctgggctgaaggcggcgctaaactgctgagccactggggctacctatattgtgtttttaaaaacacatcctgacacagatgaaatgatgatgtataagatttaatccaaaataacgggggccggggggaatccctgggtggctcagcggtttggcgcctgccttcggtccaggcatgatcctggactccaggatcgagtcctatatggggctccctgcatggagcatgctcctccctgtggggagcctgcttctccctctgcctatgtctctgcctctctctctctttctctctctctctgtgtgtctatcacgaataaataaataaaatctggggatccctgggtggtgcagcagtttggcgcctgcctttggcccagggcgcgatcctggagacccgggatcaaatcccacgtcgggctcccggtgcatggagcctgcttctccctctgcctgtgtctctgcctctctctctctcactgtgtgcctatcataaataaataaaaataaaaataaataaataaataaataaataaataaataaataaataaataaataaaatctttaaaaaaaaaataactggggggcaggcacggaaggatgagcaatgggtgctgatagaaaggaataaaactgtccccaagtacttactgattgaagatctgtgatggtacttgggggtgcgacccctgggagaggaccccaggggatccactatgctattagtatgtgcatttgaaatctcccacaataaaaagttaaaattggggtgcctggctggttgagtcagtagagcatgtgactcttgatcttgggattgtgagttcaagtcccatgttgggtgtagagattgcttaaaaataaaatctttaggggtgcctgggtggctcagccagttaagcgtctgtctttggctcaggtcataatctgaaggtcctaggattgagccccgcactgggctccatagtcagcgtggagcctgcttctccctctccatctgccactcccccggcttgtgctctctcactgtcaaataaattcttttaaaaaaaataaaaataaaaataaataacctttagaaatttttttaaaatggcagggctgaatgaaagcagaaacccaagcttgatagtaagatctggtagggtgaaagtgaaacttttaaaacaatttccatttaaaaataaaatccttggggtacctgagaagttcagtcaggtgtttggctcttgatttcagctcaggtcatgatctcgggttgtgggataaagccctgtgttggggctcagtgcagagcctgcttgggattctctgtccctctccctttgcccctccctgctccccgcctcacccctacttgagcatgctctctctaaaaaaaataaaaatgaaaaaatatttttctactcttcccaccaaaaatccacttacatcactgaagaatgtccagtaattaatatgagatggggaagacattcctaagaacggatctttctataactgagggatcttcatttgtaatgtcattttgaacagagattaaataaccaaattcaacctattccagtcgcccaaatgcaataacccacttttaacaatataacagtggggaggcacagggaatatactgcaaaaggaagttcagctaagagagatgagctgtccttttttttcttttttttgagatgagctgtcctaacacagtagccatgactcacatgtagctatcaatcacttaaaatgtggttagttagggcacctgggtggctccgtggttgagtgtttgcctttggcttgggtcctgatcccggggtccagagatctagtcctgcatcgggctccccacagggaacctgcttctccttctgcctatgtctctgcctctctctgtgtctctcataaataaataaataaataaataaataaataaataaataaataaataaataaaatctttatttttttatttttttaaagattttatttattaattcatgagagacagagagagacagaggcagagacacaggccgagggagaagcaggctccatgcagggagcccgatgtgggactcgatcctgggactccagaatcacgccatggaccgaagtcaggcactagaccgctgagtcacccagggattcccataaataaaatcttaaaaaaaaaaaaaaaatagcattttttttttaagatttctctatttattcacgagagacacacagagagagaggcagagtcattcgcagagggagaagcaggctccccacagggagcctgaagtgggactcgatcctggatcctgggatcacgccctgagccaaaggccgacgctcaattgctaggccacccaggcgtcccccaatagcatttctatatggcagttaaaacaacaagaaaatttctttctaaaatgatactatttaagtaacaagtttatttaaaggacaaattctaaaagaatagatcaaaaagcctaaacaattagaaaaaaaaagtaattcttcctggtaagtcctagtactcctagtaattatccctaaataaatgtggatttattcctagtaggaataactacagtaacaactagcacactagggattgagaagaatattcttgaccagataaaaggcatctacaaaaacactcacagcagtgttactcctaatggggaaatgaggaaagcattccctttaaaatcaggaacaggataggggttctcactattacacttctattcaactgctcaacattgtcagagagatcctagccagaacagtagtagatcaaagacgtaagaaactaaagacaaaggattggaaactatatatttactcctaggagggtgaaatctacataatctacatattacatctaactaggaataactctggccaaagatttgcaatgtttttgtgttgaaaattacaaaaggttgcaagaagatattaaagaatatctttaaaaatgggaagcccaagttcatggatgagaagattcaacatcataaactatcaattcttcaaaattgatccaaactgatcaatgcaattccaatcaaaatccttaaaagttttttcaatgtgaaaacttaacagctaactataaaatttatatgaaaaaatcaagaggccaatatattcaaggtattcctgaaaaagatagaatttgcataattatatagcataatgtttgcatagttataaagcattataattaaaactgcacgacaggtcagacaaattaatcaatagaatagaatagagggaagacacatatatttatagttttgctatgtgacagaagcacactgcagatcaagtagagaaagggattttccataagtgcttctgggcccatcgttatctatattaaaacattaaattaggttctacctcacatcatacacaaaatcaattccaggtaaatttagagcttaaacataaaaagcaagattctacaacattaagaagaaaatgtagtataatgtttttctgatgttaggatgatatgagacttttcttttttcttttttaaagattttattttatttatttatgagagacacacagagagaggcagagacacaggcagagggagaagcaggctccatgcagggagcccaacgcaggacttgatcccgggactccaggatcacgccctgggctgaaggcaggtgctaaaccactgagccacccaggcgtccctgagatttattttttaagatcttatttatttatttgacagacagtgagtgagagagagaagagagtgcatcagcatgggcaaggggcagagagagaagaagcaggctccccactgagcagggagcccagtgtggggctggatccccaggaccctgagatcatgacctgagccaaaggcagacgctttactgactgagtccctcaaaagcccaatacaagatttcttaaatgagacagaaaaatcaagaaaaaatcagtaaagccaatcacattaaaattaagaatttgtccatcatgagacaacataaataaaaataaaaaataaagctctgaaatatatctgcaacctatacaaccaaaaaattggtttcataaatatattttaaaaattgtataaatcaaaaagaaatacacaacccaattttaaaaaggccaaatgctacaacagatattttatggaatagaaaactttgtataactacttaacatttgaaatgatgctcaatttcaatagtaatcagaaaaatgcatataaagacccctaaggagatacctataccagaatggcaaagatagtttggtaataccatgtgttgtagaaaatatagctcaatgagaattcttacacattgccagtaaagaaaaaactagtataccacttaggaaaactatatggcactgtctcataaggttgaatgctggcaaaccctacaagcaacaagccaagtcctacttccaagagaaacttttataaaacttctctccatctacatgcactaaaaaacataactgttcataaaacaactctcacagttgcaaaaaactagaaataatcccaaggtccacttgcaggaaaaaacgttacattcacacaatataaaattatataaagtaaaaaagaaaaagctgtagccatatgtcataatatgataatgttggaaaaattatgcatgaaaaaaatcctgtgattgcttttatgtcactcaagaataaaaataaaaataaaaatataatacaggtggggaggtacctggctggctcagcagatagagcccacaattctggatcgcggggtcatgagtttgagccccatgttgggcatggagactacttaaaaaaagaaaataaataaaaaataaaaacgttagaaataaataagtacaactaagttaattagttgccatacttacagctatatttttgaaagcaagagcatggtaaacacaatacttaggtcaagaaaagacttaaaagtgtgatgggcaaggaaatgggctgaggaagaattcattgtttaatgctggttatcgtcaaggtaggtgaaggcttcaggggtatgtgtatcgttaaaaaaaaacacaaaaggaaaggaaaccagtagttccaattctgggtacatgaagccctttacctgccactccctaaacacacacacacagaagagaaaatagcacatgagactctccctctcttcttccccacccccctacctgtgtccgagcattgagcagctgctggaaactctcaacctctttgctgtcatctgcagcccgctcctaagggaagacaaagggaaatctcaagtgtgggagaagcagcccttgacttcaggatatccccttccttccacatttactgtacttggccaggcaatgcgccagatgccaagaataacttacggaacaagaccaagctctgtcctcacagagcaaacagagcagtgggggaggccaaaccctctgggtagggaggaagagagaaatagtgtctgtaccattagcacgcccagcatcatgtcatagttgttgatcaaaaacacaagttgctccttccttgaggagaactcagctgccactcggaggacaaaattctccacttccacctggaaaagccagaaggaagaggtgacatgagaaggtgagggcacacagcgctcctcacactgcaggccactgaggcagcccagccactgggaagtctctcctgcccaccctcacctgtagctgtcctagcagctgcattgtccgttcattgggaactgtctgattgatgctgacaagagcagacgagaactctgcatatcggcgcgtgatcttgggaaaagaaaagtggtaataaaatcacaccatccccctgacccaaccaaagcaatcttgcaagtccctaggagctggcccatcaacctctgtgactcccacccccaatcactataataaatgatgccaaattcaccctgaattcacatactcctagactgccccacacacagagtgtgccccaatatccagccaggcccacaacacaactgggaacccgaccaacccccatagtgaagctagagccctgccttttgggaacccctttgttacccttgccctctctcacatagtggggccgagtatccagcccccctagccgctgagggtcagtgcttcggacactctggacattcatctccaggatcagctcaaaccgtggccacagcaaggcaagcacttgctcccagtacctgcagacttaatcagaattagagatcagctggcaagaaatgtgaggatcgtgatgagcactaggtgatacatgcaaatattgaatcgctattatcatacacctgaaactaagaggatactgtatgttcactaactggaattaaaataaaaatttaaaaggccaaaaagaaatctgggaggacggaggtagggtttctgtgggggaacccagctgatggctgatggaggttggactagtatgaatggtgaggcagaaagcagtactgtccccaggcagatgaacgggagtaagagtcaggtgtcaggtcagcagcagcccaatggtcagaacaggaccatgtaaagccaagggttcaagagcaatggggcatcaaggaccagaactcagtgacctgtccagggcaggaacatccctcttcgctgcaatgttacggaaccggaggacgatgtggatacagagaaaaacagcaatggcatcgtagcagtccgtgagataggactccaggtgtttctacgattcagggatagaagaattggaaaagagcgttcgttattctgtcattcctagtggctacagacaaatgcatgtactcctctggggatgcagccctgggagggagggtagggagctctcaggaaatgcctcctccttccctgtccactagcccctcaggtggtcctgctgccttgcccatcaggatttaagatcacaagcccatcacagcagaattcagggctgagcaccatttcaggggcccctccgttttcagatgctactgcctggctatgggtcagtagtaggggtacctcagggaccccaagctttgagggtttcatatgctctgtgagtacaaggcttagacattttagaattagggggggcctggtttcagtactaccagagctatgaccccctacagtgctgcagaggactgaggacaaaggggtctaagagcacaggagctggggatcttaccagggtcatgccaagggtgcgacccatgacagcatggaagagatcatgtgcagccgagccggatacaacaaagaattcgcagatgaaaagatattcacggcaagaattgtctaggagggcgtagtgctggctgcggaagagggcctcaaatggatactaggatgggagaggtgaagaagagggacagaagggatggaccccaatgctgactctccatagatattgctggaaaatcagcaagcctgggtaacgagagctcaggtctttcccatctaacccaggtgcaggctgtgaaggagcatcctgaatgggtactgaaaggggtagagggacgaggggctcaagagaagaacccacccccacctgctgttattgcaccacccaactctacaacctaccccaagatgttcccttcagccaatctctctctatatatgtcctgaagtcaacggtctcaaccctcttcacatcacagaacacttgggtgatccaagaaggtcattccccgttctaaggggattgatacaggggactgcagggcgggaagctttgcccagaggtctggcctctcctacccatgcccagcacaccctcatgactgactctcatcccttctcctaccctctgttctccccgctgggcagtgtggggcaccaggatgggggcctccagttcagtgggggagatgacagagccacgggtccccagggtgaagatggtgttcctgctgcggagggaaggctttgagaagaatcgtaaaggatcagagtcagggaaaacaactagatcacaatggtgacagactcagaggctcattacctccagggaccgcaggcagccagacacagcctagatgtccctccttcccagtaccttggccccacttcatctgacacccgggaacgggcttcagagagctcctaccctccctgccatcacatgtagaactatgtgtcaaaaggatgcatgcctttttcgggcggcagggggggagggggatagccattatcacattctcaaaggttttggtcccagagaaaaagacaagaagcagtgcctttgaggcactgtcactatcaaggcctactacgtgggttcctcagttctaggatatctttctttgctgtgtcttccacacccattagatcatccttctcggcaacttcctcatactaagaaaaaaagagaaaagggaaccagtaagcatctcctcccctgttgtgataaaacaatttttccccactgtccagccctgcctgggggtggcccctcttccccaatcctagccatgcctccctccttggcctcacctgcactttcatgagccgccctaggtaagagcgatagtaagacaggtagatcttgctcagcgtttccacatactcatccctgatttcctttgccgttgcccgttcattgcccagcagaaactggtagaagaacctggagaggccagggacaagtcagtctccccaccttccccaagaaagcagacccctcaccaggctgactgatggcccagaggccatgctgagcctttcctttgggcactgacctgtacttgagcagggccgtctgggggatctgatagttggtcattggttttctgaaggaataaatcttctgaaggatgaactctcggatcttcgtcaccgcctggacatggggggaggaaacaaacacagggcatgaagctgcaaccttatgactgttatggaaatggtggggggagggtcacatttcaaatacaggaggatggaggttggagaagacctcatcagtatttctgaaagtgttcaggggaacctagagatgtgaagatgagctctgccagtaaaggcagggtgaaattcttggggatgggctacagtgagcgctgctggggaaacccaggttgaaggtgtcagggaggctggttctagtaatcttgggggtatcatccccacccctcaccttcacccgtagccggtcaagtatgcctctgacatcagcacaagccgctgtgcctctagcctcctgctctcggactgcagccgccttggcatccagttcctgcagctgctccaggaacctaggctctgtcactggtgcctccagaattgccctgggtagcagggacaggtggaaggggttataggagggagacccagacatcagtaggtcccaaactatattccttacatccagcctgtcacctctcccttcacacgctaagtcacatagtcaggatacgtgtacaaagtctcctgttcctggaatctcccccagtcccacgtccataaagccttaaacctcccaactaaacctcccaactaaatgcctgactctggatattcctaatctttgatgcctaaagcatgcatcaaggttgagttgtcaaccacccatcagtttctggaaggtgcttgaagagctgaggccaggagacccatgtggtaggtcatcctagaccatctacctgctatagacattgtaactcttcaaaatggcaacttacatgatcagagcagagggcactatcagaccatcgacaagttccccaagttttccccgaactgcctggcggtttcgaagccgaatattcatggctcctgactgttcctgcagtgtccggatctcagagctaatagagctgaggtcactctgaaaagctcccaacatctgctccatgcgctggggggaggacagaagatgttgttggagcaccaaagggttggcaagggacaaatgggccacctaagtttattggtaaagtcttcagtatcagtcctcgaaggtaggtgatgaggtaagaagtacccaaaaggtcactggcaaataacattagttatggcagtagcaacaaaaaggtctgctaaggtcatcctgaacgtgaatctaactatccccacctgaggatgatgacttaaagaacaacaccagaccatgatctggttcagggttaagagggatcacaggtcatggttactaacctcaagaacagcatcgcaggctgtgatctggttgtggagagacgctatgttctcactctcctggatatctaatccacaaaaagtcaaggggcctcaccataaagctggagattctcagacctgtgggactattcccatttttcccagagatgacagaaactgccatgagaagatgtcagcccctgctgggctgcatgcaccatgctccgcaaaatctctattttaataacatcaccctttttctctactggaggatacaatctcgaatggatttctgctcaatctgctgtagttccagctcaacctgctttgaatagtgacggagatccacaccctaggggaacattaacacaacaggttaagaggaagtggcagtgaagagaccctagaaagaatcaataaaggactagaaggtgagacaccagggtgatgttgtaagagtgagagactgtccttttttttcctctttgaggggagggtaagaggagggataaatcagtacagcagaaagcctcaccgttttaagagcttcctttactaactcatcctccagatttgcctgaatgtgaactggaaatagaaatttatcataagggtccagctcccgcaaacgaacatctgtacaccattccccaccttattacttccagcaccatacctcttggatcacaagcagtttgcatccacctcatgccatcacttaccatccacttcatccagaataaattcatcagaggagatgtccaattctccaagtggcaatggctcctgaagaccagggccacccccctggagagggacaagtcaacaggaaagggcacagtaagagagagagagagaacaaatataacgggataatccacagaccttcaaggtttggggaaggtggggctgggctgggtttttattgggaagccatgggcactgggtcaaaaaattccaaaagtctcacactgtccccaatctgctatttggggctcctaggtagggaatataacaaaaagactcaaaagtcaccacaagagtaaaggaggagttgcagaggacagggctaaacttacagctgagtgtaggatccccagactcctgctatcttaggtgttctatcacaatccctgtggggatcacctgcccttctagaaatgtcagctaacagtgtttacctgcgggccaggtgccatttttcatacattcattcatctaatcataaccaacaatttctacggtgaagtcttatcatttccttcaccttatacgtggggaaagtataacacagagaaactgattaacccgcccaacgacacacagcgtgcaagaggcaaagctggaattagaacccaggcgatctgaccatagtcacgttcttaacctttacactatactgccgctgtattctgccctcagatctggaagttaactgaaattctgccactggcacctgagtcggccattctgactccagggcagactcagacccgactccaaggacggatacggaaaaacacacagggagcatcaccgttaacagccgctcgcccactcttctgcctaaacccagcccaggcccttctgacgcgaggacccccggacaagactccggagagaaagagccccacgtccgcaccagcgggccctcctcctcctccatatccgaggtcccggctctcagcagcagctctcgcgcagccgccgccatggtcgcagcagctgccattctgcgtagcctcacttccggcagctgtccagtcgccgtaggtccgtccctggggtggacctacaaatcctagagggtcttgcagagagcgaaatcgttcccagatatttgaattaagttgttggactccagccttcccctttcagccctaaccacttgacccaactgcaaatgggaactggatatctgaagcacaatcgcaccccggaacctttgctgctctccctcttaaggactttacgaacatgtaaagagaggccgcaccggaagttctggtaaagaagagagattctcatagttgaattagttctggcaccagcggcttccggaagcgctcctgcgtgatcgctccgcctcttccgctgatagctatataagcctagtatgtcacttccgttctctcttccacgggaggcccgcacgccgctgcagaggctgctgccatggtaagagtggatttcgtgcggggatccggcgacatcggaaccgggacacggaaagtctgctgttagggatcagaaaacgccctgttttaggggttagcaactttctgtgtgaatctttggagcgcacccctgggaaggaatgactgaggacttccagttctgtggagtaggccagaggaagagtcactcgaaaccggcgaaaaggcttgggcgtgaatggggacctgaggtctccgcctctcagtgtacttttgggaacgggcagaagacttgccccctcccagaggttgcgttttcccgagcttgaacacttaaggttttgcgagcgggactgaaggggggagggttgttgctcccggtgtgacaacccggacgttcctcttgacattactgtttgatggtggttgacggtgtcctgtttctccccctgtctctgccagtctctagtgatccctgagaagttccagcacattttgcgagtacttaacaccaatatcgatgggcggcggaaaatagcctttgccatcacagcaattaaggtaaggtagggtaaggaacggagcctgtaaatgagacaggatagctgtaagtgaggaagggtccaggagacatgtcccaaccagatcaccttagctgctgggtaaactaaagaacggttaaaagagtgactagtcctctggtctcttacatcatttccaccaaaaggtaagtaatgaaagccagagaagagtcgcacatcaagccaagatactctagatggggagtgggttccctcggcttctagaattcactaaaagtttgttggaccgtcacctgttgtcatcctgtgaagttcgttctaggtttggtttctgcttctgctccccactgcagagcatcgtgacagctacccttcctgtgacctacatgccctagaaattttgtaatcatacatggtgggtagtcgaaatgccaacagactgccaagtgtgaagaaacctatagttaggaagtgggaggagtatcattacatcgtgaacagtatttattccaatgtcagaggtgaatacaatgcatttcccctttctacctcataggaaccatcggtatttggctcatattatgccttaggtcggtgagcataagtttgggtgttttctttcactgacctaatgaactggccttccagttggggtcattccatcattttgttttgtttttgttagtatatgtaattgtggatatggttgaatgtggttttgccagtgtgtggacaccgtgggagcagggatagacagggatagaactgaacaaaacggggtagtcctattttgttcacagttcccagctcctggtgcataataggtgctcatgaaatgttagaaatggatccagggatgctgtagcctggtttcaaagaatttaaaggaaacataagtattaggtaacttgaccaatcaaagctatatgttctagctttggttcataagattgatcagatttctttggttcttttgttttattgcaggatgtacaattttcacttgttcttaaatggtaaataagaagattgcttttttctgtttttttgaaactagtaaggcaatataaaatatactagtacttttaaagattgctatgaggcttaaatgggatagtgaatagacctgcatatcacaggtctatattgtaggttcagttctaggcaataaagtgggtcaaatattttggtttcccagtgcatatgcaagttatatttactctaatcagtatttcagtattgaatgtgtagtaatgcattatgtcttttaaaagcacatgctttaatttaaaaatactttattgctaaaaaatgcatatcattgtgagctttcgaggagccatgatcacaagtcactataacataaaataattaaaaggtttgaaataacgtgagaattaccagtgccatgagcacatagtgagcaaatgctgttggaaaaatggcactgagacttgacacaggatttgccgcaagccttcagtttgtaaacaaaaccagggtatctgcacagcgtccttaaacaaggtgtacctgtattgaagatggttgcagttagtgggatgcttgtgttaaaccctttctctttgtttctgaaaattaattggatttgtatttactttcattaaatatgtcatagcctttgtaatccacttaaaacaatttaaccaaaggactttaaggtactttatgaactttgtaataagtctcttagggatcccgatgcttatcactgggaaaggttatccctagagatagattatacagagattattgctgattgtgtggagagccagcaaattgaggtagctcttcctctgatgatagaactgaagcttgaacaggagggggtctttttttgttgttgttaaggatccggaaaggaggaggggtaatacttggaaactggaacaaagtgcagtgtggggagctggggatggggagggattcctcaaaagatgtggttaaagagtggtaagcaagattaattgcctagggaaggatgaagaatggagtggaagttgacagtaagtagaagagaatgagcgagaatacagatcctattaagattattttatcctgtgatcccttcctaattgttttgtttctacttgtagacttttcgctatggctatttaaggttggctggtcttctgcccttctctaaatcagggtgacactgctctatgggttatttggaaacctggaagggagaggttggagttgggcataagagagatggtcccctgaatatacttacccttctggatggaggaaacaggtggtccccttggaaaagggatctaatttagaaagttggcaggtccgtatcagtcagcaaacaacgctatcaaaaatcttagccacttagggtggctctgtcagttaagcatctgtctcttcattttagctcaggtcttttttttttttatttttttttttttaaattttttttttttaatttttatttatttatgatagtcacacagagagagggagagagaggcagagacacaggcagagggagaagcaggctccatgcaccaggagcccgatgtgggattcgatcctgggtctccaggatcgcgccctgggccaaaggcaggcgccaaaccgctgcgccacccagggatcctagctcaggtcttaatctcagagtcagagtccatgctgggcatggagcctacttttttttttttttaaggtagtttacagcaactttttaaaaactttattatggaaaaattaaaacgtttgaaagtagagggaagaaaattagcccctatgaatatcacctagctaaaaacttgcaatcttgtttcatctatattcactatcatttaaaagtaaatctcagggccacctgggtggctcagaggttgagcatctgcctttggcttgggttgtgatcgcagagtgctgggatcgagtcccagatccagttcgctgcagggagcctggttctgtctcatgaataaataaaagtctttttaaaagaaaatctaaatctcagacatactattttatctataaactctaatgttgtttttgggtttcagggttttgtttttaagatttgagagagagtatatgtgtgagcagaggggcagaggaagaaagaatccgaatgctgaagaaaacccagcatgaagctcaatctcaaaatcctgagatcatgacctgagctgaaatcacgagtaggacacctaactgaataaactacccacgtgtccaagagacctaatctcttctgaatcaacctgtaatttgattttctaggtcaaattttttttttttttttttttttttttttttttgatttttatttggtggggagggggaaaagcagattgaccactgagcagggagtcctgcatggccctaatcctaggaccatgagatcctgacctgaactgaaaggcagatgcttaaccaacccaggtgccccctaggtcactttttacacagaggaaatatctctccatttcttgaggctgctgaaacaagttaccacagacttgttggtttaaaacaacaaaaactaccatagttctggatgccaaacatagaaaatcaaagtgtcagcaaggccatgctcttctgggaatcctatgttctggtggctgtcacccaaggttatcctttctgttgcttttgttagctgcatcatttctcctatcacatggccttctactttgtgtcctctccttttaaaaagataccagatattggattcggggcctgtcataatccagtgtaacctcactgtaactaattatatttgcaatggccctattaaggtcacatcctgggattctagatggacctgttggggtaggtgggcagtactattcaacccagcacatcattcttcacaattcatgtgtgttttcttcatgagttcaggtagcaaggagaactggtattggtgctgacagtgccaccagtttaagcattagttccttttcagtttcgtttgggcacttagctcccttttccctggtcatctccggacactgacaaaatcaagtttgtgatcttgggaaactgttcatgatggcgatggggtgatctgcccaaagaattatgacctttacagacccagagcaccacatcagttttgagatggtacccatcagttttgagagccaagccctttgtcctccacaatgcagagactagaagatactgtactgttcttaggtgctgttgcaagtgtctttaacagtcaacatctgatggctatatatgctgagcagtgtgaaaaaagattcttttttttgcccgacctacccctgaaaaagtatttaatagttagattctgtatttagaaaagtatcacactgggtggttgcaggccctacctttgtgtcctctttgaatagtcgggctataaagggaaccaaaaacagactcaaccccaattccaaaacctctccacagggtgtggggcgaagatatgctcatgtggtattgaggaaagcagacatcgatctcaccaagagagcaggagagctcactgaggatgaggtgaggagggagggcgggttggattggggcctgccttggaagggaagcctgtacctgactttttgtcctgcctgccaggtggaacgtgtgatcactattatgcagaatccacgccagtataagatccctgactggtttttgaacagacaaaaggatgtaaaggatggaaagtacagccaggtgtgtattaagatgggagagataagaggcagggtgtgtctagtcagaatttgtcctaggaggtcagaggataaacattcttcaccccctcttccaaatccaggtcctggccaatggtctggacaacaaacttcgtgaagacctggagagactgaagaagattcgagcccacagggggctgcgccacttttgggggtgagtgggggtccctccctgcccctaggctcccagagctttgccatgctctgcctccttccttcgcattgtgtataacctgtggcccttctgttttctcacctgcagacttcgtgtccgaggccagcacaccaagaccacagggcgccgtggtcgcaccgtgggtgtgtccaagaagaaataaacctgtaggccttgtcttgttaataaatcgtttatacacctaaggcttccttctgtgtgtttctcttctttctcctgggggggggggggctatcaaaccgggccctggggctgtttgtcctcttgtgggggggcctcattaacctgccccgggtgtgggctgaagccgtggcattgccaatcgccgccctacctgaagcgaccctgtggcgcctgcccactaacgttagaggtaaattaaaaatcactcgaccttgagggtgaccccaagcccgtttgtagacacggaggtccccccatttttgcgcagcggcgtggcgggcgcgtctaccctgagcactggatggcctggggggtatttacaggccttaggcgcccctggcttgctttaaaaaaaaaaaacaggcccgcggaggccggaagtcgcgggctgccggtagggataaaatcctccaaatctctgacccggaagagctgggctccgcggcccagcaagggggcgcgcgtgtggctgaagaggttcgccgccaccgggaggctgctctgcgtccgcggaacgctgctccggactccgctcccgccgccggtgctccgcctgccgtaccgcgtccgccgcagccgcgaagcttcggagcggcttccgggaggcgggtgtgcgcgcggccccacgccctccccgggagggaggcgggcccagccgccaccgcgggcgggggaggggcggccggcgctgcagcttaatctcggaaccgagctcgggcggcggggccccgacgaggtaacctcccgcagtcctggctgcggccccctccggcaccggtacccgccgcgcgctccagccgcccgctccagcctaggcgtagccggttagggacccggggcttcctcccgctaaccgccttcgtgtttccctccaggtcacttctgattaccccacgccatgcccctcagcctctttcggcgccttctccttgctgccctgctgctggtgattatctggaccctctttgggccctcgggcatcggggaggagctgctgagcctctctctggcctccctgagcccggctcccgcctccccggggccgcccctggccctgccccgcctcctgattcccaatgagaaggcgtgcgggggtcccggctccccacccttcctgctcatcctggtgtgcacggccccagagaacctgaaccaaagaaatgccattcgggcttcgtggggcgggctgcgcgaggcccaagggttccgggtgcagattctctttcttttgggagagccaagcttgtggcatcctaccaaggaaccccacgacatcgacctagtacgggaggcagcggcccagggggacatcttacaggcggccttccgggattcctaccgtaaccttactctcaagaccctcagtgggctgaactgggcagacaaacactgttctatggcccgctacatcctcaagacagatgatgatgtgtttgtcaacgtccccgaactggtatcagagctgattcggcgagggggccattgggaacaatgggagaagggcaaggagcctccaagagcagttaaggctggagataaagagtgggaagaaaggcccatcttgaagagccagccaatgcctcttctgtatctgggccgtgtgcactggcgggtgcacccctctcggacaccagggagcaagcaccagatatcggaggagcagtggcctcccacctggggcccctttccaccctatgcctctggtacagggtacgtgctgtcagcttctgctgtgcagctcatcctaaaagtggccagccgggcaccccctctgccactggaggatgtctttgtgggggtgagcgcccgacgaggaggtctcaccccaacccactgtgttaaactggctggggccacccactaccccttggaccggtgctgctatgggaaattcctgctgacatcccacaaactggacccctggaagatgcaggaagcctggaagctggtgggcggctctgacggggaaaggactgcacccttctgttcctggcttcaggaagttttgggcatcctgcgatgtcgggtaatagcctggcttcatagctgagagtgccatagtagaggagtgaggagctgagggtcgagccagcacacccacaaccttctctggcccaggcccaacacagggggccctgactggctgcagctgatcggtttcctctatcaaatgctccatctatcactgaagatggagggacacaggagaaatccaggggcctggcctgccagacctagtgatggtcaccaggaagagcaaaacaatgccgggattgttctctccagctatggcggggaaggggcacaagctcctcaataaacttgtctgtctacctcttcgagtgcagcgtagtcctcaccaggagtctaacaacgcaaacctggggagcctggaggctgccagaccattctggatgggaaggacatctccagggacatgggaaagaggaaggcccctaaggaacaaggctgaggtcatagtgacaagatagggggtgagggtaaaagcaggataccacgaccccctcagttcctagagtagtcccatgctgggcaaagggaggggaacaggtccccaggacgatctacacacattatccaaaaaaaacaaaacaaaactactttcttctttaataccaaccctgccccagagccagcagtctctctccagctgaggaaggggcacagtgccctctccttattccaaggaacagggtcacttccccagaggcaatcatggggacagatggcattctcaggccatcctggagcacggctcagcgtacaaatctgtccagggcagatggccgggccttcaggggcttggctttcttctcttgcttctgtggctgttgctcaaggctctgccggactttgtcctgggtagggagagggggcaagatgagatgtgtcaggctggcaatggcagaggcactagcaggaggatgcagccaagtaggatgcctagccccccccccccccccccccccccaaagaacattttaccggggggcctttttccagaaatttccccccccttttaacaaggttttttttaaaattcggcccttctgctttggctttggctggaagggagccttggcttcagggtcgtagccctaagggagggacaagggtgaaacctagaacagtctcagaggccaagaactgtggcagcccccatctcctgtgccatacttctggggacacagcatgggggagggaagttgtagaggtgagaaaggtttgagcaccagggccttgctccataccagtctctctatccgctccttcttttcttgctccaaagagatgacatcaacctctgccagggctcttggatccagacaaatgagctctgcaggcacctgaggtgtcacaaagggacaagaacaggtcaagagccataggagagtgacccaaagaaggacagaggccagggcgctgctgaatcccactcttcccaagacttgggacacgggaagctttccccaaccccagcccaaagcacacacagcacaggctcaccttctccagcagggccttcacctcccactcctggcgctgcttctggctcctgtaagggttattctccaggccatcaaaattgggctcagcagcccctggaggaagggagaagcatggagccataaaaagaacccagtccagcagctccagctccaccaagccctttgctcttggctgtcttgagcaaacccaaacttccaaccagagttcatccacgtggatcccatcccctagcctactcaccagggaccagcatgctggtgatgcccccactgtgccccagccccagcacatcttcaaaggggcagaaatgaagaccatgcacgtggcctgagagccgatgggtgaggtaaggctgctccagggacggggggctggccatgccctgccccatccatatgttgaccacgtcactcatgcccgcagccagcagtccccgctgagaaaaggccaggtgccccgctccctggggcagggtccgagcactcagaggctggaacatccctcggaggtcaaagatcttcagctggtggtccaggccagaagtggccatgtacctggcggagaagaggtcaattaatctgtcgtgtgggcttactgagcagggctatggccaagtgcgggcatgaagtcttgttggggaaaaacaacttttattccccttttacagatagggaaacaagctcagagaaaggagactagggtgaatggtatggtagagctggaattcacgtcaggctagaattcaagacccttctgtttgtcctcttgaccaaagtttacggtgcacaggcccatctataccaaaacgtgatgttctagcacacacacagtgcagtggctcagcaaagagaaggattgacaacagtggtcagggaggacttcataataaaactgggattagagctgttctagctcattctcaagaaaaccaagaaacatatacagcaggtaaaatgaatgaacatcagagtgtggaggtggtaagatggaagcagaggtctgctttcaggactggagggacatgtggtcaggaggatgacgaggagacagattcagggggctctttaaactgagactgaagacccaaccctgagtcatcaacactactctctggcattgagaccataagctgaagactgcaaggacctgagagaagctgaggaagcaatgacataacgtgctggaggatcctgccccaccctgtgtctccccagaagaagggaaggcacagaggttttgtctgttttcagaggttaggagtttctatgttcaagttgttcctcagagacagaggctgacggaagaccaggcaggccaggggatgtaagtttgccaataggccatggactctcttcttagctttggctgggaaccccagaagaggggactgaagggctcctacgagagggactaaccctgtgatggggctgaagagaggcccagctggatatgactccagacacgacaagacaatcaggaccccagctccaacagatggaaagacatcagtgctaaccaggaattactgacggctcccgagacacggggtcatacctttcattcaacccacaacacaagggcacatgctagcttctctccccacacatacccacctttgggatcccctgcacaaataccaccagcccattggccagaagatatccagggtacactaccacacttctaaactggcagacaacaatttggctctgagaatccaatccaatcctactgcaagctcccagaatgcctcgtaaggcagacagtaagcctcatctctggagcccctgtggcttgtctgaagcactcctgaggaggaccagagataagaagaggtgggctcaagatcaaggaccagagctgttctcaaggggttgaccaaatctcagggaacttaaggggtgaggccttgggcacagcagtacctgaccacagcagcccagagggaaggcaaaccacagcttagattcagtggcccacagaaggcactctcctaaagccaggttggcaaaaatatagaataaaaatggttgaagcaaatcacttgtctccaaagatacaattgtggagaacaaagagggtctgagcatgtggaaggttttcataaaacccaactttttttttttttttaagattttatttatttattcacgagagacacacagagagagatagaggcagagacacaggcagagggagaagcaggctccgtgcagggagcctgacgtgggactcgatcctgggtctccaggatcacaccagggctgaaggcggcgccaaaccgctgagctaccagggctgcccaaaacccgactttctttaaaacctttcctgactttaagactacttaaaaataaagttacatagtttatacttcatgtagaagattccggtgcagcagtataaaaggaggtaagtagcttgtgggaaagtcagccaagtagcttgtgggaaagtcagcctaggccacgcctggaggaagaagaaccagagtctggaaagtggctgtgagcatcgtgggtgttcacaggagacagcaaggacggagagaaatagaccttggaggggctctcgggaggaaagcagccaagacttcatgggtcacaggcagtaatgaagttctgtcaccaaagcaaggagcagaacctgggcactcagaaagcacccagatagccgaagactataaggctatgtagccaggtgacaggaagtcaaattctaggtgacaggaaaatacagtaaaaagagagctagcaaggaggaatctgcgagtgggctgacctatcccaggatggacacattaagtctggtgtgacaagtgacaaaagacaactcagcagaaactaaatacacctcctggctaattatttccataaactacagtccctgtctctgttcataaggtggaataccacaccatggcaagttccatggccccttcatccctgtacccctcagaactgcagcagagtccagcccacagcaggtcctcatatgtgagtgcctaacaggggtattaaaggaacaccaactaatcccatcagagggaacttgtgtggaacagtgtaccaggtatacacattaatacatacacacacatgcatgtgcacgcacacctcacacagcccagcagggcacctgcaaactcccaaagagtagagattcagagcatgcccaccactcctacccctcacatcaccagccaggcctaaagagaatgatcacttctgataccaatggtgaaacccagtgctccatgctccctgggcaccatgccttaactcgtgttaatgtctaggtccccagggcttgggacctacagcccatatgccagatccagcccaccacctacttctggacggccctcaagctccaaatgttttggacatttttttaagtgcctggaaaaaattcaaaaatattttgaaataggcgaaaattatataggagattcaaatttcagtggccacagaggaagttttattggagcacgatcacactcattctttggcttcttctgtggctgctttgtacaacagcccgggagagcagtcaagacccaacatcacgtatggcatgtcatctctttacaccactgtgggtgcactacaactcagtgacatggttacaacttgacagtgtttcatgtgccacctatctcatcgcttgtgtgaaagacgttttcaaagactaagtaaaatctctccacagactgacattaacagataaacatttgcaactgagtttgctgatttagaacactaactatgaacctcaactgagcaaaatgttatcctcaaaaagagaaatccaattcttcccattagtagacctgtattataaaaatagttacctgtactcggtaactattatattttgaatttcatcacttaaaaattcgtgatgctttctcattacttaagtacctatataacacactcgaatttgcctcttggccagcaaaacctaaaatctttttttttttaatagtttaaatttttttttcaatttttatttatttatgatagtcacagagagagagagagagagagaggggcagagacctaggccgagggagaagcaggctccatgcaccagtagcccgatgtgggattcgatcccaggtctccaggatcacgccctgggccaaaggcaggcgccaaaccgctgcgccacccagggatcccaaaacctaaaatctttactacttggctctttatagaaaaagctttctacctttgagctagatactcatccatactcttggggtaaggaaagcatgtagcacacagaggttctggaatgtgcccacacttacatggtcagtcagtggctaccatcacgatttatttactttattattatttttttaagtaggctccaccaacacaggctttgaactcaccactctgaaaccaagacctgaactagatcaagagtcaaacacttaaccaactgagccgtctgggctacccaaccaggatttacaacctagacagcctgactgtgagtctgtgctcctaaaggtacactgccttctatacctttctacccagctgtgacgttctcagcacctcaggaccaaacaagtgacttacgtgcctgtagaatctactgccacagcccggactccaccccgatgacagagaatctttgccagcggctccttcatggctggactccataaggacacagtacctagatgtcaggggagaggagccaaagtcactaacaggcactgaggtgattacctctgggaaagacagggtctcaagaccaagaggtaacgagagggaggaataggggctacttgaaggaacgtgcaaagtacaaacaaggaagcaaagcaggtcaggatggtcaaagagtcaaagctcagctagagaccaaccattgctgtgtccgagatggatgacagcattgtaagggttcttagtcatgacgtccagccgcccagcccgagcattcagagctgccacgatctttcccactgacacatccaggtaggtcagaaaccctgtctctgactgagagagagagaaagaatgagtcctgattgccctccatccttctactgagatcccagagaagaaacagttttctcaagggctgccacccagtctcttcactccagaggcactcacagccgtggccagaaggaaatggaaaggcaagaactccagccgtgtgactcggtcacagcggcggatacagtggagctcgatgccctggttgtcatagatgtgaagccagcgattctgagcgacagcaaacagtgcctctgaatgcaaaaacctggaaggaggagaagagtggttaagagggaaagagggtcaagggactgtcattcagtcaggaaggagatgccccacccccactgaccggatgtcccgcactgcctccatgacgttgatctcacacatgagcctctttgttacccagtcaagggtggccacatgaccccggtgccctccaaaagccaggtgtctgttggaggtgggggacaggcagcatgtcaacacagggaagcaccctgactcagaccatgaggtcttcccccccaccggccccgcctctccggataaggagatgctttacatgctcaccctcatatgcaaacaaatcacagaaccatccccacttcatcagcctaaacgtataccatatggctgaggtgagtgtggctgaaatggttaaggagatgaaccacatcctagttcaagagtcactgatatccaatcttacctcccaactggggagtaattcagtctgtagggtccaaactgcctcaagtttaaatcaaaatgctgagagagggaaaaatgaaaaaaaaaaaaaaaatcaaggaagaatgggctcctcttggtaatttccacctctagttcccacttctatctgtgccaccagtggccccttttccaacctcagactcaccttggctgcacttgcaatatccacagcctccacaatctcagcctggcatatctttgctgtgtcctccccatcctccccttccagaaacctaagggtgagcactagggttgcagtaaaacttacaaatacacggtgggtgtaccaacgtaaaaatgagaacgagaagccccatcaagcagggcctggggaggtccacattaggatccacttacccaggttcctcagcaagaagcagttcagaacgagcagctttaatacttatttcctcttcctcagcttcagccacctctagtcggcttcgtgttttcgacttcgaatgtggcagctataccagcgttggcaggagagtaatgaaaaaagaaccaggtgttatgtggggtgccaggagagtcacacagttcctcttcatccaactcactcatatgctctcccaagctgcaatccctcctcactcccagctggtcctcacctttttggatttgtcaatgcgacggaacttgcgagccacttcctcagggatgggagcagggcctggaaatggatcctgggcctggggaaggaggaagcaattagcagacaggttagggttgaccccaaccatcgcacctgtaaagtacaaggcaacttgccccaccaccttatcaggtcccaggctcaccccggacaaatttctctgaggctcaagatttctctgttctcgaggtttcttcgggaactgaggcttcccggggatccgagacttttttgggaggttaatgttctttggcctctgggggcggagctctcgattccttttcttgttacgagggggccctggagaggctccggcagcggtcagagtggcttccttctcccagtacctccgcggtttctacgggcagatcacaagctctaacactccatagccctcgcccccccacccccgggaccccgcagctaaaaatttcccttccaccctagcgaggtctctaccttcttcttggtctgaagtctggccttcttgggctggacatctctgccgggtttggaggctgtttccatctagcccaccggaacgacgacccacgtgcaaacttctctcagctgtccacagacggctcggaaactcccggaagcccgccggccctcgtccaatcagtgcctaccaggtctgaagccgtctgagcgccatcttgaatgagggcccactctctctccaggggcggggcaggtcttggctccgcaatcccgagcagccgcttatgcccgagtaatgaaagaaaggtagtctggggctggggacaaagtaacggtgcaggttttttttccagctccgtttccctgtcttgcctaaaacctcccgggtccagttttctgggggaacaccgttcactaaacgtgccaaaactacagttcccggcatgcgtcagaagacagcttccggcgccttcttttcccagcattctttgtttacttccaggtttagtaatagtgaagcgagaacgtgagtatggctgggttacggttgaggggcttggggtcttgctgcgcccgccacctcctggggcctgcgtggagggctctctgggacgaggagaggctgtggtgccctgggaggctgcctcgcaagagtgctgtcctttccgcaggccgggccagaaaggggagtttaggtacctcccagagtgagacccagcgcccgctcccactccccgcgggccttcgtccccgccatggctgagctaatccagaagaagctacagggagaagtggagaaatatcagcagctacagaagggtaagggagcagcgtcggcgcggcctcgccccagacccttcacttacagcccaaagccaaaccaagataatatgttgtgccccactagaggccccgcgtgcagctccttccccatctcggagctcgtccccacccactgacctgttgccgcctccttgtctacttcctcagctccgttttcttctcaccaggattggggtcaggcggcacatgtgatgtgtttaatcaaccctttcttcctaacccccagacttgagtaaatccatgtcggggagacagaagcttgaggcgcagctaacagaaaataatatcgtgaaggaggtgagagagggatatgccgggccagaagggacctgacctggaagtgattctgaccttgtatgtcccatccctccatcaggagctggccctgctagatggatccaacgtggtctttaaacttctgggtcctgtgctggtcaaacaggagctgggagaggctcgtgccacagtggggaagaggctggactatatcacagctgaaatgtgagtctttgttctgacaccctgcaaggcaccggacgcccccagcgtagaatgtcgaggagccgttggagtagttccagggtagccctgtctgatctgcttcctcaaaccctccacggggagtccaggagagtccaacccttcagcaccctcaagagtaaatcccatcaatttctcatttgcttgtctctcttgcctctcttcagtaagcgatacgaatcccagctccgggaccttgagcggcagtcagagcaacagagggagaccctggctcagctgcagcaggagttccagagggcccaggcagccaaggcaggggcttctgggaaggcctgaccccatgggggggggagggaatgaggcagctcaagggtctatgctgtagctaataaaatgtgaaaacccctggctgttttctgaccagccacttcctgtcatgatggtctcttccttgggccccttcaactttatatatatgccacctgcattactctgttcggtcccaattctcgtgactggaattgccacagagtaatcctccttttttcactgagactaaaatctgaaacgtctcacacctacttgcctatatacactacgcttgccttggttggcatgccccttaggaaacatgagaagagcatttaccacgcaatgatcattgggaaggccagtttaactacagagctcacggtaatctaaactgagaccccagggtgaaatgtggtgaccctcttgctatgctttcttgtcatcctccagaaagcaccagcatcttagtctcattctagaatttgtttgaatgaagtttaggctgatttaaaatcccagcatggaacactttgtgatgttgtaaggccctcaagtttatacgttatccacaaagtcattcttccatttctttgtcctaaaattgtttcttacaaatgtccaaccacggattgttctttaatctgctcactttaattggtgactggtacttgctatgggtctgtgacaactgagaagaaaaatagcaaatagagggagccagcagagaggttactggggagaaggaaactgttgtgaggaaactgttttcgccaacgcttcattttcagcaatggggacagaaaacattgggccccttgttctttggtgtctacctttggccatctccccaccgccactcccagaagctaaaccatacacaattcaaggacaggggagtagaatgtaggtagtgttttgatttattatcttagtgttgtcacagtgacaggaacacccagagtaggaaaataaactcctactagatcctacttcttgccatcccctctccccagggctcagagcctctaggcttttcctctccctcctccttgtaggcctctccttggccttagaatgctaggatgtggccaggaaccgggaactgatccctttttccagtactggccatgtgctgcattcatggaaagtagggagctatacacaggtatcccaacttggttaccaagataaccagttctcacaaagctgaatctctcagccttctggttaaaccagtagcacttcactgccccagggtggttggccacctttctggatttcttcccggtgcaacatgactgccaccactcaggatggcaacccacattggtgtggccaccatgagttctattgagctcgcagggtttcttcctcaaaacagtgcccgggcaatcttcctccctgtggccttgatcctgggaaaagaaccccctcctccctcacttgggggagttcctgaggctgaggggctgctggtgagacccagtgtagcagtagagggccttcgccgctgccgtaggaggaaatcgtgtgatgctccatccatagcatagaaaacattagccgagggtgggatggtcagctctgtgtgttcagagaaggaacatcaagagcgacatgatcattgcccccacaaccagttggctatggaagcaccactctcctcccaagtctgccttccctcacggcctcttacctcgctcccctggtagcagctgcactagctcatattccgaagccaccgcagagtcacgattgtttttcttaaggacacgactgatgacacttggagccttgtcttggcttgtcacctggcaggacaggagaccaaaagagcaataaactggccattgcctctgctttccatccgttcagctctaactgctgatcccaactgaaaatggtgacccatgtcaaacactctagaatgaacagggaagcactatgtagtggttacctgtaccccacagtgtccagtgaaataggactgcttccctaagaggaaactgctatggattctgaagatctaatatggtccccaaagttcaagctgcagcagctaatgccaagtagcctttattgtttttttaagatgtttacttatttactcatgagagagacaggcagacagaggcagagggagaagcaggctctctgcagggagcccgatgcggaactcgatctcaggaccccacgatcacaccctgagatgaaggcagatgttcaaccactgagccacccaggcgtcccaccaagtaacctttaaaacaaaatagctgacgggtgcttgggtggttcagctggttgagtgtcagactctcagttgtggctcaggtcatgatctcagttgtgaggtggacagaacccacgtccagctctgcggtactgggtgtggagttaagattaagattctctgtctccctctccctctgcccctcccaccccacttgctcacttgctctgaaaaatgaaaaacaaaacggctatcataagcacaggtcagaaccaaggctagaatcatcctcccatttggctattcaggacaacatctatagtcccacaaggcatcatccttcagccccactgcacggggcagcttcctcaccaagatgctcttgtagacactgccatcttcccccagctccatctggactcggatgattcggcaatcagaggcccctggcccagatcccccacccctgtattcagtccccttggaggccccttctgcacccccactgagtggggagccacaggaggcggaacggcggtgacctcgagaaggcctgggagaggaggctgggggagagaggtggctggggtccgccagactgtgcaggtatggagtgctttccagggcagagtccagagatgagacagatggccacttcatgtgctagggacaaacaacatgtgggactggcatgaaggcagagaggtcaaagaagaaacattcacaaaggcaaggtcagtgttgagatcagaggtcaggaacagagctcacctgggccagcctggtcaacagaggagcaggggttccaggtacctcctctccccccacactgggccggtcccaggagacaaggggggtgggtcccccgacagagcccaggaccctggagcaataaggcattaagagggtcagagggagaagggctcttctcccaaggagcttccccatggcactaccctctaactgctgacacccttactctgtccattgcgagatgaccagtgttggccgaagcacccttggggcaggagggtcactggtaccaggtggctccacctcacaggacactcgatggctgtgaagaggtccaatggacagatgtcaggacaggacacaccgatccccacactcagccctaggtctggagtcccaacctcacccagccagtcacctctgggcctctgtcagcggccgaagccctcgcagccactgctggatatcagggtcaggtcggaggtcatagccacgacattcgttctggagccgccgcagctcagaaaggacagcaaactcctaagaaggagcccacagactgcaggagccgatctcagggacccctgactttccccaccacctccccttgtcgggacatggttagagaggtctagcatcccatgcgtgcactaccctcaccttcctccgcttgtcaaaattgatgtatccgttctgcaagaatattggggatggggtgaagcccagttctgccacagagagaacataccctcttccacacacacatccacatccaacttctcaagcatttcacccactaggcctccgaatcctctgttcctccccagctccccctcacctctgccctgccccaagctctctaccttacccttgaaattgaatatcacaggtagaagtggtgtccattccacagatgggaaaattagggctcaaagacaatgaggaacttgcccaagatcccagtttttgtttctttaacaaatgctacatacgctaacactgcagacacgctctaagcacctgctgaaaagtatttcatttaatcctcctgacaacagactggcattgacatggtcaccgcgctctcacttacaaatcgctgagccacaaataagttaagctacttgctcaagtaacagaaccagaactccgacaatctggctcgagccctggagtttggtgctgacgccctgcaacacctttctggaaggtctatctaaccctgaggcccacctgttccctcatcacaatgcacacaacgaccttgcacaccacccacctccagctcatccttggaggctgcgtccagcatcacgaggtccttcaggaaggtgccaagatatgggaccacgccctgaggtcagaggtcaggatcagatgcccactcctgatctgagggctctccatccctctgcccttgcctatcccatccctccctcctgccatgcctcccctttccgtccctctgaatgcctcccactccacttctcactctttcacaacactcccccccaccctaccccaccccaccccccgctaggctagtcactcaccccaccccgggagccagagccagacctcggagccttcttggaatttgactccagagagggctgcagcttcacctcctgctggtgacaggacagggaggtaggggtgcctcaaggggagcagggatggctgggagcaccatggaacagggactcacctgcaagaggagctcccggctctgggaataattatcctcctcggagaagatctggcagaggctggagaagactcggaggctgtccctgggggtggggggcagcagccttgaggatgggccagcctgccccacgccccctcggcgccaggcaggtgcccccgtgctcccacctggtggcttccccccaggctgctcgaagcctgtggatggggctggactgcagggccgacaccacagcataaaccgaagagaagtttcggagcagacgacactcctgggggaggggagggtcacagaggcaggccagagctctgggcccactctctccacaccagggtccccaacagagccaagcctctctcttacctctgccacacggatccacttttccaggagccgggccctctgcggaggacgcagtggccgaatggtcacctccccgggcccctctccagctgaagtagctcccaggacagagctgaccactgcccctgccaccttgttgaactgtgtgacagtagctcggacagatgggcagaggtgggaatgtcccggccggtctctgtgaccccacaggctccccaggcactgagaggggaccagatggagaaacagctcctgtggagcagaggacagagatcaaggttcggagtcaagtgggctcagccttccaacatcaggggcgtgaggatcgcaggtggccaaggaaccaaaggggagcgggctttgaagggtaacaatcatggggaagggggaaagatcaaacagagtggacaggggaagctgggagcttgtttaggaagggctagaaacaaggagaaggctctggagtcagggggagtagtaaggggacagggggcacaggggcagaggtcagggtctcaccgcatctagcagggtcagctgttcggccaagtggtcagcgaggaacaccaggacatccgtggggtcagcagggggatcgccggggagggccaggggcttaggaaggtcgggggcctgggggtccacccggaaccggaggttgcggatgaggtcagcgctgccccccccaacaccctcccctgctgcataccctgtccgaagcaagaagctctcaagccggtcaagctggcccttgacctcagagccaaaatcctcagggtgagaggccagccaggttgacagtacagaggtggctaccctgggagaaggggaatcagccaggggtcagctatcaagctgcagctcagccagaggggactgtgaggttaacaatcagcggtcactcaccctattgtcctctctagttcatcagtaggatgagattcgagggcttccagcctaggaaggagaagagattcgatctgcccattttccccaagcccccagtggctttgactattctggggggattttctggctttaagaagtccagacacctccatgatccttggtcccttatgaccctgacctgtcagccacaagccctagcagggcaggggtggaagtgaaggccctgtgggtggccaggaaagctggtgtgaaggtcacgtcagcccctgatgtccgggcatccagcaggtgtctgaccagggcctccagagtgccagctcggagccttctggaggaccgagggggaggcgtcggggcctgggggagacagaaggaaagtcactgaccctgttttcaacttagcccctagacctctggggaaaatcccagactcaggaaatgctgggggctcgttatacgaagattcagagacggccaaaaacttgattgaccaaagtcacacggcagagttcaggtctccaaagagttggccagaggacaggagactgggaggtcatgggtcagaggtgagaagccaaagttaggatctcaccaagggatcaagaggccgatactggcggcttgtgacagtaaaggtggcaccattctcctcctcatcccagacagacacaggggcctggcagagcaaggaaggggaggtgagacagtcccacgccaccccctactgcccccagccctaatcctccctctgtacccctcacctgtggtggcggggaacagtaccagcgagtgcgaggggtggggggggctggtgaccccaggtctcccccactggggcctagacagccccccccaagccgcctcagggcccggtggagtcgagggggtggcagtgggggggtgggtggaatgcaggaaccctgggcccggagacctctgtcgccctttccccccagagctgaaccccaacacagcagagaagcaaggtgcgaaggataggagggggaagcgagaaaggcagaaagccagaggcagaggccttgaaagctggaacctcagtcacgggcacagccgcaagctccgccctcccccgcaggaactgaccgagccccaagagttactccttcaggggagccccccttccctggtccctcagtgctgggagaccccctcaaggtggcggctccaatgccagtacaggaaggagaaggggaagtcgggatgatggggaggggggttgtgcagccgactcagggtcacgtggccccagcccctcccccaaccgatcccgaaaaaccagccctgccagtcaccctgccctcacccaggctctggacccaggagtcctgggcctcggggccccgaatccaatttctggccccttctggggccccggatcccgctcctggccaccaccattagtcccggcggagagcaggtgacccccccggcccagcctgggatgttccctccaaagtccgagaacccgggcttcccgcctccactcgcggcccagcgggagagggggaggggtcacgaaatcgaagggttccctccccaatcccggagtcggagaggccggttactgtggaaacaaaccccaccccgccaaacaaaaacacggagggcgacggggaccgagacacgacggccggaaaggctggcgccctggggccggggcggggagagccagggaaggttcccgcgggccagtgctgagtcccaccgccagcgggagccccaggaactccgggactccccgccgggccgactggcagacacccagcaggaggccggagggagagaggagggacagagacccgagggcgaggcagagcgtctccgacatgtccacctcccgacttcccaccactcgcgtctcacctcgtcttcttcctcctcctcctcttcctcctgccccccgcccacgccccggccacctgggcccccaccctcttcggggtctcggctccggaagctgctcagcacgactcccccggggggactcgcgtcccaaagcagccgcaggggccgcgggagcatggccgagtgaaggaatcagcggggtcgggccatgggggcgcctggggagaaacgggggggcaggtggagagtcaggtgggcgcgggggatcggggaggggagggacgcgggtgagtgcccaggtgaccgtacgggagtttggggagggaagcaacacaggagtgggctatgggggtccctggtgcatctggggtttgggggtcacgagtacgggaacgggcagggtcacagggtgctcaggctctgacctgctcgggaacggtgggagcagcgcgggtcccgggccgctgttcccgtcggtctccggtccccaaccgagtccctggcccgagtcccctcctcggcttttccgcacccccgttaccgcccgccaggctcccgggccctcccgccctttccgctcgccccctcccccccccacgtccgcctgctcctactgcaggagccaaaacgggaaggaagtgaggacaggagccagggccgcggactcggggagcgccgggcgcccagcggccaggccccagcagtcacgggcccccgcccgctgtcctcggagcccccgctcagggatcctggagcccacgccgccccgcactcaatccgagtggattcccgtctcccgaccccgagggaggataggagccggatttgacattcccctgccccccgacaacaccgaagctaaaactcccgggggaagcgttttaggccgacagggatcgcttactccccctgacgcggttacactccccacccgcacccacgcctgtagcggaccggaatccagtccgcgttttccgagaagcgcggggttcccgccctcgcgtaagggggcggggcaggaagccgccacttccggttctcggttcctctgtcccgcgtttccggcgctctgcgtggtacgtgcgctcccttgggctcgccccgccttccccggagcccgcggcaccgggcgtctcgcccgccgctggtggcccccgaccctgcagcgtgccggggactggggtgtcgccaaagcgtttgagcgctcgcggtgagggcagcccgggtggctcagcggtttagcgccgccttcagctcaggccctgatcctggagtccggggatcgagtcctgcatcgggctccctgcgaggagcctgcttctccctctgcctgtgtctctgcctctctgtgtctcatgaatcaataaataaaatctttaaaaaaaaaaaaaaaagagaagggaccagaggtggttgttaagagcctgtgctcccttgccagggggacccgtggggtggaaggagacaccctgttgggagcataggacacaactttattcccgcacgattaattttttttttttttttatttatgatagtcacagagagagacagagagagaggcagagacataggcagagggagaagcaggctccatgcagggagcctgacatgggattcgatcccgggtctccaggatcgtgccctgggccaaaggcaggcgctaaaccgctgcgccacccagggatccctattcccgcacgattagacccgcttcggtctaattgaccgtcctcccttggaggtccctagtccgagctgccacttccttcctccagtagttacttcgtccaacactggctttcaaatacagaggacgaaaaaaggactaatgtttgcgttgagcgccctccagcgggcaccgggcctgtgcgggagcagggaccacgcggcggacggacggacacgttcctgcctctgaggaaccggcagtcccgggagcggacctctaacaaggattcgcacatctaacaaggacatctaacaaggattcgcacaatcattcaaatacaagtgtggtgaaccgcacaggagggacacgcggcggtgtgagggaatgaggctgacctggtctgcagcccaagaagggcgaggggtggacctgacatacggaacagacggggaaggtgggagccactggaaaagagaaatgacgttcggtgagatgaacactgaggaaagggctggagggcaccaggtggggttgtaggggcaggcagtggctccagccccggagatgcatagcaggacaagaatgggtttggcttctagggcactggttctcaggtgtggcccttgtcccagaggtcctggagactatttcagtgggtgtgcaaagttaagactattggtaacaatactaaaatgttccttgcctctttcactctctccaaagaaatgcaccctggagctttccagaagctgcatgctgatatccttgtcctcacaactaatggaacatgttcttgcgtattcttttgttaaatttttctccgttgtaagttctggtagcataaatatctgtagtttgtcacccacataaccgaaagctctttagcgtccttgacgctttttaagcagtcctgagacttaaagaatttgagaaccactgcactgccttagcactctaagaaaggaaatgctacagatttgtatcctctgaaaaagcattccagccattctgtggagagagattggagggagcaagatgatggtgtacaatttgggggagctactccagtagctcaggccagagatggtggcagcttccccaggatggtggtgagtggcctcactgtgctttctggaagaaaaataaaacgaggtgaggaattccaggttttagaaagagaggtgaaattgaaatgctcatgatcagggtcacctgggtggctcagtggttgagcaccctgccttcagctcagggcatgatgccagggtcctgggattgagtcccacatcgggctccctgcgtggagactgcttctccctttgcctgtgtctctgcctctctgtgtgtgtctttcatgaataaatacataaaatctttgaaaaaagaaatgctcacgatcagtccagaggtaaatgaaccctcgtgagcacagagggcagcagaacggtctctgtgggttttctgcttggcacacacagcgccgagtgattttgcctaatcctcccaacagccctctgaggctctgctgtctgtacagtagccaccacccacatgtgtctgtgcaacattcgaaatgtggccagtctgaactgacaggagctgacagtttatttttttattttttaaaaagattttatttatttattcatgacagatagagagagaggcagagacacgggcagaggaagaagcaggctctgtgcagggagcccgatgtgggtctcgatcccgggtctccaggatcataccctgggctgaagacaggcgcttaaactgctgagccacccagggtgcccaggagctgacagtttaaaagaagcacctgttttaggtgacttagaacagaaatactaaaatttcttatattgagtacatgttacatgataacattttggatatattagatgaaataaatggtattattaatattacctgttactacctttttattgtggctactagattatttaaattaacatacatggctggcatcatactgtcggacagtgctgcctaagtaatttttttatcttgacactcaaggaactgaggtatgaagtagaatacttaaggtggcaggagttaacccaggtctgtgaattccaagttctgcccccccccaccccatgccagcaggctccctccatgggtgagaagttccaagaggagctcaaatgacaacggaaagaaaaggaagaggcctgttaccttctcctttggatcttttgaagtagatctggaggcagctgtggagagagattaagaagggttgggatggaggtgtggtagggtagataggtgtcaggcttctgggagtaggcagggactgtcactgtggcaatgagagtcacacttacccacccagcccagcgctttgatgagcccgaggaggagaaaggcagacaggaagaggcccacgctgtcctccagggagggcccagagagtcctggcaggtggaagtggggaagagtaaactctgtagtatcctcctgaacccctggacccccaccaccccacccctggctgctcgattacccttctggctcctacctgccacctccagggtgacttctgcactgcgccccaaggtgggcaaggttgggtggtggacacgacaggcatagcgcgctccatggtgcttggctgtgactgggatgggctgcaggtgcgcagagaggctgacagagccatctgagtggtggcgcagggcggagagccagctctgcccctcagccttctgaaagctgccttctgggccaccccggagctcccattccacctccaggcccttggcaggatagaagcgggacacaaggcagagcaactcggggggtgcctccccaggggcagcccagacaagaggtgccggtgtcaaggatattttggggggctctggggagaaaataggaaaggagcatgggggaatcaatccacatttgtctctatcagtttgccctatggcttcccccaaactgaggtggtttggtttttttcttccaggatggggaacccacagtctccccactggtgcttcacaggaaaccccatgctgaaacccatattctcaaggatcctgttcctcatatttgggaaccttcatcccagtcacttaaattcccagggacctctacccattgcctttctgattcccaaggatcccagtctacctcctgccattcacccagcaccctcttctcccccatccttcctccattatggtatggccattatcaagtgcccacctttgctttacccatggggatccctgtaccccaactcactctgtacagaaagctccagggcaacctgcccttgcaggtatggcaggtgtacagtggccagataggtgccctcctggaaaggctgtactgcaggcagccagagggtcccgtttccagtccatggaccccatggatcatcatcatcccaggcggcaaatgccactgccccgtcttgggcagctggcatctgctcatgcagccctggagttgcagccaggagtaggtgcccttttcccaggtgctggcgtcgccattccagcccaaagggagggggacctggggccagtgatgcagcagcctcagagatggagggcatgtaggcaaatctcaagtccagcagagcatcttgtcccagttggatctgagcgatggggctgtaggtgaggacagtcagcacagctggggaagaggaggagaggagggagtagaaggggcatgaaggagagaaacaaagaggaaagaaatagagaaacagagttatagggaggagtacccaactcaaattcacccacccctcagaggacccctccttttccgataccaaaccatcttctagtctttcttctagtcttccctgcaaatcccctttgttctgggcctgcgtgcaacccagagcggctacacatgagcagacaggtctagaggtgattaggagcagtgagtggatacagcctttgaaggctggtctgagcacccagcccactcaagttctggggacagtgggctctgagtgcacttccaacacagcctgaaccagtccagtctccatgcaccacctgtgaagaaccaggcctttcttggtttgctggtaaagactgtgatgactcagggctgtcaatcctctggtgctgtatagagtacttattgactctggaaggttctggctctagcctagacccaaacagacatctatgctctactgaggcagggtatgccaattaagtgcctggagcccgccctccctggttaatcccaactctgccgctatttatatgaccttataggctagttatttttttatttttattttttttagctatttttttttaatttttatttatgatagtcacagacagagagagagagaggcagagacacaggcagagggagaagcaggctccatgcaccgggagcccgacatgggattcgatcctgggtctccaggatcgcgccctgggccaaagacaggcgctaaaccgctgcgccacccagggatccctttagttatttttttttttaagttttatttatttattcatgagagacagagaggcagagacgtaggcagagggagaagtaggctcgatcctgggtcctgggatcacgaggccagttatttcatgttgccatggctcagcttcatctcctaaataatgagataataatatgataataatacgtatctcatggcattgtaatgcaggttaaatgatttaatgcctctggttacccagatttattcagttcctgattctggataacaaagacacctatatgtgaagtgcttagaacagtacctagaatacagtaagtccaccaagtgtttgctgggattacacctaaccatctattagaccaacttaatgtgccccaactcaacagcatctctgcaacattccctcaccccgctccaaaagtccactctccctgccttgtggaaagatcaacccctactctggacgctaagggaaaatacttagagtcactcattctctcactcaactaatacttactaagcacctatgatactcaaggtagaggacagcagtgaatgagacaggcagtccctgccctcatgtttcttacagtttagtaagggagacagatgagcaaattgccaaatataacataccacctgctgtccccaccaggccctaattgtcttccagatagattctcacctctgactccaactcaagttctcaccaacatttgttaggacaatgacaacctcctcttgggtcttccttatcttcagtctctctcttcttcaatccatattctgcacagtgtgactacaagtctaagccgttcacatgcctgtttaaaaaaaccgagctaccaggatgcctgggtggcccagggttaagcgtcagcctttggctcaggtcatgaacaggacccatctttagaatatgctcgatcaatgttaggtgttgctattttcattactgccaccatcatcctcgtggacttgctgggtatctcagcaaaatcattccatctgtatttttctcattagtccaatgatctgttccttgcctacctttgtaagaatcaagtaaaataggggatccctggatggctcagcggtttagtgcctgcctttggcccagggcgtgatcctggagtctcgggatcaagtcccacatcgggctccctgcatggagtctgcttctccctctgcctgtgtctctgcctctctctctctctctctctctgtgtgactatcataaataaataaaaatttatttaaaaaaaagaatcaagtaaaatagcaggcttttggggagatggcacgtgccagcacacacacacattattatacataagacttctgatagttcactgtcacctataaagcccagatctcagggtatttgatgatccagcccaggccccaactcacctttccagacttctcttgcatcctaagaactggctccaaagaatccctttcttgaaactagtagaaattctaatcataaggcctttctttgctttggtctaactcagttccctgcctattgtctcccaaacatctaagtattccatgtcccccaaggtcagttccataactacttcttccccgaaatgtcagtccttcctgtaaaagtagtctttcttctcttgtgacactgtaatttttaatcctagtttaactcctacaaggttaaacttctctcaacctcatgggacagtttttttcaataaagtaaaaccaggggtgcctaggtggctcagtcggtgaagcgtctgcctttggctcaagtcatgatcctggggtcctgggatcgagccctgcatagggctccctgctctgcttctccctctccctctgtctcctgctcctcctgcttgtgctcttggtctctgtgtcaaataaagaaataatcttttttaaaaataaataaaaaataaacttcatttctcaaaatccagacacaaattttaaattattacaaatgattcatgagatgaataaacaaaatccgaagattttacagtttaaccctcaagctaacagtgctctttaatgtgggttgaaggagcaattttagacctgcatcccacaaacctgtcttgaaaaatacaaatgttaagcacaacagggccagaacacgaaggaaatctgtacctgtttttacatcacagagattttcgcttttctgttaataaagtgaacggtagacaactattataaagtgttagtgaaaaaaaaaatgtaagctcaaatttaatcaagtttctagaactgtcaattggcaggaagtatggaggacaggaataagaggaaaatgacacaatgaggagacagttgaccaaagacagaacatgggaagttctgctgaacaagtgataaaccactagcatttagggagtgcagggcaattatagaataaaggagacttgggcagcccaggtggctcagtggtttagcgctgctttcagcctagggtgtgacccaggatcgagtcccacgtcgggctccctgcatgcagcctgcttctccctctgcctatgtctctgcctctctctgtctctctctgtgtctctcatgaataaataaataaaatatttaaaaaaaaaaagaataaaggagacttagacaaaattgctgtgaactgagttctgtgggaccccctcaagttcgtatgttgaagctttaattcccatgtgactatactgttgacccttaaacaacacaggtttgaactgcaatggtccacttatatgtgggagtttttgtacagtacagtactacaaatgcatattctcttccttatgattaattttcttaataactcttttctctagcttactttattataagagtactgtatgtaatatatataacatataaaatatgtgttaatcaactgtttacattattggtaaggtttccagtcaacagtaggctatgagtggttaagtttcgggggagtcaaatggattcagattttcgactgctgggggtggggtcagtgcctctaacctcccaccatacacacatgcacagttattcaagagtaaactgtatttggagacaggggctgtgaagaggtgatcatggtcaaatgagatcattaacacagggctctaaccttatatgctggtgttctgttaagcagaggaagaaacagcaaagctcactttctttccttcatgtgaggacacagccagaagtggccatgtgcaaccacaacgggagagctcttatcagacaccaaccctgagagcattttgatcttagacttgatcttggacttctagcctctagaactgtgacaaaataaatttaaggtatccagtcgatgatattttgttatggcaacccaagcagatgcaagaaccaaatgtaaaatatagagacctgtttggtttgctatgacaatattttttaagcccttatttgatagagattcttactgaagtacttatgaataaaatcatatggtgcctggtataaatttcaaaacaagaaaataggtgggaggagggtcagcaaaacaatgtggtaaagcctaataactacacaagtgagtgggtgattggtctatgggggttcattagaccattctctctactttcatgtgtctttgaaattttccattacaatgttttaaaagaacaatgagattttaaaaaccatacacgtgaagtatagtaggacagtgtatttgtcaataaacattttgaagtatttgataagaaatactgtataaatgtatattaggaaaaataccaatgatctgtgcccctaggaagattcctttttaaaatttacattaaaacaacaactttcattttcttcaatctctaatcaagtagaaatgcttgaaaaggaagaccgagcacagcaactagtttttacccccaggtttgggtctataagaagcagaaaattgtcccactgggcactcctacggctcctatctgcacttctcttatggcccaaattgtcttccactctacaattagccattataaatctactgagaaccttgagagcagaatctgatcaccttcgtgacccttaaaagtgcccaaggccacctcagagattctgatttaatttgcctgttgtgggacaattcagtgtcatttagaaacttccaagacaggggcatgtgggtatttaagttggtggttaagtgtctacctttggctcaggtcttgatcctaggctccctgctcagcggggagtctgctctctccttctgcccttcttcctgcttgtgttctctcaataaataaaatctttaaaaaaaataaaataaaataaagaaaaagaaagagaaacaaacaaaaaaacttccaaaaggactcttacttgcagcctggattgagaaccaactggggcctaatttcttcttggtgctaataaatattgaaccagtgaattaattaaccaagtgtctcccctgagagtcacaacaacagaaaagcagcaggaaatagcatccacattttacagttggaaaaacagactcagaatgaaaagcctcttctcacccccacctcagtgaagccagcaggcctgggagatactcctccccactggagagagctataatccccatagtttgcctctgccctgcccagggtgaggcctggcaaccaagaacgtcaatgtagacagaggtgatgggtgggtgctgagtccctttccctggtcctgtgggtgattcactctctgggcgggggtagggggggtgggcgggtggggggggggtgggaagaaggtagtggggggggaagggaggggttagcttgccagttgtgctgtgttgtttacaaaaatcatacaagaggcatctggctggctcagaggagcatgtggctcttgatctcggagtcttgagtttgagcccggcgttgagtgaagagactacttaaatacatatatacatacataaactttaaataaactttaaaaaagctcacaggactgcgagaagccaatgactgttcatatcctacccaccctctgccatgagaagggtgagctccgaggtgccccattccttttttttttttttttttttaacattgtatttatttgacagagagagagggcacaaataggcagagagagggcagccccggtggcgcagcggtttagcgccgccggcagccgagggtgtgatcctggagacccggatagagtcccttgtcgggctccttgcatggagcctgcttctccctctgcctgtgtctctgcctctctctctctctctctctctctgtatgtctctcatgaataaattaaaacacacacacacacacaagtaggcagagagagagagaagcaggctccctgcctggcagggagcctgatgcagggctgcatcccaggaccctgggatccagacctgagccaaggcagaagctaacccactgacccacccaggcgccccctaggcaccccattcttgctctatctgcccactccctcctgcctcagctcggcaaaccgccttgcaccgtgcaataagcagcgcttgcagtgggaagctgtctctccggcccagtgcagccccaccacttggcggccacagactcagggcatccgcacgagccatggaaaggggctggcaaggaaggcccacgcgctagagcgctagagcgctagagcctttgttgctctgcggggtgccacagttccagaagcgggcacgggcggggcttgaccggtagtttctgaaacagggttaaccaccaagacggcagtgtctacctagcaggacacagatctgggaggagaagagaaaaagagttccttcttttggggggcttctgagcccctcaaccccatccccatacaagttcctcaaggtagcaaggagtccgactctgtccgaagccccgtccccaacagagggttgcgcttgtttgctcgaaacccctcgggagctagaagcggtggagaccgcagctctaatcgcagcggaaccgcctcgctttaccaatcaggaaactaagccccgattgggcgagggggctcgcagcgcgagtcccgccagacccaggccctcagcggcccgcgttcctcccacctcccctccccagctacctgtcgccgaagtgaagagcgcaggctcgggctgaggctcggactgcggtctcaggaggcaggagaggctgaagatcgggctgagcacactggccatgagccacgccccgtccagggcccgcgggcagctccgccccggggtcaggccacgggcccacctcgccgaggcgggcagcgggatgaagcggctgagctcgcagtgtggcgggggggcgtccgaggggtacctcctgacggcggcctggagggttcccgcggggtctgtgcgcggagaagggagtcggtgccgccgttcccgccggcaacgggcggggagggcaggtcccgggaattccaaacgcacaaactgcccggtagcgagagtttagaggcaatctgacctcactttacaggggaaactgaggcccgaggtcacagcgcgacctcaagggcagggacagagcggagggcgagtccggaacgactcaccgtgcactttgaggtagagctcgggttcgaggtccggccgcgggggtggagtgcccgggccctggcgcagcagcagggccgcgggtttcttggccaggcggcccccgcccgcatcctccaccatccagcactctatcaccgccgggcccgccgagacggccgtccccaaggctgcggagaggggcgcgggtgagggggcgccccacgccctgggtccgaggctggcgcgcggtgggctcacctccctccgcccacccctggctctcgggcaaagggtttcggggttcgctcacccgacgccacggcgaggagcagagataggggcttcatggcgccgcgatcagctcagccccggagcttccacttcccccttcactttcgctttccttgaaagggcggggagaggcggagaaatacccgctccggtccggtgagggcacgtgggcggcagggctccccaaaccttatctcccgctcgagaccggagacctcagccccgccccgccctcttgggccacaagacaccacccagtccaagagccctccccaaccctaggctccccctccgtccccaccaccccaccaatccacttcccggagtacggagactccgccttcccccacctgcgccgggtccccagcaaacacagaggggctttcggtaagccgagtgaaatgaccaataaatattttaatcaccatttaaaaaaaataagatttaaaataaaaaccttatattcttacgtcttcactccctcctcaatgagaatccagttggggtgggggggggcccaaggaggaatcggagggatgagggtagaaatatagggcacgtccttagggaagtggggtaggtgctaggacaaaggcctggtccccacaacaacacaaacacaaacttcaggtacagactacaaccacctgacccttgaccctgtgactccaggatgctccatggtccccctttccctcccccccaccatatgcgtcctagtctggagctggggcttcagtgtacccatctgaggggaaggaaggacttagttccggggatacttcgtgggagaggggctgaggaatggaatggagtggctaatggtgcaatatggttccccctccagaatatatacaagtctgtagagataaggaagacattaagtgaggcgggagatcacctgagggccacggcggcctggctcagcctccgtttcctcaaaccggaaagctacctccagagctgccccttcagtttgttcctccacctccaccaaagcccatctccaccttgtggacgctgggtggggaccagaccctgcggctggactggggcgtggccccacttgcctcgtcaccgctgcccccgcccgctccaggggactctctcttgaggggcaaggttggcccggtgggccccccgggtcctggcccgcccccgcccccgcccccaaccaggcggtgccttcgctcacagtgtccccggtggcgcatgaagctgtctcgccacatgaacttcttggcgcagacaccacactcgtagggtttgaggcctgtgtgtgtcttcatgtgctccgttaggtggtgcttcatcttaaactttttgttgcacacggggcagtcaaagggccgcaggttgaggtgcatgttcacgtgccgatcacgcatgctcttgtgtgagaacgccttcccacagtggcacaaaaagatcttattcccatccccactgcctgtccctccgggggttcccccaggaccaccaggcatgcccagggcccctgacgacgtgccccccagggtcaccgccccgtgttcagcctggttccctggtggctggcctggagcctgtgaggaagaggaagaggaagaggaggacgaagatgatgggaaaaccaggatctggttgccctgcatgtccaggggaagcaagggccttggagggtgggagggggcataggaggaaggggttggcccccctgaatcatcaagccctgctccaggacccccaccgtcataggagccaaagtcattggaagactcacagaaattgacctgctcctctcccttgtccggaggctcagtcagggtgcggacatcacttatgcttagggtggcctcccgtcctcccgcctcgggaaccctggagccaccccccagctcttcatcttcatcatcctcacaggtcaacaccaggtcttcctcctcatcctcttccagatctgggtcttggggaaccaggggtgctggtgctgggctatttccaccccgcttcacatatacccagtgtttctgtggcatgatgctggggggtgcgtaggtgggccgccggagcccagccccaggaaccacaggacccctctcgtccccgccgtcatggcacagctcatctgcctccagcagcagcttcccagaggtagcccccccactgccaaccacaggggctgggaatacagggccacctcctcgacgctccccgctgcccaccgcagaagctggaaatgcctcttgggaggaagatgagaaatcagtggactctcgggggctgaagtagttgctgctgctgggggactgattctcactggcccgaatggaggcatgggagcgcacggagcccacggtggcagggaccacagtggccccactccccgatgggaccccagcaccaggaacagtgtcagaggtggctgcagcaggggtgatggtggtggtagtggctgaggcccggccttcgcggaggagttcagtgcacttatccacgatgtgccacatttggagcaccgaccccactgtgagaaagttgacaatgtcagcagcagccatgctgagacggccagtgtaagccgaagccaggacagtctcgaaggcgcctgggtccatgacgctgggcagcgagatggaggtcatgcccttgagtaaaacctggtcgtggaagtaaggggaggaggcagccaggacagcacgatgagccctgaactctcggccctgcacacggatggacacgtcgcagagctggccctgtagccgctgctgattgagggactccagaagggcactggttacctcaggaaaggacacgtgcaccactgcagctgcaggcaggggcagtgggggcggagccagtgacagaggcagggggagtgctgccccactgggagagagaggagatggctccatggcgtggagggaggggttacccccccagccacaggaacaagggaaggaaaagggcggccgggggggtctctgggaagaaaaagaaagaagaaggataacattccataatgacacagcccttcactttacagtttaaaaacatgttcgtaccctttatctgagtagttccccacaacaccctaaagtaggcattcctctcaaccctatttgacagatgagcaaaccgaggctcagattacgagattatccaagatcacacagccagtaactggcagtgccagcaaacgcagatgtcctgattccaaatgcagtgctccttccttggatattaagagaagtaaggtactcttggggagtggggcgcctctcctcagaactccccatttgcctgagcgcctgactttcccaaatctaccttactggtgttttgcacccttttcttgggagggggcaagtctgttcctgtactaagaacatccctccctccggatctatgccccccagctctttcgcgagccaaagcccccctttgccccccggcttacctctagccccgccccttcaagacacgccccgtgggctttcggccccgcctcttcaagacccacccccgtggccctctcggccccgccccttgtctacccccgcccacgctggaccccgcccccctctgctccgccccaagcgctacttcgacctcctctcccacccggaaggcgcccccaaccccgcgcgtccccgcttaccgggccgcgcgcccccgggcccccccgcccctcactcggcggccagagccgcagcctgggcccctcccgccgccatcttgcgccgactccctccgccctccgcctccgctccgcctcccgcccctccgactttaaaggtacaggcgggcacccctgcccgtgccactaggcaatactcggccgactcgtccacttctcctttaaagaacagccgcctcattccaccttaaaggtaccaggcctcttctgccgctgaagaactcaggacttggtggttcggccgaagcactcattcccctttaattctgtaagcctgcccttcccattggcgaagggtctcggccgtcgctgcttaggccccgcccctgagctgtggcctttagtgggcttgcgggatctaatcgccctgctgtcccagcttctgacagtcccccctgaagtcccgcccccttcctccgggcacggattggccaaaataaccttgagtcggcccctgattggcctttttactcctaccgctcgaagtgagaaaagtaaagcgagtttgggaggctgcagcaagttgattttttttttttttttaagtgcctggccgagggctaggggaaggtctgagggcgagggaactccgggaggcgagctaaagacaggctacaaaggacagctccaaggggtagcccaggaccaaggttaaccctgagccagagaacgactggtgccgagcggtgaacgtagaaggacaaggaaaaagacagggatacaataagaaaagaactttattgtttattaatgtttctgtgtaaaacttaagtttttgttggttttttgtttttgttttttaaagaaacaccaccaaaaaggggattagctcagtcaatcccttcctcagtcatcagcttcccaccatcctccaaatactatcccaaaacactttggaggctgggagtgggaggagaggcagctaatcagagtctgagagcacgatgatctcctctggatcgcactgtgtggccacactcatctgcaggggagtgagagacagagtcagaaagcagcgtccggaatatacggagaggaggagcagaggaaaggacttatccgagattaaaaattggggtgagaaaaaaaggaagagagaggatgtggtgtgtgcaatattcagatgaaaatcctgaaactgaacagacaatgaaagagaattaagtcagggaaaaactgcctccccctcttaccttgtaggtaccaggtctggagggctgtgaatgaggggtttgggacaaccgggcttgagatgcgctacagagggagctggtcaccaggccatggctaggagaatccaccctcgttgaggaatccgcaactggggccatggaagtcaagggagaaggtgggctgggcagagtaggtatcttccttccattcttttcatgcactgacctttgcctttccacatagctagggacagaaatgcaaatatgtagggaggtatggagagcctgaggctagagggggagtgtccagtttctcccagcagacccagttcctcaatattcctctcagaaagccccctgtaatgtctccttggcctccctattcttcctccttgttgttgttacctgtttcctaatggctctgctccagtttccttctccttccgagacttcttgcaggggggacaggaatctccccaggtgtgaggagacacccctccattgaaggaagtggaggtgaccatggctgctccattctccaagacagtggtgagaggttcctctgactgcttcctggaagaggaaatgtccctctcctcaggggaaggggtagtatccaggggcaaggcttcgatctctagctcaaagagctgagatatagggctctcttcctccaggagtaactcctcaaggttttctccattgctttcagcatctatgctggagggggccaagggctcttctgatgatggtgacaccgtgaattctttgttttgctgctcccccatagacctgctgatccctttgctaggttccagattcttttcagtggagatccgtggtggggacatagggctcttgtctccatcctgacctggaaaagaagaaaagaggggagagggagcatgagaacttggggaaagaatactgctgagagtaagaggaagaagggaagggtctcaaacaggtggttcacatccaacagaatggagggaactgacacaaaaaggaactgttcttgacatacctgcctcctcctcctcctcctcttcatcgtccccctgaccttcttgcatctgttcgagatcctcctcttcttcagaatctgtggcctcctcttcttcttcctcttcttcctcctcctcttcctcttcactttcctcatcttcttcatcatctgtctcaggcttggaggtggtagggcactcctgggatgccattccactagggccctggggggacaaaggagtttctgtaaggaatcccttgccccagaggatctggttctcgtgttccttccacactcttccccctcaatgaccctgaaatccttgttggccagtgcaaggaaaggacaaggtctgtctgaagggtttatcccttccatacctcaccagaatccaaggaggctttgagggggtctgtagagtgggaagaggtagcttggggaagccgagctctcctcttctgcctctcaccctcctcactcttgtcttgcatcattgcatatttggagatgacctcatccagccggctcatagccaagctccggttttctcgcaggcgccgggctagggcaggatctgacagtgcagggtcaatgcctacatgagaagatataaagtcagagtactcagcccaaaccctagaagaagggactagagagatgctccctccaccaaacatctgacatacaagggttaccagtaggcatctcactaatccctacctggcctgtagtcatctgtgaggtgacagccaaagttgtagatgagatcaaggtgacgtcgctcctgtaacctgatgcccacgtctcggaaggcatcctgagccatgagctggagctgctgtcggggaagaccaaggctgtgccgagcagctgccttctccacagcccgcagtacatctccatagtcagggaaggtatctggccctggtttgttgatgagccgctcaatgcgcctgttaacctctgggtagcgggtgccacgatagggaatgcgctgctctatgacacggcccgtcagggaagagcagtctttgagctcacaaagccgcccaaagaggcggatcagcttacgcttcaaccttgcctcctgcaggtatgtggagtctgggtcgtccaattctgagagatccaactctttttcctgcagccgccggatctctgccacatagagcgctagcagctgctccaagcgctggatctgccgccgggaaccacgggtccttggtgcctcagaggcagtggtctcggcatttgtggggtccgaggaggggtctgtgggagggttattcccagagggttcactagaggtggcagcaggggccaggttcagcttcttcttggctgaatgggccttgagaacagtgcagagctcattaatgtagacatagagcttagctggccggctctgggcccgggataggacccgagagaggatgttgcagaactccgccgaagccaaaaacagagagtgggcacgctgctgccggttatagaggaatgggaccacctcagggtggtctgctgtctgcatcttacagagttcaaggaactggaggtttcaggagaagaagggaggggggaagagacaaggggaggggttgagagaaagaaggcaaggcgggattagtggggaagaaaggactacagagccagtcagccatccccctccctggggcacaagaatcttctcccctaaagctcacctcttcaaacagcttctcattctccaacttgtagcatttcttgccgccagaactactgcttcctccagccccatggggctgggaggagccaggggcttctgcctggggtgaggccggattggggggtgggtgggagggccctggctgagcagctgcttcatcttcgtcatcatcatccagcacgatgatgctgttagcggtggccatgggggatcaaatcccccggaggaaggaagtgttggggatttcggaattcctgctggaaggggatggggcctcagaaagagcccctccagcatagcccctcccttcatctcacacattttccaatcttcttgggtttcagtaacacccagccctgctcaacagtgtcctcactgcctaacttcagcaaccactagtaccagacacttttctgacctttcactacctgaaaccacctgaaaaccttaagtccccacccccagctctaccccttctgtcgagatccagtttccccactatctctcatacttgccaagttgacttttccaatctctcgaccacctcctgcacgtgtgcactctggatttcctcgacattccctcgcacagataccacatccccgtcagcaccacctcaccagccttccccctttcgctctcaaacacgtcaaatccacaccctcatcccatcctgaaggatcacccccaactcctagactctcagaggcgaaggaggttctctcccaacaatccactcccgtttcccctcctgggattattctcacattccaccctctgacgggtctcctcaaaccgggacgttaggttggagagatctcacctcaagtcccctccctctcaccccacccgaattcccccattctctctctgtgacctgtaaccgattgtgagcccagtactgagctctccggattcctctcagatcccaaccccgcatccgaccccttcccccgaatgagcttcccgccaagtccccctcccccagttcagcccccggccgccccgttccccttcagggatggaaggaaggtaccacagctgcacctcagactcagcgcctgggactccccagtacctctccgtcgacattcccgcccctgccttcgctccccgcacggtccggcccccacctcagaaacggtctctcgaggcgaccctcgctgctgatctcagaacctcgcagggttccctccgccttccttcccccacccaccgcaggcccttctctggaccggaagtcgcggagtttccgcctacggacacctagacgcggccatattttcgtacggcgcccggcccccctgaggcaggaagtggcggtaggcccgcccccccgcccagtgccgcccacagagtatgccgctctctttcctatgaccagtagagggcgggcttgtccccgcaggacgtcccaaagtacctgggggccgccatcttgccgtacggtactggctacgcccgaactcgggggcgccaccgacggagctcttttcgcccggtgcttctgcgactccaccaatcagaaacttcctgcatccagcccaaccgccggcgggtcgcgtgctggaaggactgagccacctttccaagtaggggaggggaggacggaacaggacagctaaggaattgggccctccaagactgtgcaggggtgcataggagagcgagaatctcctaagagggaaaaaaaccctcttccttccgctgggccattgaccagccttccggcgccgctttcctacctgccaggtaccctttccgcggcttcatctactgcgcctgccctttcctttctgcaggctgcgcgctccccagccgctgtccagcagctacttctacttccccgtgcccacacctcccaatagtgaaatcataacacatgcatacaaacgagcacaattcgctacacaaatttgttattattattattactattgttattgacttcgttttaagcgcctccaaggaactaatgacccacccagcaggtgagacctaggtggttctccgttcctttctggtggggtgcccgaggtgcatgcagtgatgacctggaggccgtgccttgtccaggagctccagggccataggaccgcgatgtggggcgggggctttgaggagaatctgtgcaaattgccgctgttggatgaaatgagacttgtaaaataccttgagtctccactggtctcttcctcttcctctgggagagctgagaaaagaacggggagacaagaaactgactgacgccccctcgcccacacccgcacctcacccaactttaaagaggccggaaggactcgtggaggccacgttgggtccaaatacgagcttatggggaagtcacaccggttaacacggagattctcctcccctgcgtcacattccacaagtggtgagtatcttgccactttctaggaccacagagtaccagaacctcaaaccctcactgccattaaagaatcccacaccatatgtaagcctacagtcttcaaattagggaatacgaaaactccccaaaagggtacgcagacttaggagacataggaatttaatttacagattctcgactttcccaaaattgatctgagtaaatgcctgcaagtaaaggttttctttcttccggttcccttttataatagacttgctccctcttaaaaaaaaaaaaaaaatgcatgcaagcatacctccttttattgtgcttcacagatatgtgttttttacaaattgaagatttgcatcaagcaaatctatcagtactattttttccttttttcaagattttctttatttattcatgagagacacagagagagctgagacaggcagagggagaagcaagctccctttggggagctcaatgcgggactcagggtcaccacctgagccaaaggcagatgctcagccactgaggcgcccctaaagattttatttttaagtaatctctatacccaacatgggactcaaacttacaacccccaagatcgagagtcgcatgctctatcaactaagccagccaggcgcccttattggcatcctatttctagcagcatttgttcattttgtatgtctgtgtcacattttggtaagtattgcaatatttcaaacttcttcattacttttatatttgttaccgtgatctgtgatcagtggctttttggtgttactatagtcttagtttagggggaccacaaaaatgacacctatataagacagcgaacttaataaatactgtgtgttctgactgctccactgaccagctgtttccccatccctctccctctcgtcagctttccctattctttaagacattgacatattgaaattaggccaattaataaccctacaaagacctttaagtgttcaagtgaaaggaagagtcacctgtctctcactttaaatcaaaatctggaaatgagggatccctgggtggcgcagcggtttggcgcctgcctttggcccagggcgtgatcctggagacccgggatcgaatcccacatcggactcccggtgcatggagcctgcttctccctctgcctgtgtctctgcctctctctctctctctgtgactatcataaataaataaaaatttaaaaaaaattaaaaaaaaaatctggaaatgattaagcttggtgaggaaggcatgttgaaagcatgagataggctgaaagctaggcctcttgtgccaaaagtcaggatgtgagtgcgaaggaaaagttcttgaaggaaattaaaagtgcctctctggtgagcacatgaatgataagaaagaaaaacagccttattactgatatgggggaagcctgaatggtctggatagaagtcaaaccagcgacaacactcccttaagctacaacctgactctcagaggtcctaaggctaagagaggtgaggacgcttcagaagaaaagtttgaggcttgcagggttggttcatgaggtataaagaaagaagccatctttgtaacataaaagtgcaagatgaagcagcgggcactgatgtagaatatgtagcaagttatctagaagatctagccgaaataagtaatgaaagtggctacactaaacaacagattttcagtgtagatgaaacagtctcatattggaagaaggtactatctaggacttcaatagctagagagaagtcagtgccctggcttcaaagctccaaatgacaggctgactcttgttaagggctaatgcagctggtgacattaaattgaagccattgctcctttgccattccaaaaatcctagaggcctgaagaattatgctaaatcttctctgcctgtgctctataaatgaaacaccaaaacctggatgacagcacatctcttaacagcctggtttattgttaatgcctactgctcaaaaacaaagactcctttctgttagtgcttattaaaaatgcacctggtcatccaagggctctgataaaaatgtacaatgagattaatgttttcatgcttgctaacacagcacccattctgcagaccatggatcaaggaataattctgactttcaagggttattatttaagaaatacattccataaggctatcattggcatacataataattcttctaatggatctgggtgaggtaaattgaaaaccttcatgaaaggattcatcagtgtagatgccattaagaacattcatgatttatgggaagaggccaaaatatcaacattaataagagttttgagagagttgatttcaaccttcatggttgactttgaggggttcaagacgtcagtgatgtcagtgggggaagtaactccagatatggtagaaatagttagagaactagaatcagaagtgcagcctcaagatgggactgaattggctgtaatcttaagataaaacttcaagagatgaggagctgcttcttgtggatgagcaaagagagtgttttcttgagatgagatctactcctgatgaagatgctaagattattgaaatgacaacagaagacttagaatattacataaagttagcttataaggcagcagcagggtctgagaggattgactctaattttgaaagttcttctgtgggtaaagtcctatcaaacagcatcacatgctacagaaaaaataatttgtgaaaggagtagtcaattgatgtggcaaattgcattgttgtcttattttaagaaattgacacagccttcagcaaccactaccctgttcggtcagcagccaaaagcatctaggaaagacttttcaccagcaaaaagattaaaactccccaaacactcaaacgatgtttggcatcttttagcaataaagtttttttggttttttgttttgttttgttttgtttttgagagagagtgcatgcatgcgcatggggagggaaagagagggagagaatgccaagcaggctccacacccagtgcagagcccaatgcagggctccatctcatgaccctgagatcaaaacctgaacagaaatcaagagtcaaatgcttaactaactgagccacccagttgccccataataaagtatttttcaattaagatatgtatattgggttttttttgacataatgctatcacacacttaatagactacactatagtgtaaacatgacttttatatgtacggggaaatcaaaaatgttcctttgacttgttttattgcgatattcactttattgtggtcatctggaatcaaacatgcaaatttccaaaatatgcctgtaaatcatgaaatcttaccttgtcttaaatacagaaacatatagtggggcacctgggtggctcagtcggttaagcatctgactcttggtttcggctcaggtcatgaactcaggaccctgcgaccaagccctgcgtcgggctccctactcagcggggaatctgtttctccctctcccttttcccctccccgcagattatgctttctttctcactgtctctcaaataaatacatagaacctttaaaaaaatagcctatttctttcatcaaggtaccataagcaccacctttcctatctcattaaaaatgtacttctagggatccctgggcggcgcagcggtttagcgcctgcctttggcccagggcgcgatcctggagacccgggatcgagtcccacgtcgggcttctggtgcgtggagcccgcttctccctctgcctgtgtctctgcctctctctctctctgtgactatcataaatttaaaaaaaaaattaaaaaagtacttctaattttttaaaaagattttatttatttatttatgagagacacagaggcagagacacagcagagggagaagcaggctccctgcagggagcccaatgcggaactcatcccaggaccctgggatcataacaggaaccaaaggcagacactcaaccactgagccacccaggtgctcctaatttttaattattttaaaaatgtgtgcaatctttatgccatttaatcagttctgtccttataataattgtgatatggagaagttctaaaaaaaaaactgctgtccgtggtcacaagaaaggaaaatactttgcatttcagttaatatatatatatgtatatgcagggaagtatgatagattggtcaataaaagactttcacatataaaagcctaaaattgtctgtagggaagtggactgataataggtgtttgaggagaaaagattcatgaaagaaggaaaggaataatcccaattgttaagagcttgtttatctttaaaaaaaaaatgggtagtggtgactatccggtcactttgatattaccattcccctggacatttaaagggtaatatgttttatttttaaatgtaaatgttttgggggtgcctggctggctcagttggttaagtggctgccttccgctcgggtcatgatcccaaggtcctgggatcaagtcccacattgggctccctactcagtggggagcctgcttctccctctctctctgccgcacccccccacttgtgctttctctctctctgtcaaataaataaaatatttttaaaaagtgaatgtttttaatatgccagaaattacatccttgaaacaattttaatttatgatgaagatttttagatggctccttaaaaatatgcaagaagtacaaactttttcaaaattattttccagagtataggtgcaaaaaaatttaagacagctgttctaagctatccaagtgtcccctgcacagcccccagcagtcccatttccctcttgcctcccctctcacctctgtagcaggggaagagaatatttataggaaaggtggtcacaattccagctcctcctccttctgaggtgttctcaggagccagtccccaaactttgtccatggtagcagccacagcagcttacaaacagcctccagtgtcagtagtgtcaggatgagaaacaggaagacaaggaaggctttgtccaaggccctacggaagggactccttggaggacagggaccctgggcaaatgccaggaacacatcctcctcgtccacatcaccttcctcctcagccatactaactcatagtctgagagctgacaggatcagggaagactgggatggaagcccttgctcagcaaattgaggattaaggggcatggccacagcaagtcttacacctgctgagcctgaccctaattcccccaccaaagagagagaaaggagagagaagcctctgagcctttgaaatcatcatatgatcatccagtgcaatgtgaatggtccagactaaatgatacataaaggctgtccacctttactgtaactgtgacctgtcaactgaaggcccagctgagagctatgcaagctggtccagtcatgtcaggtccctaggctcagggcccagcgtcttgggcccctactgacaaagggtgaacaagaggagctagtatgagccggtaagccgctgtcagcccattccagctgtccaatgggaggtgagaaaaggcctaggggaactgaagcgggggtgcaagagcagcagcaggctccagcctgcacaggcctacctctccctaagtctgcagacccgttgaaacccaatgcactctcctcctcatttctgggccatgctgtccagaggacaactataattggagggcaggggcccaagggaacgtctgtaaaaagagaaagatagtgactggtcagcagagccggagagtaattaggacttaagtgttggggcaataatgagagcaggagttctgaggaagagttgctgactgggagtgtcatccaggagattgtcactggggcaagggttgaaggccatttcttgtccctgttgcccaggcactggccggaaagtccataacagaagtggaagcccagtggagacctgaggattcccccacccctgcgataagtggggcagggggtaggtagggcagccagcagaggaagcagtgtgtggtggtggacctcatacccggagcctttagggtctcttacttaccttaataggaagaccttgttcaccaccgaaaggtacaaatgatatcacaattttatgtagagtcaacttatgttattatttgctgttgccccaagagggctgtgttaagagtcaaaaaacctggatgggttcaaacaaattacttttgaggtatgttaaatttttgtttagtatatgtactggccaagtgaggacttatgttaaattaattcaacaaggaagccattagactgaggtggcactaatggcatggtggcctatattagcaaatcaaaacctaagcttgtaaattcctcaaggataggaaaccaaaacactgaggacagtcacagccatctaggcttttttttcttttttcaagattttatttatttatttttgagagacacagagagagacagagacataggcagagggagaagcaggttcctttcagggagcccaatgtgggggtcaatcccaggaccctgagatcacaaccccaggaacacacccggagcagaaggcagacgctcaaccattgagccacccaggtgatctgccatctaggctttaagctatatagccagtcaagtaattgcctttcttttcttctgtactttatctatataagtctgtccccatgctctgtctacagagcatgcctaagcacttctgatctgctgctgccccattcaaatttaaaaattcaaattttttaatttaaaaaaaaatatttacttatttgacagacagagaacacaagcagggggaggtgcagacagagagggagaagcaggctccctgctgagcagggagctccatagggctcaatccaggaccctggaatatgacctgagctgaagacagatgcttaaccaactgagccaccaaggtgcccctagttttttaaataaaattaataaatctctctcctcacagaattgttataaggagaaaatgacgtcagtttttttttttttaagattttatttatttatttattcatgagagacacagagagagaggcagagatacaggcagaggaagaagcaggctccatgcaggaagcctgatgtgggacttgatcccgggtctccaggatcatgccctgggctgaaggaggcgccaaaccgctgagccaccagagctgcccatgtaaggagttttttgtttgtttttactttttgtaaattgtgaagtgctatattaatatattaatttctgataccctcacttacatttcaggcaagtttacaataatgctacacaaacacctttatctttccttccacatggtaggttcagcaccaatgtcttgtatgatatataaacctagcacttcataggatttttttttaattttgaaataatttcaagtttacagaaaacatttaagaatggtttcaagaactctagtatgcaggggtgcatgggtggctcagtcagttaagtgttcgactcttgattgtggctcaggtcatgatctcagggtcatgtgattgagccccacaccagtctctgcatctcctggcacccctctcccccccacacactcacaggtgttctctctctctccaaaaaaaaaaaaaaaaatactggtatccttttcatcctacttccccacttgtctacatttgggtaaatttactcatttctctcaaccccaatataaccatctgttatgggttgcattttgacacacaaaatttgtatagtaaagtcttaaccctcagtatcttagaatgggaccttatttggaaatagggtgataatagatgtaattggataaattaacatgagtcatactgcaggagggtatatacctaatccaaagtgactaatgtcattatgaaaagaggaaatttggacacagacctgaatataatgagaacaccacgtgtgcatgaaggtagagagagggttgatgtgtctgcaagaccaggaatgccaaagcttgccagcaaaccaccagaagcttggtggagactcattggattagacttctctctcacattattgtttagaaagaaccaaccctgccaacaccatgatttcagacttccagcctttagaaccatgaggcagggatgctggatggctcagcagttgagcttctgcctttagctcaggccgtggaacctgggtctgggattgagtcccacatcaggctccttgcagggagcctgcctctccctctgcctatgtctctgcctctctctgtgtgtctctcatgaataaataaataaataaataaataaataaataaataaataataaaatctttaaaaaaacccatgaggcaataaatttctattgtttaagccactaagtttgtagtacttcattactaccctagtttgccctagcaaactaatacactattctaaataggaaatcagcaccactgttcaaatcctggataccattcaaatttcaccagctgtctcaataatatatctaataatataattctggccttttgggtccagaattacatattgcatctggttgtcacatatctacagtctcctttaatctgggcagatcctttatctgccttggctttccagaatcagttttaaagatcacaggctttgggtgcctggatgtggtttcagctcaggtcatgatctcagaatcatgagactgagcttcacattgaggtcagggctcagcatgaagtcgcttgagattctttcccctccctctccctttgcttctccatctgcccccctatctctctctctctctctctctctctctctctctctctctctcctctctccccccctatataataaataaataaaatcctttttaaaaaccccaaaactggggcagcccgggtggctcagcggtttagcgccgcctgcagcccacggcgtgatcctggagatccgggatcgagtcccacatcgggctctctgcatggtgcctctctctctctctgaataaattaaaaaaaaaattaaaaacaaaacaaaacaaaactgggatccctggatggctcagtgatttagagcctgccttcagcccagggtgtgatcctggatacccggaatcgggtcccgcgtcgggctcccggcatggagtctgcttctctcactgcctgtgtctgcctctctctcattctctctctctctctccccccccccgactctctctctctctctctctctctctctctgtctgtctctcatgaataaataaataaaatctttaaaataaaataaaaacccccaaactaaagagcacagggttttcatttctgcaaggtgtctctcaacccaggtgccacataagagcaagagaaatatgatgttgtgtcttttcagtgcaccagtgaattacatcaagaaatgcaagaaggagggatctctgtgtggtgcagcggtttggcgcctgccttttggcccagggcgcgatcctgtagacccgggatcgaatcccacatcgggctcccggttcatggagcctgcttctccctctgcctgtgtctctgcctctctctctctctctctctctctctctctttctctctctctctgtgtgactatcataaataataaacaaaaattaaaaaaaaattaaaaaaaaagaaatgcaggaagtgaatgcacctcactcctgtactaccaacccagtttagcaggtttctccttcataaagtcatcacttgtctgtctataattcctaagaatctgctacatcatcagatctctatctatttgccttagcatccattgataacccccattggaataatctccatgataatacttattaaatacttatttttaactccatcatttcctcttcagcttttagtcaacaatctactatgaaagagagcattcccttctccctcatttattcatttataatggattcctatcttactcaaatgaactaaaatccattactctcatatttattgtctggactgtggatttctattttacttaatgaattataatcagttactatcattattattttgatgtgcaaattatcccaaatttagctaatgaaatagcctttcaagctggatcctgtgtccttttgaaattttctcaacattatttgagtgcttccttactttctcgacaagaggttatccatgctctcaatctgtacttttgctgcttcagcccaagaatcagctatgtctttttctggcttcttcgaataagatggtacttggaaacccaaatctgggtggtggacgtcattattgctacagggatgccattgtttctaagcccttctgtaaaccaagctaggaaatatgtgaacatacacacacacacacacacacacacacacacactattccagttactactgctgcctaacatacccaaaacttagtggtataaaataaccattttataatgcttgtggaatgatgtcaggaattcaggaaggacacagtaagacagcttatctttgctcagtgatgtctatagagatcctcagctgggaagaccttaaggctgggggtaacttaactgctgaggtggaatcatgtggaggcatcttctgacagttcatgctagctgtcagctggatctctgctggagctcttggctggaacacccataggagtcctctccacagagcctgggcttcttcacaacatactaactttggggtagttagaattcttatatggccctcatggctccaaaaacaagtgttgcaatgaaaagggcagaagatgcatcaccttttagatctagcctcagaaagtgtacagcatgacttcattgcatcttatgcattacacgagagtcataaacctgttcatatttatagggaggagatacagatctcataaatccacctcttgatggaaacagtggagagagttcaagagagagaatggtaggtgagtaagaggagaacaagagcacagccagctctttcaaagaatgttgccctaaagggaagtagagaaatgcaggagatatataggagatatgggatcatgaggaaggatttttttaatgggtatattctggtatttttatctgcttataggaatgactaagtagggagggaggaaacaagggagtaaagtggtaattataggagtggtaatattcctgtccctggattttcttttcttttcttttcttttcttttcttttcttttcttttgttttcttttgttttcttttgttttcttttcttttctttcttttctttctttctttctttctttctttctttctttcttctttctttccttctttttcttatttctttctttctttccttctttctttctttctttttttctttcttctttcttttcttaagattttatttatttattcatgagacacagagacaaaggcagagacataggcagtgggagaagcagactccctgcagaaagcctgattcgggacttgatcccaggaccccagggtcacagcctgagccaaaggcagatgctcaaccactgagccactcaggtccctggtaggggtggtgtcctttagtgagagggctcagggttcagtgtgtaaatagaggagttggccttagaaagacacatttgtagtgcctggagggaagacagagtctaatggcagaaatgtagtgagtgagggagatgtagtgggaggtggagaaagttttcttctgttgcttctagtgaactaggaaataacataatcagttgggcaccaggggatagattcaccagggagagaaaagaaggtgtagacatttgcagggtcccagtgcaagagtaaaaatggaggcctacatatcataggtctaaatttttttaaagtcactaatcaggctaatggactgctaagtatgttctttactcataccttgacaaatgtaccttcattacaaaataaaaaaaatatgtaaaacaacacaattagaagaacaaaaaatgactacatttaattattatcacatgtccctaagtattctattggtggatcagatatagttggatgagtaataaagatatgcattatttacaaattaattatatatatattgttttaaatttatttatttatttatttatttatttatttatttatttgagagagagatggggggcgttaggggaggggcagaggggaagaaagagagaatctcaagcagactccccactgagtgcagatctcagtgcggggcttgatcttacaaccctgagatcatgacccaagctgaaaccaagagtcagacactcaattgactgagccaaccaggtacccctaaaatatatatgttataaaatgaattatatttatctttactttagcaaagtcactatgttattatagtcaagattttcacataatctgtgttctattgatggtaatgggctgaatttaaaagttaaatgcaaccatattcaaactttacagtatttgaatacatttgcatacagatgtataatgaagttaatgtcagattaaaattttgctcatgctttcaaatattatttttctaatgtttaaatcagctatccaaactaaagtataaaatcctggtgctggcacaaaaatgacacatagatcaatggaacagaatagaaaacccagaaataggagcacctgaatggcttggtcagtctgccttctgctggggttgggcttcctgctcaacagagagtctgcttctccctctccccacctcccaccccacttaattgtaccaagagcagtattactctttttgaagatctcatgtgccagtaattttatttttttaaagatgtatttattttagcccacacaagtgggtagagaggcagagggagaagaagagagtcctctccccagctgaggggaaagcctgacccagggctcatcccaggaccctgaaatcatgaccttagccaaaatcaaaggctggatgtttaaccagctgacccatccagaatgcgcataattttaaagggccacaatatactcagattttgctggtaagaatttctggattgcatgataaatctttccactgtttgtggggcctgaaaggaatattatcttccactgtatggctctggcttcttgatatcagttaggtgatatttttaagtcactgattttacctagatcatcttgacattccaacacaggagatacttgtttctcacatcctcagaaaactggaaataaatcatccacaggaactgcattgaagcaaacaacattcaaaataatgtgaatatccacatcgagggaaggagactgcatgatataatttctaaagcttatgagaacttggtggaggagattagcattgagtccataatcaacatccagtttccgactttctttaccattacaaaacttgtctaagaccttcctttatttcattcttgtccagagggcaggttagctcagccctgactctgctatctgcactggaccgtgaggtttcaaagtcagctgcatgaacagagacttgttctgggctttggggccttctgagacagaggagagtcagaggcaactgcacacattccccagaaccccatgaaggggttcaacttgggcacgaagggcaaaaaagttggctgctcagtggccagcccagcacaccaatgaagccgagcccacacagtgggggaaggacatcaaggagaatggctggagcagcctgggacttagcctggaaagtcacttctaagatcaagttataaaagacacgactttcatcttgctggcactctattgctggctttgatgaagtaagctgccgtgttggagaggcccacatggcaaaagattgagggtagcctctggacaatagccaataagaaactgatggcctgagtccaacaacctttaaggaactaaatcttgccaataactgttggagtgagcttaaaaacaggtcctttcctagatgagccttcagaatgtgcaggagctcaagccagaagcccttcttgtgtgggtataaaaacagtgctaggattagtccatcagacctcaagttttttgcttgcatgtttcctaaacacactttggaaaactatgtgaccttttcatatctttttcactttagagctaattgtttttcttgtgaatttaaataactacaaagggtataaaattctgatgtcttataaatgttgaaattttaacataaaactttatatattcttttaataatatcttttaaatgtatccaatagaatttaaatgccatcattgtttgatattcaacaatcacctttttttttaaagattttatttatttatttgagagagaaagagaaaaagagagagcatgagcaggggagcatgggactagtgactctggtatcatgacccaagcagaaggcagacacttaatccattgagccccccatctacccccaacatctcccttttaaaagagatatgagggacacctgggtggctcagtggttgagtgtctgcctttggctcagggtgtaatcccagggtttggggatcgagttccacattgagttccctgagaggagcccacttctccctctgcctatgtctctgcctctttctctgtgtctctcatgaataaataaacaaactttttaaaaaataaaaatgaaagagatatgaatgggggtgtgtggctgattcagcaggttgagcatgtggctcttgacctcagggtcatgagttcaagtcccactttgggcatggaacctacttaaaaaacctactgacttgccaagtaaagggtattaaagcataccctttaatgctcccctgctattttttttttaaaagatacgaatgaacccttcttccacagttagagatcttacgttagttttctccttgaattcctatttcattcacttccactacagaattttatcttattttaatggacgtgatatttgaaagtcttgtgatgatctccctatatttctctgcaatgaagtatattttttaaaattagttccttttaatttcttttaaccataacattctaaatgttttaatttgtcttctggattgaaccattagcagtagcactaatgtgatgaaaatcacattagtatattataaaatttgataattttataattatatttataaaatttgataattattaaatattaatataaaattataaaatataattatatttataaaatttgataattattaaatattaatataaaatgttatccaaaatgtatctcttaatgagttttcaactagttcatatatcattgaatcatattgctggaatgaggcagcattaattatcaatttcttttctattttttccttttcatcagagtaagggctgagggtttttgttcacataaataagtaaaagggaatggaaattgttttctttttttgaaattgttttattacagcaaatcactcacttctgagttacctgtcgaaaatcacataatgagctatcattaaaagtattttaatgatgatatttgagctaacaattcaattatattcttttttaattttgttgaaagcaaagaattggaaaccacctgacttgctaaaggactcattactcgatcattagagtcatttattttcaaaaacaatattccaaatattccaaattgtacttttgtttgacaacccagatgtttttacatttccccaccttgtaggcaatggtaaaaagaggaggaaagaaaagagaatctgtagaacagttctcaggcaaaccagttttaggaaaaaggacatatagcaatagagaatacaaaaatggatatcttcataactggccataccctcatacccctggtaaggtctttgtgtactccttgggttttgaacactctagggcaaagggccctggagtagggaagtgcaatatgatcgtcagccagcactgacgtctacttgaggtttatgataaattcaaagtgagatcagccagcatggatgtgtgattttcattccctctggatatgtttaaccacatgagtacagtggcggagctggcagatttagggctttgccaaaaatcctgggaaaggataaagtaacaaaggagtccaggctgtatgcaaaagtaacatcaggattattggtggaggccaggcaggaagatgagtaccaaaatttccagtttttgtattttgtgtttttttgttttttaactaaactctaccttcaatgtggggcttgaactcataatcccaaggtcaatatttgcatcctctgctgactgagccacccaggcacccctgaaatttccagatgttaaggatgagatctcctaggattataaagtgagaagagaagagggtccaagatcaagctttgggcagctccagtatttaatgtcaagataaagaaggcaatggtaaccaaaggcagagaggtgagaggggtatcagaaaagtgttaggtcacataggccaaaggacaaatgtcccaagaaagtggaagacaatttttcacctgctgctggaagccaaatatgaggaagtctgaaaagtccattggatttggttacatggaagtcattggagaatttaatagagtaagagggagaagcccaaccagagttaggttatgggaaatgagtgggaagcaggttatagaagcagtcaatactaacaattcttactgggatgtaaaaatgaggaggagaacagagttttattattctcttttatttgctttatatttattatattttataatatttatttgttggttctctcttttttatctattttcctcctttctcagaactggaatctaagctctatgagggcaggaacaaaccttgtcttgtcaagtctgtacagtatacaggatacgtggaaatattttttaaagattttatttatttattcatgagagacacacggaaagagagagagagaggcagagactcaggcagagggagaagcaggctccacgcagggagcccaatgtgtgacttgatgcctggactccgggatcacgccctgggctgaagacaggagctaaactgctgagccacccaggcatccctggaaatatttttttaatggattaatgaatgaaccaatgctaaataaaatatttacaaaagtagtccctcccaaaacaaaggtatatcttgatccaaggacaaattttagcttcatttctttgaatacaaaggcaattttaagctcttttcattaaatcctgagaagtagacattcaagtttatctctcctcatgtcccaaatctccctgaagtaaaggagtaaaaaaggcacaagcctacagggacaaagaagacaggagaaggcacgaatcagacaggagaagccagctttttaagaattggaaagctgatggagctgagagaagagtgttaactgactttgccaacctgggaaagcaaaaccctggggtaggagcaatagctgtaggtcacaagaaacaaggtgattcctgaggcagaacttggggaagatacaggaatagaggccccagttctctttgaaagcaaagggggaagatggatttaaaatttttgaagaagcagagttagttctccctgcagttgataaccaggcaccctcctaggccagtgcatcacactgggagaagactggagaaagacaaaccagatggattctggccttagagactccagacccaactgagagcagagatgagatgccaagcacaggggatgttagtgaggtctgtatcccaagcagtgaacccttcagctcccttttcccagccctccctagaggatggaaatctcctttcacaccatacaagtctaattctataaggaaactgaccccttggggatccctgggtggctcagtggtttggcgcctgcctttggcctagggcgtgatcctgaagtccctggatcaagtcccatgtcgggctccctgcatggagcctgcttctccctctctctctgcctgtgtctctgcttctctctctctctctctgtctatcataaataaataaataaataaataaataaataaataaatcttaaaaaaaaaaaaggggaaactgaccccttgaaggagaaatacctacagatattgacatttgggggttatttaaattctttaaaagtctgggttctcctgtaatgaaggctactagttcccaccaaggtagcagagtgacctaccagcttgttggtcgctccatcttaaatgtgagtgttcagttatttgaggaagaacctggacaagaacaacaaatcaaaattaaaaagtaaaaaagaaaaaataaaataaaataaaaataaaaagtaaaaaagatcataaagcaaacagagatataagaggaaaacttcacataaactgaaataagcttcctcattaaaaaaataagcttcctcatagataagagaagatagcatatatataaaagaacaggatgctataaaaaaatcaacaaagagctgtaagatccacagtagatgagaaagaaaaactcaagactaattttaagatccagattttactttttttatgacaagaagaagctcctggcatttgaaaagtaacagttgtggggctcctggctagctcagttgatggaacatgagactcttgatctcagggtcataaatgagttcaagccccacgtggggtgtagagattacttaaaaataaaatctttttaaaaacaaattaattttaaaaagtaacagttgtcctcattataattagctcaaacaacaaacaaaaagtgatttttgtcatttttcaagagaaaaaaagaggatttggtgctttaaagtgtgagctgctttgctctaagtcaaactctctctgctctattcttgccagaatgaatatttttctttctttccttctttctttctttctttctttctttctttctttctttctttctttctttctttctttccttccttccttccttccttccttccttccttccttccttccttccttccttccttcttctttctttctttctttctttctttctttctttctttctttctttctttctttctttctttctttcttctttctttcttctttctttctttctttctttttttttcttcttttcatcttagcaaaactcacttatatgcttgtgatcaggtgttggccagacagcattacttctggaggttggctgtgtgttcctgaggtgacaaagaggtgcctgggccccatatcttgtcatccagaagactagtttgagtttgactattgtcagggttccaagattagagcagaagtttacaaacaaggcttcctgaggcctaggctcagagctggcacaagattgcgtctaccttgttctgttgaccacagcaagtcacaaagccaatccagagtcaaggagtgcaaaaataaacacaagacaaatacaaggtcttgaatggagagtgcaagggagagagaaccagcaattgagggagtacacagactcataaacatcctgcaagagcaagagtcaatataaacatctgcctcagccagaggaaacccaaaccctttctggtctgtgctgggtaaataaagcattttctcccagacctccttgcaactagctttgatgagaaaggtggacactgagggagcctagaaagaaatgcatgaggaagaagccagccacattgtgcccatttcccacttcagctttccacatcaagccaggcttagctggcccagagaagaaacttaatttaaaatgaagttgggggggatccctgggtggcgcagcggtttggcgcctgcctttggcccagggcgcgatcctggagacccgggatcgagtcccacatcggtttcccggtgcacggaacctgcttctccctctgcctatgtctctgcctctctctctctctctctctctctctgtgactatcataaataaataaaaattaaaaaaaataaaataaaataaaataaaatgaagttgggggaaaaccctgggtggctcagcatttgagtgtctgccttggctcagggcatgatcctggggtcctgggattgagtcccacatcaggctccctgcaggcagcctgcttttccttctgcttatgtctctgcctgtctctctgtgtctctcatgaataaataaaatcttaaaaaaaaaaaaaaaagtaaaaagttacagattgtagtaagtgatgggagcaaaagaaacagtgtgagagagttagagagtggaaagacagggtgactgggaaagggctcccaaatatgacttcaagtagaatgaacctgtcttagcattacagcagaggaagtggcttgtgtgtaaagttccaaggcagaaaaaaccttggcatgttctagggcaatgctttctttcttttttaaccgtaatatatgggctacaaacaaaacaaaaaaatgaacaacccccccaccacacacacattttatttgtaatacagaacacagtcacatccaaaacaaaagtattgtgaaactctcctcttaaaatgctaaaatggagtctgatgtttaacatcaggtttactgagatatcatttacatgtaacacaattcactctttttaggttctgtgtgtgtttttttgtttttgtttttgtttttaagatttttatttattcatgagagacacacagagaggcagagacacaggcagagggagaagcaggctccatgcagggagcccgacctgggactcgatcccaggtctccagatcacaccctgggctgaaggcagtgctaaaacgctgagccaccagagctgccccaggttctgtgtgttttgataaatgtgttcacttacaccactacaatcaagctctagaacatttccatgttcctcaaaattccctcctgctgctttgtagtcaactcctccccacaaggtagagctactggcaagcaccggtctgatttctgacactacagatttttaaaaatagtttttctccatgtgtctgtctagaggtttattgatgttaatgatctttttgaaaaatctgctttgggtttcattgcttctctattgtttttctgtacaattttattgatttctgttctttcttacgtcattgtgcatttgctttggatttaatttactctttttttttctgtttttttttttttaagattttattcatttattcatgagagacacacagactgaggcagaaacagaggcagagggaaaagcaggctccctactggggagcctgatgcagaactcaatcccaggaccccagatcacgtcctgagcctgaggcagacgctcaaacactaagccacccaggcgtccctctttttctgatttcttaagacggaagattagattactgatttgaaatttttcttgttttctagtttaatgtttaaatttccatttaagtactggtttggcagtgtccacaaattttgataatgttgcatttcatttttattaaattaaaaatattctctgattttccttgtggcttcctctttgacccatgagttatttagaatttgcaaatattttgtagattttccaaacatcattctgttattgatttctaatttaattcagttgtgataagagaacatacttttttatgatttcaattagtttaaatttgatgaggcttatattatgacccagaacgtgatctattttgataaatattccatgtgtctttgaaaagaatgttgtttttctgttgttgagtggaatgttcccaaaatgtcagtaagatcaaattcactgatgttatgttcaggtttttatactctgctgattttctgtctagttgtcttatcaattactgagacaggaatgtcgaagtctccaactgtggacttatctattttgcctttcacttctagaagttttgctatatgtattttgaagctgtgttcagtgtatgaacatttaaggctgttatgttttcatgaattgattcctttgttgttaggtccctctctatccctggtaatattccttattttgaagtctaatttgtctggtattgatatagtccttctgctttctttggactgtgtctgtatagtacaccttcttgtatccttttattgttaacttaaatatgtctctgtgttggatgtgtttctagtagagagcatataatttgggtcttgcttttatttatgcaacatagttcaaaagtaaaataagtagtcaatagggtgagagaaaatattcacaatacatacagacaattaaaggccaatatgaaaatagataaagaatttccacaaattaataggaaaaaatcagaaaacacaatagaaaaatgaaaagcaggggaagtggcaggcagagggagagggagaagcgggcttctcgcagagcaaggaaccagatgcagggctcaatcccgggatcctagaatcataaactgagctgaaggcagacgcttaactgagtgagctacccaggggccccatattgctttctttttattccactttctgggagatgtcattgactttatcttccatatcttctttttcttttttcatctatcttcttttttgtctatctttcatatcatgtttttcatctctgctatcacactttttttttattttcaagagctttgttttgttctctgatcttattttttatagtcctctgtttttaattcatgcatcaaatttctttccttaactttcttaaagatattaataaaagatcttttggtaagttttctttagtctctgtttcctccaacttattttattttttgctttgtttgatctctgtatttcaagataggatttttccttcaatttctggtgatccttgactgcttatatttagaatggggcaccacaaagctgattagaagctctattcacgggcagcctgggtggctcagcagtttagcgctgccttgggccagggcatgatcctggagacctgggatcaagtcccttgtggggttccctgcatggagcctgcttctccctctgcctgtgtctgtgcctctgtgtgtgtctctcatgaataaataaataaaatctaaataaataaataaataaataaatattctattcattttgaatggagattttcaactttgatgtgattgtcttagtttgctttccctcaaaaaggacccccccacacacacacatcagacatgtattcaaatgaaagtattcagtggaaacacaggtaggggagcaaggaagtaagacaggggagagagggcagccataatgctagctatcactgagaataactaagccttaatcctatggagaaattgagaaaatgttgcaaaacccacacctcagaattattccaggcaagagtgagggagatgggatattcatacatcaaatcctgacagtcattggctgagagctgctgctgggggggaaagtattaattccctagcacttctggcctgccttatgcctaagcagagtagctttccttggctttggagagagatcacaagcagagactcagatgctggcacttggaagtcagcaagatacgctgaagtggggctgtccaggggacaaaggtgggggtagttgttaggttttcttttaatgaccggcggaggaaattaaagacagcagacccaggcggtgggttggagagcgctttaatggggagcgcttggggacgggttcccggacaggcccgagtcagggaagtcggcccaggcaaaccgcaggggggtttataaagagtttcggcgggaagaagggggttagggcggcattcggggaagagttacaggtctttgtaagccaagttaggatatggcggcaaggcggcattattgggaggttgcggccttcaatcggccattttgaggtccccagtctcgccagcccgtcagtagtgacctagctgggctattacttggttatattcatctgcacttttaggtcctttcttttgtccttgtcaggttttttttagacaatctcttgtctggagggttccagtctggttgccagagttctgtgagctaagtgggagaaaaggctgtgaatctcaactttcagtggagaactctaaactttcacttaatactcctgttttcggatggcacctttgctgtctggtgtcctccagtctagagactctctaattggtaagttctaggatataaattctcagacttttactagtttaggaggaggagtcacatgcctgctctcaaaagagaggtatttggggttcagctgctaagtggacttccaactaaaccttctgcttttagccccatactcacctccataggtgaccagtgtcactaattctttttgcagcttctgtgatgtaaatttggttgctgctctgctttccccagctttctctggtctactaaactagttaccactactttttagctttcaagtttccaacattttgttgctattgtctccttttctattctctttgctgtgtgattttggtcattaaaaagagttccttatcagaattcctcctgtgtccttttataatctactattttattacagatatttgtgacattttacctctaactgactgggagaacttcatttcagtaacttctcaaagagattatcacaaagttatttgagtaacagggcattctgattggctggtgaagatttctcccccttctattttctgcctttattgttttagaagcttgaagcactgattgaccttttgctatgtatctatgagagagagaaagggataaagtgatgtcttctcaccatcacaccagaccctggtacaaatttgagtgctagtggttagtaggtcccagttcattagtggaaggaactgtttcctgagaaatgtcagggactccagacacaagtcctactgctgtggggcttaatgtcccagtttgtcacaaaccccagcattaatgtggtactcaggattggctgatggcattctctgtaggatatcagttataataacagcgaagcttccttagcaactttgagaactatggtcactgaaccagaataggagaggaggaacacagcagatacttcctggtggctacagctgttgtttacaaacacatgtaaggcctcctgtgggcttatctacaaataccaagggaaggaactttctgcaggattggctatgcaagttgagacctatggtggcctgctgcactggtgacccctaatagatgactcccaatattcacaaccttgtgtagtcccctcttcttgaatctgtcgctggctcggtcacatgaatgtaaccaatagggtatagtatccactatgacccagttcagagcctaagcctaaagaaaccctggtggtttccatttttcctctcttggaaactttgggtctctaggtaagaagtctatctactgtgctggagagaccgggtggaaaggccacacagagagagaggggccctgagatttcacaataaagaacgaaggtcagccctggtggctcagtggttgagtgtctgccttcagcccagggtgtgatcctggagacctgggatcgtgtcccacattgggctccctgcatggagcctctctctctctctcataaataagtaaaatcttaaaaaaaaaaaaaaaaaaaaaaaaaaggaagaagaagaataagaatgaaggaaggaagccagcaacaatgagaattgaggcctgaaatgtatgactcccattgagcaattacagtcatcccctggccactcaagccctccaagctgagtcccaagacatgtgagggagggagcccttgtggaccttccagccccagcagacatcatgggagtcagaggcaagctatgacctgccagaattcctgatccattgcattgtgagaaacaataaaaacggttactgatttaagacaagtttggtacagtttgttatgcatcaatagataacccaactgaaccagaagaactctgggttcttgatgtttgagggactccctgtactcaccaaaaagatctgatgacatttagatgtgctcaaaaagagctaaacatacagggcagctaaaagcatagcctgatttggaagaaaatatgcattttagaatttttaaagcgctctaaaaaatggacctaggcaaccgttttctttacttcttgttaggcttcaaaaacccaacaagaatgggaaatgtcccaaacaccagtgccagattgtgtggctctttgacctgtcccagtatgagctccctctaatacgtgccaagggagctggggcctccctctccacttgtgatatatatatatatttttagcagtggcttaaatctgatgcctttagtttaaagccagattaagtaaactcactttcatacttgttttaaaaataaactcctgcaagaaagaaaatactcatctttatagaatcctccccctgtggtgctggcacattctctcaagaaataccttaaagtaaggaaaggaagatgaagttagaaatcacaggggatagggattgaatcctatttctttcatgttttagctgtgaggctttggagaagttacccaacctctgtctgtgttccctcatcattaaaaagtgagaatgctaatacccaccttaaaggattgctttgagaataaaatgaggtaatgtgtatgaaagtacataacatactgctggatgtatggttaagactcaaaaatatcttggttcactgtgctgcattcaaaggttattggagccagggttatgtctcatggtagtagaatgaggagccagagggctagtcagctcagtggcagtttggttgggtcaccatcactgccttctcttctctctattgccattgacatagatcctagagataatggatcttctttaaaatagtaaccagttaccctctacttcctgtaactcctgtccctattctcatcatagaaaacagagttctggttttatctcaaggaagaaatgataatagctaacaccaattataaatgagtcagatatttttttgctttggggttttaaaagccaaagactcatggcataagaaaacagttttgaaagaataattggaaagttgatttttcacaaaatggccacacatatgcatacacacatgcatacccacacactgacacatgtgggcatgcccacactcaaaggactggacaaaatttcactggacttcacaatagggaagtcaagcagagcagggagctagaataaatttcaccactgacttaaaaccttagaaactaatttatttatttatttatctatttatttataaaagattttgtttacttattcatgagagacacacacacacacacagagaggcagagacacaggcaaagggagaagcaggctccatgaagggggcccgacgtgggacccgggttcccaggttcacaccctggggcaaaagggcgctaaaccgctgggccaccggggctacccagaacttagaaactattaatgagtttttcactctgcccttagccagaaaatgacctcctctttatttggttatggcatcaatcttgtgaggaggttcggattgtttcagaaggaatgctaagagaagaaaaaaaaagggtgggtggctcaattggttgggcatttggctcttgatttttctcagatcatgatctcagggctttgggatcaagccccacacgtcttgggctctgtgcttattgggaagtctgcctctcctctctctctctaaaataaataaatgaatcttgttgggtgggtggggggaggaagagcacctgggaggctcagttggttaagcatctgattcttggttttggctcaaatcatgatctcctggttgtgagatcaagccctgttgggctctgtgttcagtgtgacatctggttggttcagactctctccttctcccttctccctctgctcctccctgctggcactcacatccaagtgctctccctctctctttctcaaataaatacataaataaaatatttttaaaaagaaaagagctaatatgcattattgaaattcaaaatttttcaacaaaacaatagtcttgaaaaccaagctctgtgagagagaaataattttctatattcacttagctaatatttgatgagatcaagacccaaacccagattcaaatttctaccaaaggaggggataacttagtctattgtctttggtttcctcatctacccatgatgctgataacacctacatcaaagaattgtttccaaaaggaacttctgtcttctaaagtggcaaccagagtcagcaagccaaggatatgatatggaaggaaaaaaagagaagcttgccctttcctgtcttggacattgaagaagatatctgggaggggagaatgagataagaatcaaagaggtttaacttggaattggggaaatggcttcagaaatacccagaaaatagaagaaatcactgaagttataataaactggtacccaatgtagataactgagcaaatcagggtgaactgtcagagagatagtgtctaatttgtactgtcagtccttccccaatgatgagcatttagttgagagtcaagggcctgccatgggccatggtggagtaggaggatggcaaaggaaatggaggcatatggtttggacagcttgggtcaggggctggatgggggacatagtggaaattcaaggggcccactgggctttgcagagctatagggaggttgagtcagccagagagatgagatcaggtctagccaagagagacatgtgagatactctaagtgctgactttagtcaaaggccggcagggtgaacatgaccaagcgcatattggcccataaaccaaaggacatactgaaagcatgagaaccccagttcccttcttatacccatccctgaggagatcacttaagcctcatctctctcttcatgcacccccaacagaaacttagcaagaagcctgggggcagggaagacgtctgagagatctgagactctgagcatttttatctagagagactgaaaagtatctgaacacccacttattctttggtattgcactgaaacaactccagcttttcatgctacctagtgaatgaaggttgtaagaaaaaccacattacttatagataaactatttctcctcacatctctgagttgtggtgtaagataattgatcctactaaagagcttagacattggtggggccctcaaaatggcctgcaatactcagtttttactgtgtaacaaacaactccaagctctcaatggcttacaataacaatcacctattttcatgcttttggtggtagaagttggctatggtttggcttatccatgttgggcttaacagagaatggtagaacttcaggctcctggttatgttcagttatttaacctgggccaagctaaaggggcagtggatatatagaatttgcttttctcttgacacatcacagaggtgtaagaggccaaatcaagtcacaaaagcacatttaaagtatctggttatatcatgtcatgacattccattggtccaagagagtcacataccaaagggcatgaatgtgtacttaaagaggaagcaaagtatggggaataacaatccaaaccatcacaggaccactgtcccctacctactctttcttccctcctcaaaacagcagtattcccaaattgatctaggaaatctaggagcaatatttcccttgagcaaagagtatcagtagaacatcacagaagaccccgaaagccagcacagcaagcatgatggggcagagtgaggaaagcctgggtcttggatgatagagttaaatgtgtgtttttgtttgttgttgtttttaaagattttatttatttattcatgagagacccagagaaagagagagagaggcagagacacaggcagagggagaagcaggctctatgcagggagccggatgtgggactcgatctcgggactccaagatcatgccctgggctgaagacaggtgctaaaccgcagagccacccagggatccccgagttgaatgtttttagcagacacctacttctagacttttgtaatacgaaacaatttgatgtgtttattgttagctgagttttttgtagatttcagttgagtacatccaactgatactggactcctattagccctatttttccataaggcctagagaagtaagtgcagaaggttggatttgaacccaagctttgtctgtagagcacatgcctttttttaccttactatgataccttactttccaagtcttgtgtggggctgacgcccctaatatacatggcagctgattcaaaggataatgcaattaaatgactccatggtgaaaaagcagaaagtctggtcatagcagtaaaaaatatcaacatggctttggtctggccctgtagccaaacaactcagagaagagccaggaccaggcaccagaggctactcaaatatagagctctactcagatgtagagtcctggggtttccctgagttttatgcaggagaggtgtcatgtgatggtgaccccactcaacaatttaatcaacctgcacatttaaaacaagctctctcaaactcctgctcccttcatcccctctgttcttttttgaaacaacaaaaaggaaatttggcaaatagcaggctaagccatcaatcttcaaatctattctatagatcaagatttctgggtcatgtggaaatagctgtctaggtagataccagggactgacccaacaattatatcccacacgggaggtgctcaggcaagtgtactgaatgaatgaacaaatcacaatctgggatttgtgatgatccttactgcaactctagagatctgttggccagtgtatttggtaattgaacctaaagggctaactgatgctagtcaaagtcatgtgagacatatcggctaggatacctaggatataatatctttccagggaatagatttctcatacctctgtccaaggcacttcctagtattgacatatagatgcagaataaacatgatagtcactgagcatgagtcagaggggtgaggacatggtgagtaagctttctctggctccccatagaagacattgagccacctctgcctcgagaagataggggaattttgtaagtgtaatctatttttggatacagttttgttacagagtgaaatatatgggcagcctaggtggctcagcggtttagtgccaccttcagcccagggcctgatcctggagacccgggatcgagtcccacctcgggctctctgcatggagcctgtatgggctctctccctctgcctgtgtctctgcctctctctctctcttctctgtctctcatgaataaataaataaaatattttaaaaaaagaaatatataatttaagttggtattttgagggactcttctttctattaagaaatctacttctttctaaggcccagtctcctgtctgtgagagtatctgcagagtcttccccaagaacctacatagcacttggctctcagatagcatgatgaatgcccagggttctagcagacctccagtgatgatggggtccctggtactgacacatctctgtcatcactatctttttatattgggcttctgcatagagggaccatgatgaggcatccacttccatctacaaccctctgctttcataattggggctatatggtctttcccagttcttatcttttacttgctctgaagtagaaggccttcatagggagctcaaatttgcccatatttaagaataacttggttcatattccattttgaggctatttcttttattcattcatgtaatcaaacagtcagcaaatattgatggccaattttgtgccatcagtgtgctaaccactggagtagtgcttaacaaaactgtaggtcccttcctctgtgcaacttgtggcccagctgaaaatatttacatttagtgagacattaacctcagttggttaagtgtctgtctttggctcaggtcatgatctcagggtcctgggaccgaggcttgagtcagtctccctgctcaatgaggagtctccttctccctctccttctgcccctccctcagatagttctctctctctctctctctctctctcgcgcgcgcgcgcgctgtctctctcaaataaataaataaataaataaataaataaataaataaataaatctttaaaaaagaaaaagtaaaaatgctccatgaaatggatacagagttataaccaacattaaaacaaaaacattaaaaaaaaaaaacatacattttcccagagaagagaaagagtatgtaagagtatactttcaaactatttggggatccctgggtggcgcagcggtttagcgcctgcctttggcccagggcgcgatcctggagacctgggatcgaatcccacgtcgggctcccggtgcacggagcctgcttctccctctgcctgtgtctctgcctctctctctctctctctgtatgactatcataaataaatttaaaaaaaaattaaaaaaaacacaaaaaactattctatggggtacctgggtggtgcagtcggttaagcatcttcctttggctcagggatccagtcctgtgtcagctccctgctcagtgggagcctgcttcttcctctccctctgcctctccccctgcttgtgtcttgagatctcctggcattgacatcaggttctctgctcagtgcagaatctgcttccccattctctccctctgcctactgcctccccccacccccacccctgcctcatatactctcgcgctctctctctaaaataaataagtaaatctttttttaaaaaaaggaatcaggaactcctgggtgactcagtcggttgagcatctgccttctgctcaggtcatgagccagggtcctgggatcaagccctgcatcgggttctctgttctaggagagcctccctcttcctctttttcccactcgtgctctctccatcgctatctcggttctgtctctcttaagtaaataaataaaatcttttttttttttttaagattttatccatttattcatgagagagagagagagaagcagagactcaggcagagggagaagcaggctccctgcaggaagccggatgcagaactcaatcccaggacccgggatcatgccctgagccaaagggaggggctcaaccactgagctatccaggcatccccaataaataaataaaatcttaaaaagaaaagaaaaggaatcacccaatatatgatcttttgtgtttggcttcctatttcagcatgttttcaaagttcatcaaagtagcatgtatcagtagtacattccttttttatggctgaaactatttcattctatgtatatatcataatttgtttattcatcagttgatggacacttaagttgtttctgcctttggctattataaataatgctgctataaacattcttgtacaattttctgtgtggacacatgcttttatttctcaggtaaaattgctggtttgtgtcaacataaacaaaactggaccctccttaaagtggtaaggacaaactttagtcagtaagatactgttgcagcagggaaaagaggccagcatgaatgaaactcaactttgatacagaggtaactgggcattgaaaaggggagtgagtggcaacttagtagagtggaaatgaaaaatttaaaaagcaggaatcccagtggtttggtccatgtgaaatccattcgagtttattaactggtgcttatccaagttaggctcctaccctcccacagaggctgggaggcaggggtgataaccttaggcgttggctaaacagtaagttcctttggcagccttgagttttctcaggtaggcacttaaaggaggggcaaggatcatcctagagctgtggccttgagctattagaaatgatgctggtattagtttaagtctttatagagctagatggaaagggcttagaggagcctggttggagtttggtcaaggagagaatcttttccagtcatatggtaactctgcatttaacttttgaaagagccctggttatcattgtgtgccttttgaaatacatgtgaatatattgctattccaaaaattaagctaataacaaaaggcacactataggagacatcatatataggcatataaccaagaagaatttatggagaacgccttcaaatcaatatgaaaaagacaataaatccaacacaaaaagtgaaaatggtacaaaagacaattcctcaaaggaaaaacaaaaactgccaattaaaataacaatgagataacattttacatccatcaaattaacaaagatgagtctggtaatagcaaatgttggtgactctatggggcaatagggacccttaaaaaaaaagattttattcatttatttgacagggagagaagaaagtacaagcagggggagcagcagaaggagagggagaagcagacttcctgatgagcagggagcccaaggtaggacttactgagccacccaggcaccctgatctgtggtatattcatataattgaatacaacagtggtgttctgttccccatggtagccacaagcgacatggggctacataaacttaaatttaaatatttaaattaattctatgttttaaatttcaaattttaaatttagttcctcaatcacattagttttatatcaattgttcagtgtggtaccatactggacagtgtagttatagaacatttccgtcattgcagaaagttctgttggacagcatgttatagagtagataaaatgagtcatccgggtctatatgtttcagaatatatgtttcaaaaatataatattgataggaaaaagccagcaagctgcctgtacacttagagtatcctctcatttgactggtttggaagaaattcataacatccattgccttcagagatgtgaagtgtgtggtgagggatgaagtggttggtagacttttcatatacatcctttgcctcttttaaattctgaaccatgcaattgtatcatctattcaaatataataaaataaattctggctccaaccaattcaagaaaaacacttaaggcatgtaaagcctttttggagtttggcaaaaccatatttactggttacttattgaaacctatccaccagattgtctaaaaaaataaccttgtgtttcctttctgtgatattttacaatttccacagaacgcaaaatttgaatattttcattgaaacttctacagcaagatcctgctcaatcttttgtatttgtttcacgtgaaactgagaaactgtgactaaaaaagttgtgaaagtactggtaagaaaaatgtaatgtgaacacaagacaaaactgtaatgtattagctaataaatatatccagtttgaacacattaaaatgctgtatattctcacagacacataaaaatacagtgatagtacaaaataattcatgggaatgataatgattcaggctggaggttacctctggggagagggaaggtatcaggaaggaggacacaggggcatcaattgactctacaacattttacttactaaaaaaaaggagggggggcaaattgttagtgtcggaaagggggtggtgattccgtggggtttcattattgccatgctgtgtggttttatctttcttttcttttctcttttcttttcttttctttcttttcctttcttttcttttcttttcttttcttttcttttctttcttctttctttctttcagattttacttacttattcatgagaaacgcagagacaggctgagacacaggcagagggagaagcaggctccctctggggagccccatgtgggacccatcccaggaccccaggatcatgacctgagctgacgcttaaccgctgagccccccaggcgtccctgttacttggttttctacttaagaatttcaatttgctcctccctctgcctatgtctctgcctctctctgtgtgtttctcatggataaataagtaaaatcttaaaaaaaaaaaaaaaaagaaagaaagaaagaaagaaagaaagaaagaaagaaagaaagaaagaaaggagaaagaaagagaaagagaaagaaagaaagaaagaaagagaaagaaaaaaagaaagaaagaaagagaaagaagaaagaagaaagaaagaaagaaagaaagaaaagaaagaaagaaagaaagaaagaaagaaagaaagaaagaaagaaaggaaggaagaaagaaagaagaaagaaagaaaatttcaacttggggcatctgccttggactcaggtcctgatcctacggtccccagaaggagcctggagcccgggtagggctccctgttcagcagagagtctgcttctccctttccctctgctcctccccacactagtggtttctctctagcaaataaataaatcttttttaagaaagaatgtcgggggatccctgggtggcgcagcggttggctcctgcctttggcccagggcgtgatcctggagatcagggattgaatcccacgtcaggctcccggtgcgtggatcctgctgttccctctgcctgtgtctctgcctctctctctctctctctctgtgtgactatcataaataaattaaaaaaaaaaaaaatgtcgggacgcctgggtcagcggttgagcgtctgccttcggctcaaggtgtgatcctgagtctggggatccagtccctcatgcggttccctgggaggagcctgcttctccctctgcctatgcctttgcttctctctttgtctctcatgaataaatacgcaaaatctttaaaaataaataaataaacataaaaatttttaaaagaatgtcatcttaaaaaataataatataaacaccttattaacaatcgctgatcatccctgtgggccagacacccagggcccaccatgagtcctgcgccacccctgagcctctcactctgactgatagggtgagcagtcatccttgcctccgggcctttcccgttgccgtcgcggttgcggagagtggagaggctggtgtcctctgtgaattgcacgcacacccgcctgcacagtccctgcagcaccttcctggtcctggtcagcttgatgggctgcaacagcttgtgtccacagtggcagcaccgtggtggtcagatggagagctccttattttgaaaaagaaagagatgggggaaaacatcattttaggctttaaaaaatgtgaaggcctggatgtgagagaacatcgtccatttttgaggaatttaaaaaagctttgcagctggatttgcccaggagaagtctggccacgtggacatgggcagcgcactggaccatttaagccatgatgacagaaatacacatgtaagcctgccttcttttttcaaagactttatttttaagtaatttctatacccagcatggggtttgaactcataactccaagatcaggagtcaccaggcactaactgagccagccaggcacccctgtaaaaggccttctttataaagaaaatataatgggcacctggtggtagagtcagcactgcatgatgttgggttgtgagttcaagccaaaggttggatgtagagattattaaaaataaactcttaaaaaagaaaagaaaatataagatcagatataaatttttctttgaaggatagaaacctgtttttatttattttattttttaaaagattttatttatttattcatgagagacagagacagagagagagccagagggagaagcagcctccatgcagggagcctgatgtgggactcgaccccaggtctccaggatcaggccctgggctgaaggcagtgctaaagcactgagccacctgggctgcctaggaaatctgtttttagttagcaaagggctcactaactggacttggaaaacttcaaaaagctaaatacaaatctcaaagtgaattcatttttgcattgcacttactgctctcaagactgtggcatccaaagggaagagaatgcgtatgattgtacatactgtgctgaggttgtcacatccatgatctcttgtttttgtcattgcctctgtatctgctcatctatctgtactcctcactggttgagaacttccaaaaaggcagggacgagtctgtcctgtctctgccgtgagcccagcatccagcacagtatgacacatgcacacagcccctgactccgtgccacaactgacctggcttcttgtgtttgttttaattgctgagtcaacagctttcttcttggtcgcttgttttatacttattagataaaccaaaagaactgttgagttggttttacaaacatgtgtagaggcatacatggctgaaattaaccacctaacaatagaacatgtctatgttcagagtccatcaatggttggggattttgaggtattttcaagtatggaaaactgactgacttagcatcttcatctccagcacatgcacattgtctcatgtgataattaaggagtgtgacggtcctcccaaatccatagtacatgtttgctgcaagagttaactgcaattttctggtctttatctccaaccctggctaagccaacacagtgtctccttgttgagtatcgattctccagaagttgctgtgctgcttggatttcattcatatactaagaaggttcataggtcttccttcttttgatgagattttccaaagactgctcctttacttcgatgtctagtaaggagagtgtgtgtgtgttgttcagtctattcttcttcactttgtcaaagaagctttctggtctccaagtgtctgtccaaaaaacaatagaaattttctctccacatttatacaactgtaaaccacagcagcctacagcatttattatggaagcattttgaataactcgataagagattcccagttttgttcctcccagaataagatcactgtgtattgtatccccaagtggattatcaaccatgaggaaagcaacatcattgatatcagcatccttcaaaatattatctgcttcttgttccacttcttccctatcagcaagaatcaattttcttccatgctcttccagggttttcttccctactgtcaagactaaggtataggcttccagatacacttgagtgcagcattttacagcttccaggcccttgaatgttgatgttcttggcatcacccaagcccaagctaaccaggtaacacatttcaaagtccagggggacagagaccaccaactgctccctttctgaagaagcagttaaggattggagtgcttcttacactgaatttgcatcctgcataaacatgaagcaagacaggggcacctgggtgactaattcggagactgccttcatctcaggtcatgatctcggggtcctgggactgagccccacatcaggctccctgctcagtgcggaatctgcctgttactctctttctgcctcttctccccctccctgctcatgctctctctttccccctctctctcaattaataaaatctttaaaaatatggagcaagacatttttaagtgtagtaacactctttcttcttttatgactaattttttctgaggagcactgatcaaagaaaggaaaatggctccttagacctactttgaagggtgtatcttccctgaatctttgacactgctttgcagagcgatagtggacctcactccagggagtgtctgtctcctgtgaagcctatatgtgaggagagagggtgtggtggtgtttagtgatgcctccttggcaattggagactgaagagggaggtctgctctacaggccgggatcatgagcattcaccctctttttatttaacaccttgcatttctcatcaaagaaatgacagtaaaatatagaaagccccatttctttcttctaacacaacctctaccctacttatgtgaccaaatatttcccagtctggatatgaaatcttccattatgagaaactctctaggatgtccattcaatatggtttgtagttgtggaattttgtgatccggacatatggtagaaaagagcattcttgtagcaatttgaattggaatctagatggtgcctggcctctgaaagtgccctccagcccagtgtcatatgagaattcatcccccatcccgctgcccctccaattccacatctgtgctgttagctgagtttggatagtccgtgagaacggggaagaatgagatggcaaaagagaatccagccgtctgtttgtagttaatgctgggtgctctcttatcactctgagaactggaaagttattgggagaataagtaccacatggactaaaaatctctattggtctttgggtagaaaaatgcaaacaggagttttgccatgttccccgtccaatctttctgtcctcaaaaacatctcaatgaatatcatggaggggagggggcagggatttaatcctccatccgggaaaacttttttttttaagatttaattacttatttgacagagagagagcacaaacagggggagcagcaggcagagggggagggagaaacaggcttcccactgttggtccttccaacagggacctcagatgcttggattcaggactcaatctcaggaccacgggatcatgacctgagcagaaggcagatggactgaaccacccaggcgcccatcagggaaaccttttttttttttttttttcagggaaacctttttaaaataacttttcatgcctaggtatcataaccatgttacatgacatttgaaaacatagtgaaaagttttgcatttttattatttttctttttcttaggcatgctctttttcttaaacacaattttgaatgtagtgtatatgcaagggggtgaacttcttcatgtacctaacaccctaaatgctttcctttgtggagaatccagatgtagtgatgtgtttttgaaagcaaatatgctatactttttttttttacttgaataactcacaaggaaggaagctagatttagaatctaacttggcaagataatatgtagatatggttaattataacaaaatcagcaaggtctcaaacttggtgttatcaatataaggtcaatgggcaaatgtaacttcatataacaaatatagttttaacttgaagtgaacacacatacttcgctatgacaaattcaattttctacaataaaagaaaacaaaaccttaaattttaggttataatttctggagttagaagtagcctatcagagaggctacctgattttatcccccttttatttatttattattttttaaaattttactttatttaaattcgattacttaacaaatagtgtatcattagtttcagaaatagtgttcagggcagccgggtggcccagcggtttagcgctaccttctgcccagggtgtgatcctggagcctcgggatcaagtcccacgttgtgttctctgcagggagcctgcttctccctctgcctgtgcctctgcctttctctcagtgtctgccataaataaataaataaataaataaataaataaataaataaataaataaataaagtgttcagtgattcatcagttgcatttaacacccagtgctcattacctcacataccctccttaaggaccatcacccattaccccatcccccacccatttcacttccagcaacctcctctttgtttcttatagttaagagtctcttacagtttgcctccctctctgatttcatcttattttatttttccctccttttcccaatgatcctctgttttgtttcttaaattccacattttcccactttttaaaatgacatgaaaaaaaaaaaacaagtaaaaaataaaatgaaatggtagctcctctttaactgcagacagagcatgcccaaaactaattttgtaaaagcttcttcccttggccagatgttggtccattgcaacctggagtctagcttgatatttattgtcttttttttttaatttttttaaaatttatttataatagtcacacagagagagaggcagagacacaggcagagggagaagcaggctccatgcaccgggagccccatgtgggattcgatcccgggtctccgggatcgcgccctgggccaaaggcaggcgccaaacagctgcgccacccagggatcccgatatttattgtctatagctatagctctacctgtatgtgcctgtacctaagccgcactgaaagacctcatgtcaacaaagtgcttttcttgcaacacttcccattagacatcactctcatttgtaactgatttgaaccaaggttgaattacaatcttttaaaatttataatttatttctatgccacacctgctactgtggagtgtttaaacggaatggcatttaaggtctgtttctccaattgactctaagttccctgaaggcggggctgtgtcagtttgggttcagggttgaatcacaggcaatagcacacatagaagatgcacggccccaatacgtgttctatctgaggtatacgtgttgttagaaatatatgcaaattaaatttacatcacataatatagttttgtcatcttctatttaataactatccactggtggaggggtacctggctggctcagtctatggagcatgcaactcttgatctcagggctgtgagttcaagccctatgttgggtatagagcctagttaaatttttattttatttttatttatttgaaagagcttctctgcactctttcccctagagcctgtagacaaggacccaggagtcacctcagtgctgtaatactctaggaaaaactggacgccttcctttccagaataaaccataagacctactcctctcctgacttcctgtggaaatgagtgggtcttctcctcacaggaccagtaactatatgtcttggttttgttaccaaataacatcctgggataaagggagaaaaactttgggggaaatcaatcacctctggctgggtcctctcagacccacagaagtagatccaacctttggaacctcagcttccggcctgtaaccacatctctactcctgccaagatggaagctgctttttctgaatgcttacttatctcatcgctcacagctgagatgagagcttcctctggaaatctttcttcagcgcctcacttctgagaaaggtgatctaatagcacttgtgttcctttcaccatatggtattgttgtggtattattgttgtctgcccctcactccaaaactggaagctctgagaggaaagagattatgtttgtcttcttcatcaaagcctagcacagtgcatggcatgagtgggcacttcagaaatgttgaatgaattgtacttgaaaactgaatgacctattaacatttttcataatagttttatttttttattttttataatagttttagaaataaaattcatcctttaaagtgtacaaatcaatggattttagcatagtcacagaattgttcaatcatcaccctactcttttcttttttaaagattttattgatttattcatgagacacacacacacacacagaggcagagacacaggcagagggagaagcaggctccatgcagggagcccaacgtgggactcaatcccaggaccccaggatcacgcccagggctgaaggtggcgctaaaccgctgagccaccgaggctgccccatcaccccactcttaagaccaaggggtctgaggatcaaggcaatgacaaccgattttgtgggagaaggtaacagaggcaaaatacctgtaagggtcagggcctaagtaacacactttccaggagagtgaacacaagaatttgctggggtagggtggggggatggagggtgacatctttcagacaatcaaggtaattttactgcacaccttgccgtctgtggagaggtctacaaagggctggggaagagaaaaggaaactgccagataagccagaaagagaagcagaggaggaaaagatgaaggtttcaggaatgtgatttccaaggtaagaaatcctcctcagtttgcaggaggaaatctctggggaagagtcaaggaccaccaagggtgatcccactcagcctgctcctgagatgagcagatgggtgagactctactaagactaggcttggagaactcttaatatcccccttggctcaatactaaggtcatggggagaagtgaaatctttacaatatcaagtctttctctgcaagcacacagtttatctttccattaatttagattttctttaatatctttcagtaaaactttatcattttatccacaaaggccggcatacctgttcaatttattaagtactttatatctttgttgctattgcaaatggtatattattaaaatgtttgtgcacaacatttaacaaagtgcacaaatcaagtatataccttggctttatatatgtatatgttcatgtaaccaaatgggaaatattttaaaaaatgtatttatttgagagagagaaggtgtggacctggggaaggcaggggtgggtggtgcaaagggggagggagagggggagagagagagaatcttgagcagactccccactgggcacagagctcaatgcagggctcaacctcaccaccctgagatgatgacctgagctgaaatcaagagttggacacaactgactgagtcatccaggcaccccttaagtgggaaatattattaaaagttataccttctgatggttgctgctgctagaattgcaatagatattgtatattgatttttgctatattgttttatatccagcaaccttgctaaacttaccaattctatcttaattttcttttggggttgctacacacacagtaatttcattcatgaatactgacgttccttagtttttttccttaatccttatatatttgttgctgttgtttattggactggctaaccttccactattgtattgactagggttattaagagcaagcatccttggcttgtttctcaactttttttttaagactttatttatttattcatgagagagagagagagagagagagagagagagaagcaggctccatgcagggagcccgacgcgggactcgatcctgggtctccaggatcgggccctgggctgaagttggcactaaacccctgagccacgcgggctgccccttgtttctcatcttaagagaaatgcttactattattgtgacgtgtgctgcaggatttttcaagatgtcctttatcaggttatggtgcattctttaacagcaacagatgttaaatattttgagtagtttttacatgccaattgacatgaataaactgttgcccctttaatgggtccatacttgtagtctaacgtttgtttttaactttgagtaatgtcttttgccgtaagtttcttctcagttctccctctttttttttttttttttaagatttatttatttattcatgagagacacagagagagagagagaggcagagacacaggaggagggagaagcaggctccatgccgggagcccgatcctgggactccaggatcatgcccaggccaaaggctggcgctaaaccgctgagccacccagggattccctcagttctccctctttacccatccattaagtgttggtcttatcaccatccccccccccccccccacaaaaaaaaaaaatcctctctcttttttttaagctcctggtttttgtaggtttcctaggctatcaaccgttgggggatgaccacccagttttcagacactgggtttttcaaatccccagtctgctccctccacaagcaggtttgaatttaagtcaaagcactggaataaggacgcctggctgaggttgagcatctgccttcagctcagggcgtgatcccagggaccctggatagatggagtcccacatagagctccctgcatggagcctgcttcttctgcctatgtctctgcctctctcggtctctcatgaataaattaaatcttaaaaagtaataataaaaaacctcccactggaatagaagatgggtggcttgattccagctctgtcgatctccaaaaatgcaccaagacagaactccccttcctttcagtctcatcaataaaatccctgtcccacctccaggttggttggaaactccgacgaataaatgcagtacaatcactgcaaattcctcgcaggtgaagggtttgatgtctttgacactaagattgttagaggttgtgtggggtaacatatagcttggattttgaagctgctggaatctagatccactcccgatcatgagtgtgaccttgtgcttggatacctaacctttctaagcctacctttgtccagcttgcagagaagggatgcaaaacactcgaccgtagtaagagctcaatgaatttagcgattattaagagataatgcacgtgcagacagcctgagaagcatagaaacttcctaaatgtaagcagtctgccgtccgtgggatggaggctccggagccctaaggcagctccagcaccggtaccggcgcccaggtaccgaggacatggggtgccgagggggactgcagggaaaacccctctgagcctcgaatccccactgtcgggcttccaggagcgccaagctgcacctcaagtccctaggtttggggggaaatgccaaaatgactggggagggggtagacgcggccactctcacgccaccggcgggctcctgctcccacttcccgggagctttagggacctcgcctccgcggcgaggcgccgagtcacgaaccctaatcgcacagacgcggccgggggtaacgggggtgctccccgccgcactcgctgggggcgggggctgccccgtcgcgtccctccccctaagcgagtcccgtgtgctctcgcgtgattcctttctcccagcgtccccgcccccaccccgctgagttcgcgcggcgccgtccgggaatgctctgacgtgacgtgctgcagccgggagccgagcggaagtgcagcccgaccccggctggaggcggggtgggcgagagaggtgggagggcagccggaagtgtgactaacctcctgcctcccgcgcgccggcgaagcaggaaggggaaggtgccggcctggcggggtgtggcctccagaggcagggggcgctgcgattggtctcggccgtggcgacggcgacgattggcccttgcgtgcggagggaggtgagaagggtggcgacggttggaattcaaaagtggcgggtgtggcgtcggtcgggagccccggagccccgcacacgcgtggcttgtgtcgcaagccggcgagagaacgcgggtcccggaagccccggcgccctgtcctcttccggcgggcgcccctggcgcgtgtgggccggtgctggccatggagccgcaggtgagtagggccgcgaggggtctcctgcccgcgacgctggcgagcccccggcccccggccggcctcggtcctgcctcgtggagagcagaggcccgtgcgtcctcgcgcaggggacaggcgggagggagagggctgggagcagccccggggcgtcggggtgcacgtctgccagccctccccgctctgattgatgtctccaggatttttcgatttcgaattctcgggcttatctgactctgtacccacctctccattcctgccagcgattgcagtgtgtgattgagaggagttctgagattccgtctccctcggggaagtggtgcctgaggccaaatccgcgctgatgatctttcctgttctctccggttgctgtcgcttcggagggcgggaaggggatagagggaatgcggtaatctgaactgaaggattcctcattctctctccttcgtcaggttttacagagatctctgcccctgggacttagtttcttctcttatcggtggccctactgcacttcacaaccatcagcagcctcccctctccagtcgagagagatgtgtgacagccagagtgtattgacttttggtgccagagaaatgctcctgcctggatcctctgtttgctagtatttcacattcagatttacccaaagcaggtttcagactgaagagatattgtttgtatcccgacagctaaagagcagatgagtatgatgtgaccgtgaaaaacagtagaagccttctcatatttactgagcacctactgtgtaccaggcacagtggtagatacttgggatgcagcaacaaacaagacaaatccctgtcgtccctacagatgccattctatgagaagctgccattctgtggggagccaggaaatataagttacataactctatttcaaagtgatgaatgctatgaacagaaggaaaaacttgagcagattaaggaagaggaggggaggccaacttgcaggatacagtattaaatagggtggtcttagtaagctccattatgaagatgaaagttgaataagtgctttgaacaagatgatggacaaaggctagtgattactgagggaagagcgttccaggcagagggaatctgctagagcaaagtccttcaagaattgtgtagcaaaagctaaaatggagtgagcaagggggcaaattgtgggaggggaagtcagagcatggagagtgggattgtcgaccccattgcttcttgttggggctttgttgtgaggcccttgacttttggatggttttaagcaggtaagatctgtcttacattttaagaggatcactctagctgccacactgagagtaaacatcaagggtaaggaaagaaacaaggaggactgttaggaaggaatacagcagtttttctcaacttccatactattgacatttttactgtaggggctgtcctatacatggtctgatggtagcagcattcctggcctctgcccactagatgtcagtagcaactcccacctaatcaatgtcaaactgtctccggacctcatcaaatgccccctagggagtcaaatcacccccagttgataaccagtggagaatgataacctgagaggtgatgctgacatggatcggggttgtagcagtggaagtagtaacatgtggtcagttctgtcatcctttgctgacattagatgtggtatgtaagagaatgagaagacttgggattttttggcttgaacaactgaaagatatatatcaactgggatggagaaagctgtaagaggaccaagttcgaaagggatttggacattagaaagtccatttggatgtaagtttgacacgtttattggacttccaagtggagacattgagaaggtagttgcatagaagttcaggaacaaggtctgggctagaggtataaatcttggagttgtcagcgtatggatgagagtgcactggaatgtggatagagaatagaaagaccatcattaaagtttggaaagatgaggaggacctgccgtgagagatggggaaaccaagagaggatggtctcctggaagctcaatgaagaaagtgtattaaggacgtgagagtgagcagctctatcaaatgctgtgataggtcaagaagcaggaagatgcagagttgacatagcaacacacaatgtacttgtgacctcaaggagagtagttttgatgacacagtgagagtgaaggcctgattgggatgagtttaggagagaatctggacatggtcaatattctagtgaacacttaagggttttgctgcagagagtaacaaaaagctgacaggtaaagcagagtcaagaaactcttttcagtttggaagaaataatagcatgtgttataatacagataggaatgatccagtagagtgaaaagttgatggtgtagaggagaaatggaaggattgataggattctttcccaatagatagatgaaggactggagtctgatgtatacatggaagggaagcatttctcttatgcttttcattgtggatagttgggagtcattgtgtctggctctatatcacagatgggaagagaattaatactgtactctttggagttgtccttaataaacaaacctttgaggggcacatgggtggctcagtggttgagcatctccttcggctcgggtgatcctggggtcttgggatcgagtcccacatcaggctccctacagggaacctgtctggaagggcagggattttgttcattacactcacctcaccttctagaacaatgtctggtccagagcagtcttgcaacaaatcttagtgcaacaaatccttattggatgaaggaagaaaggaatgatgaattttctctacctgtcatatccctcatcatctacttcttcacattgcttcacactacttttttggtacaaatctagtcttactactctcctaactaaaaaccaccatcagggtccctcttgccttcagtaaatgctagactccttatcatggcatactgcctgccatgcacactccatgtgtcagctgaacagaacaacttggcatccttgcatgcacccgtccttgctttctgcctgggaggctcctccttggcccaggtcccctggctaagtctttctcatcatccaggttttgcctaaaaagactttttagaggtgttctctgacactctccgcatctgaactacatgctcattccctccttggggtatactttttttatgataccactcagtaaaattttaataatctctttaaaaatgcttctctgcctctctctctctctctgtgactatcataaataaataaaaattgaaaaaaaaatattaaaaatgcttctcttctccattttccctgagtattttgagggcagggataacatctattattcccaaacccaaatcattttctggcatagtgagcactaagagtattgagtgaataaagtgagccaaagggcagagagactagccttggaattaaaagttaactatagtgaagattaaacattgatctgtatacatattactctcctgatggtcagataggagcagggtttgcataattaaggacctggttttagcatggaaaagttctctgtcctgagaaaccctttagtcctgggcaaattagaatagttggtcaccctagtcgagagtagccatggagtggacataatataatctctaagcaccaaattgcagtgcttaggagaggatctctcccactgcccccgcccaatacctgtactttggtggtacatgtgtcatgctgcttcttagttctcttcatgcaagtcggcctacttgtaactcttttttttttaaaaaagattttatttatttattcatgagagacgcacagagagagagagagaggcagaggcagagacacaagcagagggagagacagaggaagaagcaggctccatgcagggagtctgatgtgggactcaatcccgggtctccaggatcacgccctgggccaaaggcggcactaaactgctgagccacccaggctgacctaactctattttttttaagtaggctcttttgtatacttttcacatgcctgaccagaaactatatctggttctccacataaatgaggctaaagcctaaactcctttgcctggcattaaagacacgcatggcctccagaaccagactgtctagattttaaccgtggctctatcttttactcactgatgaacttagataagctattttacctctagatgccttccttcctcatctgtgaaataaggctaataatagcaccttctcagtgggctcctataaggattaagttgatacagatgaagcatttaaaacaatttctaaaatgttacccgcttgaggtgcccgggtggctcagttgagcatcaggctcttggtttcggctcaggtcatgattgatctcagggtcgtgagatcgagccccacatggggctcctgctgggtgtggagcctctcaaaataaataaataaataaaaataaaaataaaatgttacctgttcctcccatcatctagtcttcagccttacccattttccagtctctcccttaactgtgatcctacattctagctgaaagagcctgttgatttcccagccatatatcatgtgcatgtttgaagttttgccttctgaaaagagtgtccatttctctctgcctgtgtaggtactaccctgagagttagctgaggtccagcgtctgtccagctcttcccgtagagatttctccctcttttgcatcatgttgcacttctatctgtgccttttggctggtacataatccgtgggccccggtttgtacacgagaggtactcagtcagtacttgatggtggttgataattaggctagaacaggaaggggagttcttaggacttttgggctccaagggttgtctgaagggtctctcttttcccagcagaggtcccccttgttggaagtgagggggaacatagagctgaagagacccctggtcaaggctccttctcggctgcctctccctggaacaaggtttaagagggggcctgaccagatggaggatgccttagagcctgagaaggtaagctgggtttggaaagctttgcatgcacgtgtgtgtgtgtgtgtgtgtgtgtgtgtgtgtgagagagagagtgtgtctaagccagtgagagagactaaatggactccattcttgtctacctccagaaaaggacacgaggactggatacagtgactaaaattgccacatcccaatccagagcaccagccctcactgcaagaacacagacacaaaaccagatcacaggtgggctctatgaatgggcagaaaccaagggcatgaaagtccagcgctcttcaactcacttatttcttttctttcaattttagctaattttggataagtaataggtttcacttgtttcagaattacaaaggcacaaggggcgggctgggtggctcagtgggttaagcatccgactcttgatttcgcctcaagtcaagtctcccatctcatgagatggaaccctgtgtcaggctccacactgggtgtgtagcctgcttggggttctctctccccctctccctctgcccaccacccccaaattccaaacgcacaaaatgcattatacagtggaaagtttccctccgacccctgtctgccagccacccagttcccctccccagggacaactgccttgtcccttccagggccaatttatgaatgttcaagcaaatctggacatgttctccaacattttattattataagtggtagcatacttaacccagttctgctccctgctctttttgcttatcttggtccaacttactccttggtgtcttgagtaatttctggtcatgggagggatatctttagaagctggccagatttcagggatgagggaagttatcttatttctcaccctcagagaaagcaatctctctgcccctggcccagccagagctcatgccatcctgagactgattgttctacttttttctgctcccatctcccaacagctccaaaagttcccaagaagacaggaccccgatgttccacagcgattgccacgggtaatagtgcttcagagtgggggctgggaagagattcggagtatgtggaaagggagggtgatggaggtagaaggatactggtgctgtgattccttatgttcactctccaattctctagtgctgaagaatcagaaatcgggccctgctgttcctgcccagaagcctggaggtaggtgactgccataaccattgggtgagaggctaggagcgggaagagaagaggtggtgaggactcccctaaaaatctgtttgattccctccctgtctggaggggaaagagatgtagcatcaggtgtggaggctttaaaggctaggaggggggcagagagggaaagccacgacctccctgacctttgccctttctatgtccatctcagcagctgcccctccaatggtgggagggaggaaacccaccaagcgtccggcctgggacttaaagggtcagttgtgtgacctaaatgcagagctgaaatgctgccgtgagaggactcagacactggcccaggagaaccaacagctgcaggaccaactcagggaggcccaacaacaggccaaggcccggggggcagagtgtaggacactggaaggggagttggccagggtgcaggcccaggctgagcagggccagcaggagttggggagcctcagggcccgtgtcctggaattggaagagcagcagtgcacacaggagggcttgttgcgagagctccagaaagaacagttagaattgcaggaggagcggaggggactggctgcccggctggaggagcaggaggtaagggccatcgtctcagcaaacgccagcccacctttctgggttaccctgaagtctctgggggttgggagtccctgaccacctctccagcagtattcctctgtccttctgtcctctgtccttctccacccctgctcactcctgtatcttgctttctgccccacttctccctactagatggaattacttgtcatttatcaaatgatttaatcatctgtttggggcagtttgcatatgcacttccctctttgtggaatgttccttccattctctgtctttttgttggcgtattcctatacttttgggtatcattgtccttgtgccccttttggctctttccatagcactccctaatctgggaccctggttcctattttcttacctctttccctggcagactcagtccctggggacagggaccaccctaccgccaccaccccacatcatcgtgacttgtccttactcctcagtgtctcactctctctgtccattctgttccggacagaggcggttgcaggcatcagaagcagctctgtcgggcagccaagcagaggtggcatctctgcgccaggaggccacaagccaggcggccctcctggtggagcaaggagaacgtctccacgggctagagatggagcgccggcgactacacaaccagctacaggaactcaaaggcaacatccgcgtgttctgccgggtccgccctgtccttccaggggagcccaccccaccccctggctacctcctgtttccctctggccctggcgggcccgctgatctgcccacacgcctcagcgtttcccggtgtgatgagcgccgtgggaccctgagtggggcgccagcccctgccacccgccacgacttctcctttgaccgggtattccccccagggagtgggcaggatgaagtgtttgaggagattgccatgcttgtccagtcagccctggacggctacccagtatgcatctttgcctatggccagacaggcagtggcaagaccttcacaatggagggtgggcctgggagagacccccaggtggagggcctgatccctcgggccctgcggcacctcttctccgtggcccaggagctgggcggccagggctggacctacagctttgtggcaagctacgtggagatctataatgagactgtccgagacctgctggccactgggccccggaagggccagggcggggagtgtgagatccgccgggcagggcctgggagtgaggagcttactgtcaccaatgcccgatacgttcctgtctcctgtgagaaggaggtaaggactgagggcctctggggctggagaacggggaagagcggatggagggggcacaaggtgcaggtggatggaaaaggaacaggagagagtgggaggatggaggaagggcaggttgcgtgggtgggtggtcacatcagttttggcctatgggccacaggataaatttgtctgcctttgggaacgagggggtagagtggtgcatgtggccgaaggcttcctggcccccacccaccgcatctcaggcctcattcctactatagctctagccgctctgctgtctccaggcactgaagctgtccctggccatcttgtctaagattgcaaccctcaccctaccttcacacactcgttactttgctttattctcctccttggtactctcagacacaccgtgcattttacttagtcattttgcctcttcagtggctagaaagaaagcttagggtgctctggttccttgctactgacatagctgtctgctgattcccagcctgcttttgccctttgctacccccaccccaggtggaggccctgctccatctggcccaccagaaccgggcagtggcccgcacgtcccagaatgagcgatcatctcgtagtcacagcgtgttccagctgcagatctctggggagcacaccggacgaggcctgcagtgtggggcctccctcaaccttgtggacctggctggtagtgagcggctagaccccagcttagcccttggccctggggagcgggaacgccttcgggaaacacaagccattaacagcagcttgtccaccctggggctggtcatcatggccttgagcaacaaggtaggaatggggatgagggccagtgggacctggggtaggttggggtgctcctatcctaatcacctatgtccttcaaccctctaggagtcccatattccttaccggaacagcaaactcacctacctgctgcagaactctctgggtggcagcgctaagatgtgagtgaaagggacagacagaaggggttggctggagactgtgaggctgggatcaggggtgggaaaggggaaatagtgggaacctggtgcaggctccacccagccactgatgttggggtttggctcccacttctctctctacaggctcatgttcgtgaacatttctcccctagaagagaacgtctctgagtccctcaactccctacgctttgcctccaaggtgcagttaccaccaggcccaggccctgtcaggactcctggatgcttgtaggcttctccattctgaccctttagggatccattcagtcctttaggccaagggcacattcatctggaaaggattcacatttgccgggcatctgggacactacctctctgaatccatttttagctattgggttttggggtttttattttttaaaaataggtagttaagaggtcaaaactgtataaaagctatgcacaacatggaagttttaccatctcccgtgtgtaccccattctccctacctgtcctggtagaggcagtcatttttgtcatttatcattttacttatcctttcagtgtttcttcttgcaaatagaagcaacatgcatattattcccttacctcttatatagaagacatctattttttcatatatgtatgttgttctgtactttgttttgctaaacagacattcctgggattactctcccaccagcacacagagattaccccattattttgatgtctgcctaggactccgctgtgtggctgcaccaaagtttatccaccagttccctctactggacacttgggttgtttccactcttttctctattacaaacaaggccacgttgactaaccttatacatagatgtcattttgtatttgttcagttatagctatctagggagattcctggaaatgggattgctggatcataagagacttggatacgggcgcctgggtggctcagttggttaagcgcccgactcttgattatggttcaggtcatgatcttggggtcatgaggtcaagccccacatcgcatggagcccgcttaagattctctcttcctccccttctaccctctgctcctcatgtgcacacattctctctctcaaaaaaaaaaaaaaaaaaaaaaaagtttttcagaccattccgagtagagtgaatccagattccaagacccacttaaacattaaatagaaggccatgccatgaattctctaggagacttatgctcctttcagtaaagtttctttactgtctgtctctggagggtgatttttttctctggctgctcctttccaaagggatagccctatgatgggttctggctttatttaggatctctgggcaggtgtgcccttctgctatattcaggtcttctccccaataagcattggttgctgccatagaagtggtccattccctaggtaccctgccctgattttctgctttgatcaggatttcccttgctatcttgcaagttcaattaaagttatagcaacgtcattaacagccaacaccataaactctttagtatccttaaattactatgttattacattttacctgattgtatcagaaatgtctttaacatattaggtttgtcccaattgggatcaaagcaagggccacccatttcattttaattcttttattttttaaaatttcttttaatccgtaataatctcacctccttttatgtctttttgttgttgttgttgttgttgaagaaatagggtcatttgtcttatagaaaataccatattctggattttggtcagttgcttcctcctccttccatactttttgttatctagtagtacacttaagggcttggatttgaatttgatttgaatcaggcttatttcttgacaagaaaacttgaaacggtacagtacacttcattgcatcagaagtcacctaatatctaatagctttactttttttttttttttagaattgctttacttttttttttttttttttaatttatttatgatagtcacacagagagagagagagaggcagagacacaggcagagggagaagcaggctccatgcaccgggagcccgacgtgggattcgatcccgggtctccaggatcgcgccctgggccaaaggcaggcgccaaaccgctgcgccacccagggatccctagaattgctttactcttaaatgaattaaaaatcatcagatttgggtgttaccagcttgtgaccatttgaaaactccctgttgacctaatgatttcacttagtgatttttggaataatgatcgtacctagatttgttacttcatcaaggagtttaattttctcagtaactttacatttattagtcttgtctcttctacaaagaatttttcccttgccatttatttggttactctgaaatctagtctatgtagcagcaaaggcaggataaatgtaggattctttttttttttttttttttttaagattttatttatttattcatgagagacagagacaagcagagggagaagcaggcctcatgcagggaggcttgatcccaggtctccaagatcacatcctgggccaaaggcaggcgctaaaccgctgagccacccagtgatgcctgtaggattctttatcaattttcagtattagaagttgatgtcttggcaacttccaaaggtgaccaagtgagttttggtttgggaggtgtcattttgcagatgcttattgatttgatatatatcctttatagtcattattccttctgatgttcagattgccccgtcattggccaatgggagctcctttaagttggctcctgtgtcctttagacaggacccagtagtctttattctagactcatcttgtacctatcctgcgtagacttgggatcatttattttccaaggagcctttgttcttaaaggagtgttgttctatctaacttattaacaactaaatggtaggaaggcttggggtgtccgggccatggtattgctggaaatggaggctccatctatctctgctcctgtgtgtggcttctatcccttctcaggcctcttcacttcctccagtcctggtgtggttagtgggcatagacctaaccttaactgagaccaggctgaatctgccttcagagcctttgttttagtattttctgagggcagccccaatattgggggtggggggtgatcttggagaaaactgttattttggttactcacaaaatatttttattctaaaacctctgcccgcaggtgaaccagtgtgttattggtacggcccaggctaacaggaaatgaagacagatccagatcctctgtttgggaagggggggtgggggtggcgctgaaggatgctttgttggggggaggggcgctctgtgacctgggtctatcaaataaagaacaagttttttttctttaaataaaggttttgttaacaatggcccgtatctgtaaaaatgggaactgtggatcgtctactctgccgagtatttgtgttttgcagagcaagggtttcagcttttctctacctggctatctcctggagactagatggttaccctggttgtccgcctctaggagatgtgcccactggccgaccgccgtcactggtttgccgcaggccacccagctccacgcggagagctcgtctggtgggtgcgggaaagtggaagcccgagtccagaggccgggccagcgagccctcctgcaaactgcgggctctccctcccgctctttccttgccgtcccattcgaagaactggggccggcccgcccgctgcccattggctggctctcggcggcgttaccgcctcgctactagctctcccggtccgtgtacccgccctacaggcgctgggtgggctgcacgcccgctgactcgctcgcgccaaccgccaacggccaccgcccggcaaaggaggggctcggtccacccaggtgccgcgcgcgggaggggtcacgcatgcgcagaagcgcggcggcggtgtggcggggggagacttaccacggggagggcggggccggggcaaaggcgggaggaaggcggggcactcgagggaggagggcgtggcgggggcgacgggacgggtgaatggggggcggggtcgtgaactggggccgaggggcgggacttggagtgaccatggaggttgggggggcagttaacggatgtggcatggggcgggggccaggctggagaccagctgcggggaagggggggattccctgctgccccgagggcggatctccctccgaggaaggggctgcagggattccctctcgcactgggtcttgactttccacccgccccagccgtggggaggccgccacccgttcggcgccctccaggcccgttggaggtgagggaggtggggtgaggtggtgccnnnnnnnnnnnnnnnnnnnnnnnnnnnnnnnnnnnnnnnnnnnnnnnnnnnnnnnnnnnnnnnnnnnnnnnnnnnnnnnnnnnnnnnnnnnnnnnnnnnnnnnnnnnntttcctccctccctccatcttcccgcagctctctgcgctgcgctgttgggtgtggtctacgcccagagtgcaggacgagggctggcctgggacccccggcccttgcctgcccgccctccgacgcccagacgtgccctccccgcgcggggggttcgcctcggtctcccacgtctgcctctgcccggctcccggcggccccagctgtcactggtaaggaggcggcgggaggcgcccgtgggggggggcagggagccgggggtcggcgcgcagggcgcgggcgggagagcctcgccgcccaggcatcagctcgcgctgggctgactcaagtcccctctcggactcgctgtcctggggagtagagaccgggactgggacacgcccccctcccagggcactcaaggaagttatctaacccgggggacagggagccccgtatttgagggtgacctgccataacctggcatcgggattattgttctggagacacaggggcccggggaggcagccgtttctaatttggaaaacatttccagaaaagctcccaaaacacattctctgggtagcagaacaccccaattacagtatctctaaacagaaggtgacagtagaaactgaatggtaacctttgcttctgcaaccatcattcctcctaaaatctcaaggccaggatacagtatcccaggggagctctggaagctgggaaactagagaactaggttggggggtggggggtgttagggagaggagagccagtcaccagagttggaaaagctggagtcatgaagcttgggaggggtgctgtgtgatttcctatccaggtatttcatatttggagactggtagcacagctgcttgagtccttgaggcatagaaaaatggggacagtttctcaacattcataaccttctcccatcccacttctggatagcccccccccccaggatgcaatggcacagcccccccggctgagccgctctggtgcccccccactttgggacccagcctcccctgctcccacctcaggccccaggcctcgactttgggagggtcaagatgtgctggccaggtggacggatggactgctatacttggggaccatcaagaaagtaagacctttgacttctgacttattaccttccccccattctccttatgtagttccgattcctgtttcatctcctgtgctcatccattccaggtggacagttcccgggaggtgtgtctggtccagtttgaggacgattcccagtttctggttctatggaaagacattagccctggtgagaccttagaggcccaaatatatgcatgctgtggaaagcagaaacctggcttgggggatgtaaagggggcttaaggacaggccccacaacactgttccctcacagctgccctccccggggaggaactcctctgctgtgtctgtcgctctgagactgtggtccctggaaaccggctggtcagctgtgagaagtgtcgccacggtgagagggcaggatacctaaatggtctagcttgccctgaaccttccaggctgcctctaagtcttccctccaccactgatccttaggccacctgtcctggctgagtccccaagccactgctctggccagtctgctcaactctgtaacctctcttccagcacagggagaaatagccatggaatcaggaggtgtgggctttgtagacagaggatggttcaaatacacctttactaaccataaaaccttgggcaaattcccaagcccctaggagcctgtctcctcacctgtaaaataagggtaacttatctactgcagccagatcacagtcaaagatgaaatgaggtggcccagactcctcctatcccagtcactagcacacacaggtatattgtgcaataaatggtctaccatcaatattatcattattcagcttatcaccaggactgccacgttccaagagccccagcccctggagagggagagggcacatcctgggtctgtcgccagtgtgtctttgccattgccaccaaggtaaggtcaccattctgtgggagcctcccccaccacctctcccaagccttcctgttccctacccgtctgaggtggcctgtttcctccctgcagagggggggtgcactgaagaagggcccctatgcccgggccatgctgggcatgaagctgtcactgccatatggactaaaggggctagactgggacgctggacatctgagcaaccgacagcagagctactgttactgtggtggccctggggagtgagtaaatgagggacaggggtggaggagtggtggggagggaatgaatgatggagtgggtggggggatcctggggaatgaaggagaaaaaataggatgaagggagtgctgaagaaagcagaagtaggtggtgagtagggtttggggccattcaggtcggggcagtgtctggaggtcaccagtcctgtgttccctctcaggtggaacctgaaaatgttgcagtgccagagctgcctgcagtggttccatgaggcctgcacccagtgtctgagcaagccgctcctctacggggacaggtgagatggggctggctctctgggagccaagggagaatactcttgccctgctctaccctctcaggcccccatgctgcttcagctccatgtctccccagcctctgaagctcacctcccctacgcaccccatccttattcataagtcctccacgctctctccccctcgcccacttccaggttctacgagttcgaatgctgtgtgtgtcggggtggccctgagaaggtcaggaggctacagcttcgctggtgagtgggcaccacctccacatggctcctctctcagcacccccagcctcccaccttgggctctccaggcttttgtattgacaaatcattatttctccagggtggatgtggcccatctcgtcctctatcacctcagcgtttgctgtaagaaaaaatactttgattttgaccgcgagatcctccccttcacctctgagaattgggacagtttgctcctcggggaggtaaggggtattgaggctttgggggtgagagtggaacagggaaggatggagaaagggagaagggagagggactacttctcccctgatcccattctcctttcccagctctcagacacccccaagggagaacgttcttccaaactcctctctgctctcaacagccacaaagaccggtgagttggaaagaggttcagaaagaaatgcagacgcaaatatggaagcctgggagggaaggggctgcgactcacctggaagatcatctctgaaaaagattgaataatagcatcagaggggccctttattatggcactgaccctatatcatttcttttctcaccccagtttcatttcagggagggagattaagaagaggaaatgcttgtttggtctccatgctcggatccctccccctgtggagccccttactggagacagagcccccaccaggtcactggtccagggaggatggggaagttctcagggtattaatggagggaggcatatgtatggatatggggaggtctttggggtgtccgggagggggctggggggataaggaggcctcttacagcttcccttcagggcagggccctgggggaggggtctcacgtcccctggggaagcgccggaggccggagccagagcccctgaggaggaggcagaaggggaaaatggaggagctggggccaccctcagcagtgcgcaatcagcccgagcccccggagcaaagggagcgggctcgtctgcagagggcactgcaggtacaggggcaggggcacccccgtggagccaaatggtggtgtgggaaggaatcaaggattccctctcagtcctttgctccttcttctaggcctcagtgtctccaccatcccccagccctaaccagagttaccagggcagcagcggctacaacttccggcccacagacgcccgctgcctgcccaggtcagtgctccttcctcattccaagcagatgcatgtacccttagaatctctccttcgattgtctacatcttctggactttcttacccagaattattgtccgtctcccacttggctacccacttcttgtcctagagatacttccagaaccaatgtctggatctctagtgttctggggatggggattccttggggctgtttgagctttgctcttcttcgtgggagaggatcctgttcccctgcttcgggtcctgactttccccctccctaaacccagcagtcccatccggatgttcgcttccttccacccctctgccagcaccgcagggacctctggggatggtgaacccccagacaggtgagattctacccctttacctgtgccacccctcttcacctgtgtgctcttaagttcctcagtctctaatgtgatatcttggtgcctctgattcacatgtcagctccgtttttggtccatccttatcagcatctggactcacgattgccttctctccctaggtcacccctggaacttcacattggtttccccacagacatccctaaaagtgccccccactcgatgactgcctcatcttcctcagtcccagccccctccccaggtcttcctagacgctctgcacccccttctcccctgtgccgtagtttgtctcctgggactgggggaggagtccgaggtggggttggttacctatcccgaggggaccctgtccgggtccttgctcggagagtacggcctgatggttctgtgcagtacctggttgagtggggaggtgggggcatcttctgaacagcctgcctctgcctacttccccattcacacacaccggcactttcataccctgacctctgacctcacctacagctgggatgtacctggggaggtagggggatagttctccctactgcccaggctggaatccaggtgaggggtctggggaagaggctctctcttctctattcccttcccgattcctgacccttcctccatccctcttcctatttcctttgatgttattttgttacagctttttaaatattttttaaaattatttaacccctggggacggagactgaggagggggggaatgataaggggtcccagactctgtatgattgaaataaaggtaaataaacaaatctagcagccctgggtcattctggaagatgagaacaccagggactagaagcacttctaatcttcccagccaaattcacatatgtgacaaggaaaaaggcagagtgaactacagacaggatttattaggggcccagtcatcacctggaagtcaagggcattgaagtatatgagaggaacatggcagagacagggttcatcacggtagggctgtgctggagtctgaaactgactctgtaacctggcgcacccaatgcaggtatggggagttcccctgctccacaggcaatgcaatcacttcagccacttcataagggtgcacagaactgtggaaaaatgggaggggatcactcaaaagatatacctaaaggagcccccaccccgagaccacccagcaagtgcccgacccccacaccgtcatggctacccacgtcaaaattctcaccgaatgaaatctgtcaaagctggaaccaaggaactttgggttttaatcatctaagaggcaaagataaacatgactgaatcaaggagtggggttgattccaggatatcagatgagggagagggatgagagtcagggaattgaggtttcatcggatgggaaaatgtttctcaccatcagcacctcattgtcttcctcaatctttcctttccactcatagctgaaaaggttagggagagtgtttagggagcaaagattgtcctcaaggaaaagtactgcccataagcccctaaaattaggttaaccccccaactcctgactcacatggatgtaatctgagggatgaggttaacgcaggctgccagccgcttctccaccacagccctgaaggtgaagacaaagcctcattcagaacgccctatgacctgactttctgcactggcagcccagagacagggttccaaagcccgagatcaggcaggaagctagggagcgcactctttcccacccccaaccctctccgtcatgatcctccttcctggctccacactgaggccccccacctggcgatctccttggcgaccttctcgttggggcaggtgacaaaggctgcagagacagagccgggaacatagccggagcttgaagccggcgaaggctgggacggggggcttcctgaagccatggacagcagagctcggggtagcaaaagcaggcgggaggccacaggcaacagcgccggcatccaaaggagagacaggagcagagcggcctgagagcacgaaatgaacctggtgtcaccccacaagtacccgaggaagtcgcatctcgggaacccttcccttgaatagacaggcctgcccaccctcttctgcacaccgaaggaaaaggtccctgaagctggaagagaaacttggttaactaaggcagactcggctttcgctcccccctcaggagccaacctctagggttttgggtgagggcggtggtcgaggcttcgaggaccggaaggggcggggccggtcactcacccctccgccgagcaggattgcgggagcccgccctcccctcatgcagcctacgctggcagggagttgaataccaaaaaccgcacggaacgccgagaagggaccccagacccaggaagagcggcctcttcttacctgggcagcacccacgtgataagaaaaccgcacacaccacgtgacagtagaagccggccccgaacccccagagcccgccaatcctggccctcacagggcccggtttgccccgcctcctgctgggggaggagcgaaagggaatttggccaatcggcagctggatctgcagacgtgcacggaaatggcacgcgcgtttccgagtaaaccggaaacagccaattgcggcctgaggagagccgcagcggcgttccactgtcacgtgagggggccggtcgtcttcaggcggccgtgcctcaatgagctgcgcgaggaggccaatcacaggccagccccgcaggccacgtgacgagagacctggcgctagaaaagggggctggagaccccgccgactagatgcgtcaggttgtggcgtggggagtcgtccttaacccccagagtgtgcccagttacagcccctgcgctgttcccgaggccttaaagagtgggcgggtctgagaagatcgaagctcaggggtggagagcgccccctgcctctttggccaggacgacacatgccgggttgggtggtgaaccacgataatctgaggagccagctggccctgggcaggggacagtgattaggcagggatgggcaatgcaagacgatggtcaggtgggaaagatgcattttaaaaggacagtgagaccctgtaagtgggataaagggtgatgaaaatggggctgagggcaattcagccttcctaattgaaaccccaaaggaggagacagactggtgaaggggggagccgaggagagagagggcttcgggttggggttatggaggacacaaggaagcagtgatagtccttttgtcccttactctccctcctatttaactctcccggactagtgtacctctgagtcttgggtctccttcccttaacccatccccctaggagccaggacctgtcctacataacttccctggggcccaagcacatccagtgacccaaaaatggagagaggggccaatgagaggagagaccggtgggagggaggcagcagaggaaagcctcttgccactccccctacccagtattccccctcctttcaagttttggggtctccacctgctgggtgggtgtgactgggtgttgatcagagttctctcatagctgcatctctgaggatggggtcttcctgaactctgtctttgggtttggagtttctgagctagatctctgtagggcctttcagtatttgcagtgggatctttttccagaccaagtttcctttttgttttgggagtttctgtgtttctgggagcttgatgactctttctcgaggtctttcaaactctttatgagcttgggggtctctgcatttaacatctctgagctacatgaatatctctccctgcccctctgccttctccccatcctcaaaccccaggtctggagtttctctgtctctttcttgagttatcagtctcggagtctgcagtttcttttctctgcgatttaagtctggggtctggtatctctctggatctgagtcccctaagaactaattctagctctgtttttttctgaatctggatctcatctttttctttgactctaggtctctgatcttggttcctgaaatcactgtctgattctagagtctaagacttctgtggctgtggagaacctttttgaaactggacactcatattttgacctctgacccttccctcaatgggggacccggggtcttttttttttttttttttttctctgagatcagagtctcttttcctctagatttcaggttttgtgcctcagattaatccccacccctggggtgggcaacaagatatctgtggtctggggtctgtcagtctcgggatctgaggtctacatctttagaactgtactctctctcagtctggtgtgtgtttgagtcaggggtctctctctctggttctcactcagtaggggtgggggccgcagagtctctctctcctcctcctcctgctctctcctctcttgctcgctcccccgccccccccctctctcccgggtgccgctgctgccgttggctcctattctcctcctcctcctcctctctcctcctctccggtcgtatccggtcctaaatactccatatctcccacaccttcctctagaacgtttttttaaattgtgtggcatttacagaaaatnnnnnnnnnnnnnnnnnnnnnnnnnnnnnnnnnnnnnnnnnnnnnnnnnnnnnnnnnnnnnnnnnnnnnnnnnnnnnnnnnnnnnnnnnnnnnnnnnnnnnnnnnnnnnnnnnnnnnnnnnnnnnnnnnnnnnnnnnnnnnnnnnnnnnnnnnnnnnnnnnnnnnnnnnnnnnnnnnnnnnnnnnnnnnnnnnnnnnnnnnnnnnnnnnnttttttggggtggggggggggggagcagagccggggccagggaggggagcagctgaaatggagggagagagaggaccgggaaggctgggatgggagcagtggggaaggagagattggaggccagagggtaggggtagctaggggccgtaggcgccaggaaacaggctttgaagggggctgaggggaaaatgatgaagaggaaatagatcgccagaaatggtgggaagagagaaggctagggttgggggaagagctgcagaaataatttggaggtaggagctgagagatgaggaaaatattaaggaaataggaggacagagtcttaggagaggggctaggagggagaaatgaaaacataggggtgaaaaaagcaaagaagatggggggtagaatacggtggaagggctcagaggatggtagggggttgaagaagagaggaggatggagggaaagaagaaggggccagatggagagagagggaggcagtggggggtgggggaaatggagggtccagatggagggaagagaggagagagggaatgggctgggggaggatagaccagggcagggggagggccaaattatgtgtgtgtttattgaggggggagggggcaatagaagtaagatttgagtgatggaagtagaggacaggttaggaccctgtcctagactctgaccctccttaaggcctttgagcagtgaaatgtatcccctggggtcctatccgctcccttcacttcaccacttttacccccctcccccacctccagtccctattaccattcccccctccctcctctggtgtccctcacctatatctttccccccatatggtgtccgttccttatatgagtccccctctgtccttccctcatatcagtcctttctctggtccattctctctccctctgttctatctggtagctcccttatatctctaccacctcttcacctgtccttcatgatccccttgtctaaatacccctgttaggtgcacctcgtttcctctgccccatgtccagttgggctcttctcgtatattcccttgtccccaggaatttactctcatttctgcgttcttttctctgaaatctatccctgtgatttgtctcccaggccatcctctgtccctgcctcactccccatcttgtcactgcaaatctatgcctacccactttcccctaacacctcagctcttaccacccattcctcttttcttgtctcctctacttcctggggtgttggagatttgggtgcaaagaggcaggttttgatggttggaacagggcctacaaggcatccccatctgatccctgtgggacttcttatcctagtaaatttttccctttcctcagctgtgttggtctgtctcttgcatctgcctctcagaatcatccttacttaagtctagacagtatgtgtgtgtggggtgtatgtctccagagtggcttctaagctaagatccctgtatccttccctgctccccaggaggaaggtatcccctgaactctaacctgcctccctgtggttgcagcctgaaccagcccctccaagaattattagatatatcaacagatttctcctctgggagtcctcagagtctgagtgcagtgggcatgttgcctgcagtgtgtgcagtctcagagcccagggactggtgatctctgtatctggcgggtatcagatggaatctctgagatggctctaagatggtgaaagtctcaaagtgttggggtttctgaagattgtatgctaggggttcatctctgactcttatttgcagtttgggtaaatttgaagaacacgtttgtagacagaaaggggctagacttttcaaaaagtttcctgttcaacgtattcagttacagtgaagtttaagggccaagttattttcctgcactgtactcatgattatcttgtaaaggtgacagaatttgattcttcttcctctaaattgtttctcactctgataccttaaacccatttttttttttttaatttatgatagtcacagagagagagagaggtagagacataggcagagggagaagcaggctccgtgcaccgggagcccgacgtggaatttgatcccgggtctccaggatcgcgccctgggccaaaggcaggcactaaaccgctgcgccacccagggatcccttagacccattttctatccctttaatgtcaccaatttgatttccttctcacttccataaggcctgttgttccctgtgatggtgtgtggcattgggatttaaaagagagacagtttgcagggataggggattgggaagaacagctaaattgggtaagatgcccctgggggcacctctgagcatgggcaacgcttggtctactgttcttttctagaagtttgtctgcatccccagcttgagcttttggaggccccctctccatcccaggcctggatcttcctttcttccttccccttttttcctcaagctcctcactgtgccttggagaggttcctcacctgtggagttggctttcatcctgtctatggagactaagtgaagagagggggcagtatagaatctctgatctctgggcatggagtgagagaagagattgattcagtctctgttccttcaaacaaaggcatatttcctacctcctcactctctagccgtgcccccctatagccagatgttgacaagacctatccttcccctaccatcagaagaaccagaactttccctagaggttgagcagggttgggctaggggaggaaagagctgagaatagaggggaggcagaagaggccctctcctgtctctgactctgaacaggtcatctccctcccttcctctcttttccagatgtttagctctcagaatttcaagaccaaatattcctacacccctaccccatccttctttctcacagctgtgtagctttttccactcagttttacagctgggggagccaccttccctccaagtccttatcttctgcagttgtctagatgccctccctcttccctgtcccctgccaccaccatctgtgtgtgcttttcttctgccagttctgctgtaccctcaatcttttcattttttggacatggatggagatcttgactatctttctctgcctctgaatgtgtaccctctgtgtcatgatataattcccctcctggagcacccctctgtatttctttcctcaagtctgcagagccccctgtgatgtgatttcccctcctctccttccccccagacatacaggcttatcttctgttcccttaaaataagttaccatgtgcttcccccccatctgtgatctcagggcgggtggggtctcctactcccactttgtggactcttttcttgccattttgggcctctgtctcctaagtgcatagaacctcccttaccgtttctgtgtgtctctgtcccctagatgttcggggaccccctatgcatcgaacccaatacgttcattccccatatgatcgtcctggttggaacccacggttctgcatcatctcggggaaccagcttctcatgctggatgaggatgaggtgagcagagtgggaaggctggggaaagacctctgggtagcatggagaatgtagagagaaagataaggaaaggtttcattagcgaaggggtgagagacacagagaaggcaaaaagagaaacatttgcaagcggtctgaggaggatggccactgagattgagatttggattggggtgtgcaaaagtgcgggcattctctcaccttggccaggggatctttcagggccatgtgcagtgttggggaggagatgtggttctgaagacttaggggtggctcctgttgtagctctgcccagattatgggataggttaggacaggaaatagaaacaaggcctgggannnnnnnnnnnnnnnnnnnnnnnnnnnnnnnnnnnnnnnnnnnnnnnnnnnnnnnnnnnnnnnnnnnnnnnnnnnnnnnnnnnnnnnnnnnnnnnnnnnnnnnnnnnnnnnnnnnnnnnnnnnnnnnnnnnnnnnnnnnnnnnnnnnnnnnnnnnnnnnnnnnnnnnnnnnnnnnnnnnnnnnnnnnnnnnnnnnnnnnnnnnnnnnnnnnnnnnnntttagagagaccagttgggctttcaccaggcacatcaatggggggtctgggatataagggaagaggtgcctggggaatgaggggaactggaagtaggggacattttctgaagaacttcaagtggaagttggcagggactagtcagagtgtgggagctggggcccaggcagagctgttagagtgggggtggggggtgggggggtggcgggggggttccaattgggcactgggtcagcagcagaggactcatcagaggaaacagagggtacagatatgaaaggtagatgcccagattcagggagtgggggtgatttgggtaacctgctttagagagtgataggtagccttggagacaggtgaggtcatgagagatgtgcttctgatcctgttggggagggtgtggtgaggcagggctagaatcagagttggggttaaccagggtttggaggcacctgagagccaaaggagagtgtagagaggctggttagagcttccaggtcacagagtgaaatccaggtgtctaggggaggacatgatgactttaaaggcagaggtggttcaaaagtcccaagttttaggcattgaggggcatttgagtgattcactagtggttgtaggtcttgaccaaaggttggagtctgtaggatgaactgggggaactggaaccaataagagtggggattgttgtaaggatgagggtggggtaatgaaggaatgagagctgggcacaggtctgagtgggaatggtgggggtggatggggaggtgagcagtgtgtagaaccacacggggctggaagtgggtaggctgtggatctggggctaggggctagcaaggtggggtggttcttgtccagctggagaagattggaggattggaactggggatgaggctcagggagagggaatggctcaagagaaggaggcaagtgactgtggttgagtggggggcaagggaaggagatgaagggtggggggaggtgaccgggccctctgaggggagcggggaggttgggtcccagtctggccgaaagccgggccgtgggagggagacaagctgtagatcctgattataaatgcagcttctgctacccccatgacaggcacggagggagggaaggtggtgagggaggtgggaggttgggagagaagcggggacaatggaggaactgaaggtcaaggggaaaggggattaccagagtagcagactcccccggggttgcgggcatagctgagtcggcttcgggagaatttcccggaggggttttcaaaagaaatggaggaaagaggagggtgggacgggagggaaacgagggagagagactgggagagagtggggagaaagaaaccgactcatcccgagacacttggagtgtgtgcaggggccggggccaaaggtgggcaggcccggggggagaggaaagggaggttcccatttctcggtgggaaagggagaggcgaaggccggccggggccggtgaggtctgacacacccccgcatcccgtagatacacccccttctgatccgggaccggaggagcgagtccagtcgcaacaaactgctgagacgcacggtctccgtgccagtggaggggcggccccacggcgagcatggtacggcggccgagcaggctctcgtgccctggacagtcgcggggacagggctggaggtggacggggctgcaggggaggggtgggggtcgggaaaaagagagctgtctaggggtgggaggaggaggaggaggaggaggaggagacgacgacacagtctctcatcccgcgagtgggagcctggaaggagaaggcgccctcttcggggatctggagcgggaccggggttgtgggtgagaggccccagtggtctttgctctgtttcgctccccttttcctctccagcagtgaagtttgcctgttttcccggtacttataaaaatagtctccttagatctttagcttcccgtcccagcgttcctgcccctgcccctcccagcccttggtctgggatcgtggagagaatgacctagttcctgcccttcccctccccctcagacctttgcccaacccccacgctcccaattcctcttccagccagaccttctggcctgtgggccctccttcttttcttgcccccttttccctcttctcttcagctgcttctattttctgcagtcctgttcccccccccttctctttcctccccaatttctcttattttccccacccctcctgatttcctctttcggacccctcctggtcccggtggaacttcatcagaccccccatcatctcctttctgtctgtctgtggagctatctgctcagtctgtctctccaactctctccctctctccatctgtctcttcccctccctccctctttctgcccccccttctacccccctctttagtcatttaaaaaaagatttttgtcttcctgagaagttcgcttaaaaggtttccatgggaacagtgaggagagatgaaggcagagaacagagatctgcagccaaggtgcagagagatgccctcggcccccagaaacccccttgtcactgccatttaccactgcatttcccttccaggactagggatccagttcctctattcccccaacccctggtgacccctttcttccaccagcaacccctcccctcaggaatccagtatcccagtttctcttcctccaagagatccagtggccttagctccctatatatagccctcttctgataggcccaggtctcattgcccttgggggccagctctgggaccttgggtgggtgggtgggtgggcagggatgtgtgtcattgtcatggaaacctctgaccatgggggtgtgcagatagcacatttctgtgaagcaaaaccagggtggtggtggtggtggtggtggtagtggtgtgtacagagaatgcgtgtgatgtctgtcacatctgtgtgtgtgtgtgtgtgtgtgtnnnnnnnnnnnnnnnnnnnnnnnnnnnnnnnnnnnnnnnnnnnnnnnnnnnnnnnnnnnnnnnnnnnnnnnnnnnnnnnnnnnnnnnnnnnnnnnnnnnnnnnnnnnnnnnnnnnnnnnnnnnnnnnnnnnnnnnnnnnnnnnnnnnnnnnnnnnnnnnnnnnnnnnnnnnnnnnnnnnnnnnnnnnnnnnnnnnnnnnnnnnnnnnnnnnnnnnnnnnnnnnnnnnnnnnnnnnnnnnnnnnnnnnnnnnnnnnnnnnnnnnnnnnnnnnnnnnnnnnnnnnnnnnnnnnnnnnnnnnnnnnnnnnnnnnnnnnnnnnnnnnnnnnnnnnnnnnnnnnnnnnnnnnnnnnnnnnnnnnnnnnnnnnnnnnnnnnnnnnnnnnnnnnnnnnnnnnnnnnnnnnnnnnnnnnnnnnnnnnnnnnnnnnnnnnnnnnnnnnnnnnnnnnnnnnnnnnnnnnnnnnnnnnnnnnnnnnnnnnnnnnnnnnnnnnnnnnnnnnnnnnnnnnnnnnnnnnnnnnnnnnnnnnnnnnnnnnnnnnnnnnnnnnnnnnnnnnnnnnnnnnnnnnnnnnnnnnnnnnnnnnnnnnnnnnnnnnnnnnnnnnnnnnnnnnnnnnnnnnnnnnnnnnnnnnnnnnnnnnnnnnnnnnnnnnnnnnnnnnnnnnnnnnnnnnnnnnnnnnnnnnnnnnnnnnnnnnnnnnnnnnnnnnnnnnnnnnnnnnnnnnnnnnnnnnnnnnnnnnnnnnnnnnnnnnnnnnnnnnnnnnnnnnnnnnnnnnnnnnnnnnnnnnnnnnnnnnnnnnnnnnnnnnnnnnnnnnnnnnnnnnnnnnnnnnnnnnnnnnnnnnnnnnnnnnnnnnnnnnnnnnnnnnnnnnnnnnnnnnnnnnnnnnnnnnnnnnnnnnnnnnnnnnnnnnnnnnnnnnnnnnnnnnnnnnnnnnnnnnnnnnnnnnnnnnnnnnnnnnnnnnnnnnnnnnnnnnnnnnnnnnnnnnnnnnnnnnnnnnnnnnnnnnnnnnnnnnnnnnnnnnnnnnnnnnnnnnnnnnnnnnnnnnnnnnnnnnnnnnnnnnnnnnnnnnnnnnnnnnnnnnnnnnnnnnnnnnnnnnnnnnnnnnnnnnnnnnnnnnnnnnnnnnnnnnnnnnnnnnnnnnnnnnnnnnnnnnnnnnnnnnnnnnnnnnnnnnnnnnnnnnnnnnnnnnnnnnnnnntgtccatgctcctgtcgaccttgtgtcaacgacatgagtccccggggacccagttcctcaaaggcacacttgggcagtcagccgtgtgcaagctagtcctgtttcatagggcctcggtttgatacctgccaaggagggtgctgggcgggccacttgcctatattgatacatgtcgcgtctgaccctgagcttgcatgtccctgcgtagggctcatctccagtcagtatcctagtgtgtagggatgtgtggctgcatgaacaggatttttctctgtccctggtggcagctgtgtgtctttgcatgtgttccatcattggcctgggtatctgtgtcaatcccagcacgggtgtccagggcgtgtctggatgtgggtggtgtgcgagtgggggaagggagtgaatgtgtgtgagtgggtttcttggaatcctactatgtgtggaacacctttgggctgggcaggtgtgagcccctcatctgtctgggagagggggaagaaaagctgaaaaggaaaggagcagggagaaagtagaaaagtggggagaaaggaggtgacgaggaatgagggaggcttggctaggatagaaggactagctggagaatgggaatgtaggagatatttaagccagattgaggagaagagagcttaagatggggaactggatggaaatggagagagaaggggtctgggagctggggaggtggcgtggggagagcagaaaggcctgttcataagctatctcttgagagaagaaaaggggcaaaatgagagggcactggctggtgtagattgtataagatcaggcttagctggatgagggatggccactcaggcatagaggctggctcacggtgaggcctgtcaccacagggactgacattagagtttcctgtcctcagcacagagttttgtccccccacccccctgtttctctgctctgtccaactctgttcctcatcctgctctggcagcctccctccttggctctcctcaagagctgccagctgggtatgacaaggaagaaaggctgaaggaaaggttagggatttggcggattggagggcagggggagatttctgtgggtgatggcaagattagacaggttggagaggtgggagtccaagcccttgctgtgtgtgtgagagtgcaattgtgtgtgtacacagggtgtgtacatgtgtgggtgtgtgcacaatgcctgtgttacgggtgtgtgtaggtggctgttatgtgtgtgcatgtgtgtatacattgtgcagggataggatcacagtgtaaacttaccaggtttgcttgtatgtatacatgggtttgtgctgtgtttctgtacatgtcactgaatgcagcatcaataacagaatgtcctgtgtttctgtcatcctctactttctttcccgtgctagtgaaagtctttgtaaccatatgtgtatgtggcctccatgtacctgtgacttatgtgtgagctcctggatcttagttcctggtaacatgtaaggttatgttacttccaagaaccaagtaaaccagttagcaaatttgttctctttctgtccattctttagttccaaagcaaaattttagtggatttgaagtttgtctctgtgcccttattaggggagcttgcatatgagaagtggctgagtttggttctttggaatgggggtgaggcagccatacctgagaaaggcagaaactaagaaaaagacttgctaaccccttagatgcattgtttagtgtgtcctagaagggtaattgatgcatttactcattttttccttcttgggagagcaatcatgggtgcaggcgtcagagtcagagaagggctgggggagaagaagggatcgtgatggagtggatatggtcatacttttcatgtgaatgaagaatgtttgtgcttttggggtaccaggataccttgctgtgattgggatcatggtatattcaaacatgtagcttagagattaaactggcttgtcgtgcgtgtgtgtgtgtgtgtgtgtgtgtgtgtgagggttaggtgtccatttctgtaatgtgctgcccacatgattgcccaagggactggggccacatgtccacaccagcaggtgtctgggtccaaatgtgtactcccctgttgcagtgttcacatatgtctaagcatatcccgtgggggtatgtgggcctcaaggtctcagaatgtggatctgtggcactcccctgctcacagttgtctgtatgtctcataagcacctagatctctatttttttgtattgtggttatatacacgtacccccacagttcagtgtgtgtttctgtgctctctacacactgttcccaagggttgcaagggttcctgcgtcatggggcccacattattgtgtgcggaccttctaacacctgggctttagaggcaaagggaagctggagactgattctagggcaagttgctggtgatttgcaattctggaagtagacagtgaaaatgtagctgtggtcctgcctagttctggaacctagagagttaacaggcagctcttccggtccccgcccccccccccccagcctgtagcttcttgttgccttggaaatggtagccccgcccctgatgcagcacctgcccccccattggctgcagtggtgactgtggggctgaagggggagcccaggcctgggcagccattctggagctagagccggaacttggcatgcccccactttcattctcctctaaccccttggcccctctaaattccctggcagcagagcttcagcttgcctcctcgagctgccacccctccatactcctggcaggctgagcttcatccgcattctcctcccctcctcctcttcctctccccacccttacttgggagtcccctgaacctccactgctcacccccccactctctgcccactcccccactcccctgcattcctttcttttcctcccaaccccccttcccttctgaggccctgccactgcagtgcacgtggaccggccccttcttccccctccccccatctgccccttccctgaatttcctgtccccaggcttcttcccctgccactcctcacaggtcctttctaagacttcccccctccagaccagggagggggtcatgggaggcagccctggccctccagatggacaggggttccaggatgggggagctggtggaagatgtgcccagctgaggggaggggaaagcctgcctcaggtcaatgacttttaacccactctcccccccagctagccccttcctgggggggtgggcaccaaggacctagcttgtgtggatctttagtgtccttttaccactgaggttttactgaccccctcagccatgcccttctgctgactgccagtcccagtcatgggcctaaggcctcccaccccatccccttcggggggctccggctcgggttctttaccccctccttcccgccgccagcctctcagccgacgctgctcttcctgctgctttccggggggtaggtgaggctggagctgaggggtagagggaggtgggcgaatgggttggggtcagtggtggtcacctgggctgacagcgacccctgccaacctcccttctggctctttgcccccctccagaataccacttgggtcgctcgaggaggaagagcgtcccaggggggaagcagtacagcatggaggccgcccccgctgcgcccttccggccctcggtgagtgaaggcgcttgccagatgtggcccagctgcgccccctcccctccagccccagctggagcccagcgttctaagaaagggggctgcagggagagagagtgagagtgcgcgcacttgcctcttcccatctctttggtttccccctccttggctctgtccccctgcttttcagaccagccctcccaccttctccaggctggtgtgtgtgtgtgtgtgtgtnnnnnnnnnnnnnnnnnnnnnnnnnnnnnnnnnnnnnnnnnnnnnnnnnnnnnnnnnnnnnnnnnnnnnnnnnatctccgtttcctcacctctagagactccccttctttccctcccactttcatccagggactctttaccagctgaggggggagtacgtagaactgacctttccccaacccacccctatccccatttcacccccaccccagcaaggcttcctgagccggaggttaaaaagctccatcaaacgcacgaagtcacaacccaaacttgaccggaccagcagctttcgccagatcctgcctcgcttccgaagtgctgaccatgacaggtacagggattagagccggggtggatgagttggatacagtacaggggctcttgggtgagactggagggcaggggcttgtccgggctcagagagcaaaggcctcagattggatgagggatgttttggggcaggagacagaatggagaagaggcagtagcaggagaggggcagggtgcagggagaggacaagcagagaggcaggatggggaatgaaggtgaggccaaggagggcctcttccagacaacagaaggatgggttccagcccaggattcagggagctctactggacagagaagtagtggagcccaggaggaacattgaagggatccagagaagggggcagtgggttgataggagagggagcactgtgagctagggagcagggtgtgagggaatggcagcaggttgaagtggggatgaggctggcaggtgctaatggaggagggaaggggaggctggcacaagtgtacaggttgatagaatggccaggggaagctctagggttaatcacagactagagaatgaggaagaagccctcagagaattcgggagggtactgtcagagagtactgtctccaaggcctaggccagcggtgcaggagatctgatattgcttctgttgtctgcttcttgggtcctctttgggtttctccctcacccagtcactccccagggagaaccctgtccttccttttcccccatgtctgcccgcccccaggattgggcaggtaggaaggttgggataggtgagtcacaccttcccctacccccctcccatgtcaccagagctggatttgagcctggtggggggggggggtgtggggtgaaggcatggtattcctggcccccggggccggggtggggggtggggggctgggggagcgtctcgctgacggcaaaggagcccaagatgacggggctgctataaatagcttcatggaggctcccacacccgagctccccctcccgctttcccactgctctccactcttcctcccctagccatctcccagccgctcactatcccatccctctgtattgtgtggcccatgtcctccgtccctcagccctctgtaccttctgctgtgggggggagggcagtttctgccccccccacccccgttcccatgcccatctttccacctgctcctcctcatcttctcccatcccgtctttctgcacgtggctttgcctccacctgctccctcctgccctacctcctcctcttccccaggccccatttcctagttcttccttctcacttctctgcccatagctttctcctatttcttgtaacttactttccctctttctgctgattttgctcaaccttgtcctcttcatgcattctttttggaatcactaaatgtttcttagatgctagctgtgtgccaggcccaaagagacatcttctttgtacttctggttcttgagttccactttttttcctttatattgagactctggtttcagctagaagtcctacctggaagtgtcccaggctcacctgttctttttttttttttttttgtctcatggatcattttggggttgagatatttccaggtgtccccagtaccccctcaggtgtgaattgggggtaggggtctcttaaagcatcctgacttctctcactttcctcctgtccttccttaaggataggccaatgttcttttcatctgtgtccccgtgggggaaggggattcacggggctctttccccaggtctccatcctagagctggcccctgagtgtgtaagaagagtgaggccctgaccctgtggcctgacccttccccgccagggcccggctgatgcagagcttcaaggagtcacactcgcatgagtccttgctgagccctagcagtgcggccgaggccttggagctcaacttggatgaagattccattatcaagccagtgcatagctctatcctgggccaggaattctgttttgaggtactgggtctagtgggctggggagggcaggagtgatggaggatgagggcacagagacctggagaaagtggcacaggtggggatgatgaggaaatagaaaacctctaggcctgggagagaggagggtaggccagggaggggaagacatggtgatggggggtgtctcaggtgcttaggagtcacctcccctccagagccccatctcaacccccacctctctctaggtaacaacgtcttcaggaacaaaatgttttgcctgtcgttctgcggccgaaagggacaaatggatcgagaatctacagcgggcagtaaaacccaacaaggtatcgggagtaaaggagacaaagacagcatgggcaaggcaaaggtcaagccacaggggaagctgggggcctagggggcaaggtgagccaaagggaagggaggcctggggaggaggggacctggatgaccaggaggtgacccccacttttctgaactgcccacttcctttaccatttttttctgcctcatggtctgtttctctactgtagaagtcacagacctagagtgttgatctgtcttctatgtaggcagcggtgccccaccagcaccctgacagccggatgccgtgcccctgcttgccgcatctccatgagactcttcccgttgtcagttagccaagcttccagaccttaatttcctctccataaagctggtgggaatggggtgtatgtgggaattgggtttatgtgggaattagatgatctctaaagtccctctggctcagaaattctgagtctgcattcttcccaaggcttctatttcctaggagaaatgcttccggttccaccagctcttcttggatcccagggtacagtaagctcacagccctggtgacccttctctgggggatgccttgtttttcgttgtctataactagacccaagaggctggatgctgtttgacccatgcagagtcggaacacctgctctcttcactcagcagcatcctgagcttcaccaggaccttgtggtccactgtatgccccaagcccttgcacacgaactctgcatatagcctcacccatcctgtatttttacaactcgcttttttgtttttgcaatcaatctctggttgtctttggggaggaccccccaattctgctctttaaattccaccttattacctttggtttattcttctagcttttgaaatttttcccagtgccgattctattgtctgatgtatgagctaccatctatattagttttctagggctgctgtaacaaattactataaacaagatcacttacaatgaaagaattttattcttccaagatttagaagaccaaaagtcccaaatcaatgtgttggcagaaccttgctccctctgaagctctaggaagaatccttccctgcctcttttttgggggttttttgggtcatttttttcttccttgcctcttgatagctccttgacttatagctgcatgggtccaatttctgcctctgtgtgtgtccggtgtctaaatctccctctgcatatagatatgaggcattggatttagggcccactctaatccagaatgaacacattttaacatgagtagatcagcaaggacccttttgtcagtgaaggtcacattcataggttccgagtggacatgaattttggagaagggtacactattctacgcggtacacatcttctcagccttatgattgctgtcttagaggctctgtctcgttttccaactgtctctcctcttctggtgtctctgtctcctctcccttcccctttacctgccattcccaccccaccaccccaggacaacagccgccgggtggacaacgtgttgaagctgtggatcatagaggctcgggagctgccccccaagaagcggtactactgcgagctctgcctggatgacatgctgtatgcacgcaccacctccaagccccgctcagcctcaggggacaccgtcttctggggcgagcacttcgagtttaacaacctgccggctgtccgtgccctgcggctacatctgtaccgtgactcagataaaaagcgcaagaaggacaaggcgggctatgttggcctggtgactgtgcccgtggccactctagctgggcgccacttcacagagcagtggtaccccgtcaccctaccgacaggcagcgggggctctgggggtatggggggctcaggagggggtgggggctcgggaagcggctcagggggcaagggcaaaggaggctgcccagctgtgcggctgaaagcgcgttaccagacgatgagtatcctgcccatggagctgtataaggagtttgcagagtatgtcaccaaccattatcggatgctatgcgcagtcctggagcccgccctgaatgtcaagggcaaggaggaggttgccagtgcactggttcatattcttcagagtacgggcaaggccaaggtgagtgctgtgcccttaggaataggtggcctgggagtgggcacttgcttggggcaggggatggatagtagggatagggcacttctgtcttcagaatgagcttaggttatacagaggctgatccttggatttttccgggcctcaggacttcctttcagacatggccatgtctgaggtggaccggttcatggaacgggagcacctcatattccgcgagaacacactcgccactaaagccatagaagagtacatgagactgattggtcagaaatacctcaaggatgccattggtatggcccactctcaggtcttcttcccaaacctaccagatgcacatcccaaccctaaacttggctactccagaccccaagtcacccttcctcagcttgatgcttctaagcctagagtccccggactccagcctccaaccttgggatcctgggattccccaacccaggcagcccccatccctgcccttgacaagtgtgaccaccctctgttgtgtcccccaccccaggggaattcatccgtgctctgtatgagtccgaggagaattgtgaggtggaccccatcaagtgcacagcgtccagcctggcagagcaccaggccaacctgcggatgtgctgtgagttggccctgtgcaaggtggtcaactctcactggtgagactgggaacgctgggtgggggctggggcccgggtcatgtgttcatctgttcattcatctgtccatccgcaaaaaggactgagtactggtcatgggcaaagcggtgtgctgggggctgtagagcagacagagaggaatgaggcctggccccttcccttagagggcctcgcccagaatggatagggtcagagtggatacacagaaagccacagaacactttagtgtgtgttaagcaccaagtgagggttcccccaggcaacataagatcagaggaggccaagctttgattgagataaacagggaaggcttcacggaggagatgttccccggggctgggctttgaagactgggtggggttctgataagtggatatggtggacaaagaagccattttaggagaaagctatgggatgggcatgtgtgtgaaggtaaggggcctgggagctttcggggggccagcagttagctcaggtttaatggagcatgtagctcataatggagagtgcaggagaagaggtccggacagggggttgaacttagaatctggaagttctcagctgccaggctaaggagatggagttcatcggtaggtcatggaatgccattagtggtgcttgtgccaagaagtatcatgattgagaagagtggtgtggagcgtggggcatgactggagtagagggagcaaagtccaggctatttggaggtaatggttgatggatgaggtgtggatcaggacggagacagggaagggagaaaggggcccactgtgaaggcctctctgaggaaaggatcagctggagctgtcaactgcctgggaagaagggagcttgtctgtggggagtcagggatgactcaagaggccaggaggctggtgtttgagacctgtggcctcattggcagaactggggaagtcaggaggaggagccagtgtgggggcgatggtgagctctgctttacactaccggagtcagagtttaaggtgtcagtgggacactcaagtggaacagggaggtgggggagtgagctctgagccactgcagggagtgggggtcacgcaggggcacctccatccccattgccctggaatccagaagagttggggggtccgagctccctgtacctcaagtgaccctccatctctctcccatctctgtctctccctggtgtctgtttttcttctcctcctctccttgtctctctcatacatcctccgtctctcccctgcatgtctctctcccctcaccttctctccccctccatttctctctccctgatctgtctgttccctctgccataggcctcttcttccagtagcctcccgtcttcctgctgcagaccccccctccctgtctctcccccactctgtttccacaccctcacctcctaccacccccctcagcatgttccctggaagctgagggtctctggggctcagtcctggtctctctctttctttctctctctctctgtctccccctcccttcccctcagcgtgttcccgagggagctgaaggaggtgtttgcatcttggcgactgcgctgcgcagagcggggccgggaggacatcgctgacaggctaatcagcgcctcgctcttcttgcgcttcctctgcccagccattatgtcgcccagtctctttgggcttatgcaggagtacccagatgagcagacctcacgaaccctaaccctcatcgccaaggtcatccaaaacctggccaacttttcaaagtgagggaagcctcaggtgggggtagggtggggatggaggtggcaggaagggtctcccaagtccccagagaccctgagacaggcgggtgtgaggcctgtgcgcgcgcgtgtgcgtaacacctctaccttctggatgccttggccaggtttacctcaaaagaggactttctgggcttcatgaatgagtttctggagctggagtggggttccatgcagcagttcctgtacgagatctccaacctagacacgctaactaacagcagtagctttgaaggttacatcgacttgggccgagagctctccacactccacgccctactctgggaggtgctgccccagctcagtaaggtcagcagatgcccccctgccccttccccagatgtctccagaggctcccatggcctgagagaccactccctgcacagtgctttctctcctccctgtccccaaaatgtgtctccactgctcccccagcttggacacccttcctccactccctctggcgctctcttcgagctgggcgctcagccctcaggtaacagcctcacccttccaggaagccctcctgaagctgggcccactgccccggctcctcaacgacatcagcacagctctgaggaaccccaacatccaaaggcagccaagtcgtcagagtgagcggcctcggccccagcctgtggtgctgcggggcccatcagcagagatgcagggctacatgatgcgggacctcaacaggtgagtacctggggctccccgcacctgtgccctaagggcctctacttttctcttccggatacgcttccctgggcccccgtgcatctctctagggcttgagaggaaggaaaaagaggcaggctctcagagaaaatggtaaggagacaggtagagtcagcggttagtctgagagcccattagggccagagagagcaagaatctcagagccccaggaagagtgcggaggctcctccggctccagcttgctatgagcctggggttcctctcagtccctctgcctctgtgcctgtcccagagctgaggttcagccagccacgtggggtcagccatgtggtaacaaaacgttgaactagttgtactagttggtaaataagcactggcccagccacccaccagaactgaacaggcctcaatccagcaattgagaagtagcatacacaccctagcaggacctcctaagccccaacatctgttccaatgcagtggcctcaactgctgcttgttctgctgaccgccccacttgttcctccagcctagtctccctccacaatgccatccccattccaccattcccacctctccttccatgcgtccacaccttccacccacctccttctctgtctgtgcttgcccctcttcccatctctctccagctccatcgaccttcagtccttcatggctcgaggcctcaacaggtgaggggctctcccctccccccggccccctctcctctcctgtctgctccccctccccctccagtggccttcactctcctctcctcttctcttccatgcaccctcatttcctccatacttgcccagacccacccctcatccctcttctcggtgcccacaccttccctcctcaaggctttgctcccttcccagaggggcctttccttcctccttcccacgtgtcacctcccgtgctcccttccagccttttttaaagctgctaccacagctttccacctttcctgggggnnnnnnnnnnnnnnnnnnnnnnnnnnnnnnnnnnnnnnnnnnnnnnnnnnnnnnnnnnnnnnnnnnnnnnnnnnnnnnnnnnnnnnnnnnnnnnnnnnnnnnnnnnnnnnnnnnnnnnnnnnnnnnnnnnnnnnnnnnnnnnnnnnnnnnnnnnnnnnnnnnnnnnnnnnnnnnnnnnnnnnnnnnnnnnnnnnnnnnnnnnnnnnnnnnnnnnnnnnnnnnnnnnnnnnnnnnnnnnnnnnnnnnnnnnnnnnnnnnnnnnnnnnnnnnnnnnnnnnnnnnnnnnnnnnnnnnnnnnnnnnnnnnnnnnnnnnnnnnnnnnnnnnnnnnnnnnnnnnnnnnnnnnnnnnnnnnnnnnnnnnnnnnnnnnnnnnnnnnnnnnnnnnnnnnnnnnnnnnnnnnnnnnnnnnnnnnnnnnnnnnnnnnnnnnnnnnnnnnnnnnnnnnnnnnnnnnnnnnnnnnnnnnnnnnnnnnnnnnnnnnnnnnnnnnnnnnnnnnnnnnnnnnnnnnnnnnnnnnnnnnnnnnnnnnnnnnnnnnnnnnnnnnnnnnnnnnnnnnnnnnnnnnnnnnnnnnnnnnnnnnnnnnnnnnnnnnnnnnnnnnnnnnnnnnnnnnnnnnnnnnnnctgttgttccaggcccctcaatgacaccgcaggcgtgcgtggtgatggcccaccttcctcccatcaccaccatcaccatcatcaccaccaccgaggtggagagccccccggggacacctttgccccgttccatggctatagcaagagcgaggacctctcctcaggggtccccaagccccccgctgcttccatccttcacagccacagcaacagtgatgagtttggaccctctggcactgacttcacccgtcggcagctctcactccaggacaacctgcagcacatgctgtcccctccccagattaccattggtccccagaggcctgccccctcagggcccggaggtgggagcagcggtgggggcagtggtgggggtggcggaggccaaccgcctccattgcagaggggcaagtctcagcagttgacagtcagcgctgcccagaaaccccggccatccagtgggaatctgttgcagtcaccggagccaagttatggccctgcccgtccacggcaacaaagcctcagcaaagagggcagcattgggggcagcgggggcagcggtggcggagggggtggggggctcaagccctccatcaccaagcaggtacgtgagggtgggaagaaggacggatgggtgaggaacagggagggtggaaggaaatggctttgtggaagtgggggcagaatagagtctggcatctgaaatcatacttttctcacatcctctcattcattaaagaaattgtatacagagtccctgctaggtgccatgtcctgttctaggcactgtgggtttgacactgagtgccacacacaccctgccctcatgaagctcacctctccagaggggagacatgatatgtaattaaatagcattcacaaggagattgagactagagcaggggaatgagatgggaatggtcaccttctttagcagtgctctctcctaaatgcaccctaccttttcccacctttcctctctcttcacttccaccttgccccatcccagcattctcaggcaccatccacactgaaccccacaatgccagcctctgagcggacagtggcctgggtctctaacatgcctcacctgtcagctgacatcgagagtgcccacatcgagcgagaggagtacaagctcaaggagtactctaagtcgatggatgagagccggctggatagggtacgctgggcccctcatcttcccattacccacaggggcaacctctagatgcttctcagggaaggacccaggggtcaagtagttacagtggaaagaagagacaaagacctgatctcctttcttaagaagtgtccagtctattaggggacactgggtacacagtctgtcggaaagccaacttccaactttattttgtggcttatacacatcatagactgcggagaaacgttttatgttaaagcttatttccattttatttccatgttcttccccagggagaacagaagccccgattcctatgactactcaggaaagggacagctagctactctgccagcagtgtgagctgataaattgggtggggggccagagggctgcagttgtactacagaccatgtccagcttacccaggcattgttccaccagcacagatgatagagggttggtgttggaaagtggtatatgttggcccacgtgtggaaagaccagatcctcagctggtggtggcctagagcaaaagacagcaagagctcagggcacacacacatagctcagcagtgctccttggagaggctgttgctccaagggctctgaagaagagggtggctgtaggattaggttaacgtaaagactgtacgactccaactcggggaagcagagagaggtttcttgggagctgtggtttttgagcagaggaaaatgttgggactgtctagatggacttggtatagcaagtcccatgagagaattaagccctaatgcccaaggtagccacctttggtaataaatgacatctctcctttgcttccagagtggggttggttctgtatgtatcatctttggagaatgagaaaatactctcaagtcgttttttctgtactatgacttggatgagatatttttgttgaggaaggctctagaacagtaccatccagtagagttttctgcagtaatgagaaacgttctatgatctgcatcgtccgtatggcagtcaccagcctcatgtggttgatgcagctgaggaaggaaattttgttttatttacgttttaaatagccacacatggctagtgtctactgtattggatagcaccacagctctagactctagagccagtagggcagataaaatgactcctctgtgcccttcgagccccagaattccagaatcattatcaacagaggcagtcttagattctcagcctggagttgtttaaagcccagacctggaaccccacatagcctctccttatccagtgtcttttcttcctgggtctccccaccctccccatgtgctctggttggactgaggagtcaccttaagctttcatttctaggtaggatcactcaaggtgagtgggaggggagtctgtatatgtttgtgtgtgggtccttgtgtgtccagatttacatgtgcgggcaggtatatactgctcagggcatgggagcatatgatcttggtccattttaaaggagccttaggtagctccatagaagggtcttctcaaaagccaccatgtctggtataatcagcaggcagggaaaggactgcagaaggcacctgggttatctgtcccttaccatgcagtggctgcttggtaggcaagaatggagacggggtggtgggtcagggtgaggcgcccctcacagtgcggggtcgtttgcccggcgggcaggtgaaggagtatgaggaggagatccattcactgaaggagcgactacacatgtccaaccggaagctagaagagtatgagcggaggctgctgtcccaggaggagcagaccagcaaaatcttgatgcagtatcaggcccgactggagcagagcgaaaagaggctaaggcagcaacaggtggagaaggattcgcagatcaagagcatcattggcaggtgaggggcggcctggggaggggtcacaagggagagcctgaggctgaggagagccagcaagttccccctctagccttcagccccaaactcaggacaccatgaggaaagcccaccacctgctcccagagattgccactcactaccaatcaccaaatggggagaaacttctcgctcagggcataaatgaaccctgatctctctcccgatagagtaacttcttaaattcttggactccccactggttagtctcaatccagcctgtgatgttctccccaaatctaagcagagacctctagccagagtagcccctagccattcctatcctgggtagcccctccctccagccctgaaaagatgttctcttagaaactgaatgaccaaaaaaaaaaaaaaaagtaaaagaaaccgaatgacccttctgttagcatatgcacattttcaactgctctgccaaggcctggcttccaaagaaggtatctcagcaaggcggtcagcttatcctgagaagtggtgggactccaggctggactctaactagagccagtcccattttgatccactctgaatgtagtttggattaagattaattagaagaaaaaggcttgacttgaaacttactttgaaaccctgttgtaattgacatccttgatgggaaatcgttttgagaatcttcatcaaaggcacggaggtgctgggaatgatgattgtagagacccctcttggtcttggggtatcccaggggtggcactggtggtgtcctaggttcagtgagatggaatgggagatgtagaagtgaggccttcagccacagaggggctgtgggagggcactgtcctgaatgggagggtggagggccaagggggcatctgggtgatagaggtctttgaatcccagaaagctgtccttagcagggagatgtgagggtccctgaggggaaggttagtatagggagtctttgggtcataacaatagaaggattctgagggcagaggagaaggacgcctgaggcttttccagagagctgcaggggctcccccaggatcaggagttccactggcaggctccgagcccgtgcccgccactaaccccactgaagcccgtcccttcaggctgatgctggtggaggaggagctgcgccgggaccaccccgccatgcctgagccgctgcctgaacccaagaagaggctgctcgacgctcaggtggaaattacaatgtcatttatcttctccgtgtcccatccccatccatcccactgtcctttgtgcactcactgcaccagccacccagccccattgccatctgtctcccactgtcctccatttgtccactggctgctcctggcagcacccccagtgaccccatcttcatcccatcgtctatgcctttgtcactcctagcagtgttagccccacccctgtgcctttctactctgtctttcccactcctgtctgggtcttggagcatccagcagaacctcagtctctttgcccccagatcccacccagttcctggcacccctgccccatctgtgcctgttcctgttcacacagggaattcagcctcctctgagctcttcttgggctacaggggctagaggctgtagtttgctagaagagagcacagggcagtacgagttctagcttcccaggttctaaatggcccccatcacctcttgcctcctcaattttcctatctcctggatagctcccgaatagcttcctcctctgactcttcagctcttgaaagcccccccccacccccaccctgtaagcttgccttccctcagtatttaaccccagtgaaggcctctggtccttaaacctgtccagctctccagcgccctctgtcctcagccagcttttagaacttctatcctgcacccttgccccttgctctccccaattctactttcccacccatgctgctccttcctctgctctgaccgccaggcttccccaccactactgccaaggctcctgaccccatgaccccactctctccccctgcagctcctcatcaggtaattctcctggttcctttgaccacgggcggaggacacagggggaggtgactccggaccactgcaggttggtcatgaagcccactcccctctgactctctggagcctttccccaccccacccctcactgctgccctccacataccctaccctcctgacacctcctgcacagacccatctcccaaaccactgcccagagagagcacttcttgctgctccgggaactgttcagggacaccttgccaacaccaagcattttacctgggacacgcccagcacatccccacatctctctttgacaaaacccaccgcccagcctcctctcaatcctctgcctgtgcctctccagtgtatgtctgtcaccccccatttcaccagagcgtccttgggagtttgggacgttgggagtggggcttgttaaggggtggcagtgatgacgggttgggggaccctggctaaaggggctatgctgactgcagcaggtaagtgggagtttcctcttctttccctaatctcagttctccacccctcctcccactcctcacctgtttctctcttcctcctcccttatattggtgagatcgaaggcatctttagctcttattgggccccactgggtaggaactaggaatggggagctaactcaggaagactttgggggagggaggctggaaagaatgcttttcatgatggcaggacactaggcagggtgagtggaacaaggaacaaaaaaaggagcctcggcagatgtcaggacgcagaccagcccatgtggcgtgggagttggaagtggggtgagccgtcttcctagataagatcatgggctcagtagccatgtggattccgaggcagagatgccaggaacagcatgttaaataaactctgttcttctcagcggagctcactcctcctctcccgccacccagtggccttgcaggatgcagtcctacctacaaaccagtaaatgggaacctgtcagccactgacatcatttctgaggggctttctttctgtgggattgatctgcagtgggcagtggctcctcacactgtaattttaacactctgcctgcccagcctctttgtcaaagtagttcgtgatctgtaaacagatgctaaaaggcaccaggggacctcaccatttaaaggactcctgcagtgaattcttttgtaaaatgaataatggcaccctaatttatctacgttctaaatttgggtccatgggggagtagggggcatgcctatgttctgttgccagcagacaagcagagagaagggaatctgaggtttccttcccttgctgtcctgccatactcaggatcccctaccatacataatttcctctctcgctgacttgggagaagtgtgtgagatgctcagcaagctaagagggtggctttgcttaaggctggggtttcagtgacctgagaggtgggttctttgatttggaagggagagctgatctcgaggcctctacttagaatatttttgtatcctacagagatatggttacatgtaatgggcctaaatgccccatggcccgggaaataatctggacactttctaaatcacttttaagcactggtccctctgcaatgtaaccgttcgcttaaaagttaattttgtgcctgtatcttaaataaaaggcaagtgagtgaccagaagtgtcatacaggagtaccacagtgtggttcctctcccagcataggaacagaaaccagatgtgagggcaggaggcaggaggcaggagctggtccaggggtgggagtagggtctgctacccctctccctctaactgggatcccagggagagggattgaaaggaacatggaggtggaaaggaatgaagcagttttgcttcctggggacacagggatgggggcacgctgtgcctctgcagacactcctagtcatttctgcccagagagaggcagccctcccacattttttaccatcccccatcacttcctccaatcccttgccttcccccctcccccccaccaccccagtacagttaaacctctctaacttggactggtatattggagaagatgactgctctgaacaaatgacaaaactgaatggcagtgtctatttaatgaaatgtatgtcttcaaaatacatacagtaagtggggctcaatgaacaaggcttttccactcgaggtcctcagggagcatgcgttaatgaatagatagattcaaaagcctgttagctggtaccctcctacagacacgtttctactgttaatttgcttagcacaccctttcttcagagctaaaggaaaactcaagcccagtttttgttcagattatgaaaaaagtccaaatccgcaggggtttggattaatgaggttttgctgtactgcctccccttgttccctcaacacaaagttcctacctcggattgggggtgggctgggagggggttccatctaagaagaggagggaggctgggtaggggaagatccaaggggttaggttggggtgaggtaggaacttgtttcatttgaactggtttcctggtatgactccctgggttgaaggcctgttaggagtcgggggtgagattctcttctccctgatcccagaagatgtaacttcctctgcaggtgagaaacaaaataggaggatggggtgaggggttgtcctgggggcagggagggagacacggtttatggagtgggttggctactgggggggcacagctcggggagctggcacccaggctcccgcgaagcgtctcaataagtccgcgctctcctctttggtgtcttgcaggagaggcagcttccccccttgggtccaacaaacccgcgtgtgacgctggccccaccttggaacggcctggcccccccagcaccgccccccccaccccggctgcagatcactgagaacggcgagttccgaaacaccgcagaccactagcccacccagcatcacagacctcctcctccctcccatgcaccctgccctggaacagcacccaccaccaggactggatgttgcctatggacagtgggattgcctccctgaatgcctccttggggggcaccaatcccccacccccactgcaccatttccagcggggaagagtggggacccttagctgccccttttccttcctgttggagtgctgccccctgtgacccccagggacccttgccccaggacaccacctaccccacacagaccccttcagtccggggtgctatccccatcctctgcctcatcgttcccctgagcactgggggacagaccctcacccccaccctgggggtgtggcacctccaaactttcaacttcagggtgattttttagcagtaaccagagctgacaatctaattcccctccaccgccccattttggcctcccctgtcccccttgtaatggggaggggaccccgggtgagggggccctattaccccttgatttctcaggagcgtctgggggggctcagcacgcacaaactccttctcttcctactactcttaaatttactccctccccacccagaacccagatggggtggaggggccaccggggcagggagggggcggcaaggggggaatgggagttgtctccccttcctcccacacctgatctgctcttggctggtcccagagcggggtgagggggcttatgcccccccctcccccagtgtgttgggtggggtggaattgaggttagggtgaggggttagggtctaggagggtgtgtatgttagggaggacagactaggtgatctgccctacccggacacacacagccctccttgcccctcccctctctcttcttggtctctactcccagggggaggggggaacttactctaggaaaagccatgtctctctcccccagggtggggggacctgtgttggaggaggggtgttgggggcccccttccatgactctgtcccccccgggggaggtaggacagggctgggcttccctctcatcctcccccctccccaatctccctccacctccctccctcccgccagctccacaatttttcggtgtttctctgtacatagctctctggcgggataggggaggtaggatggatggggtttagggtgggtaggtcatgggaggggagaagcccctccttggcaccccctcttccctgactgctatcccctacccagccctgccccctcatcctttcttgcgtttggtattgagactctttccagacttcacccttctttcttttgtatgaacagttctccttcagacccatccccctacacacatacacccagccggggccaaatttatacttatataaaagttgtaaatatgtgaaattttatccctgtgccctttccctactttcccaaccccagaccctccccctggacctcctttcctcctctctttggctgttgtaattatctggggtttgtactgtacatatttgggggtgtgtgtgtgtgggctgggggcaacccctctgtatagagcttcctggccccctccctcccccaggcttccctccccctccaccaccctaaaggtaggaagatgctcttcctacttgttttattttgttttctcgttctccctccccaccttgtcccaccccactcccagccttctctgtcctccaccactatccctttttctccactcccagccccatttcctttttttctggagtgtgtggtgaaacagaaaaatcatgtttaataaacggagattgttcttttttcgctgtgctgactttcctaagctgggacattcagacgtatcaccctattcagtagggtgataggatctgctttttgagaggaagctggcagcctgggagaaaccatatccctgcatgatgccacagtctcctccagaatagcactctcccacccggccataagatgtattctgtttctgagcaggggttgtgacctggctaagcttacccaatccagctctcccctctccactgccccacttaaccctatgagtagagaggccagggagcaggaacactatctgacaaggaattccaagtatatatatctacacacactcacaactatatttagtaattacctagaaataaggttgatttaatggctggttaaaatgctcccgtacggaatggagcaaagaacttggtccctgaacaaatctgagttgcaatcccaggccggtcacttgccagcctccgtttcctccgaggaaactgagcagagcaacacctaccttgtagggctgggggagggtacaaggtgatgtggacgatgcctggcccacacaatagttcatctcgccttctcagcacttagaagggagcgggcgctacgtttaatcatccgcagggcttaagggccgccccctccttccaggctaccatctcccgaggcccagctcagattcctccgggcgtcagacacctcccgccggcaccgccttctcgcccgcgcagccaatcaacgcgaggctcgtagccctccgccctccgattggctggggctctggcaccgccccccgcacctggcgttggcgtccggcgcgaaggcggtggcttccggcccgggactgagcggtggctgcctgggcgccccggcccggtgccgccggtgtagccgcgggggcgtggcggcgggaagggcctcccggctggctggtgcggctccccgggagccggccctctgggcgccgtgagcaggagccgtccggggccggcgaggccaggccggggctggaaggatctcctcgtcttcctccgcaggccctggaagtgaaaccccggttggtcttttgttgtggtgttttagtttttcttttcttggtgggggagtgtgcgggcctgatctgcgggaaccaccactcactggaaagtttccactttgccgggttggggaggcgggtgttgttgcccttacccagagcttctgtgacccgcgtgcctttcctccgcagccttcgtcccgcgggggtgcgcccccagcccctcatctccagtgttccgccctctgggatttctctctctgaggaggccatatggatctctcgacgcctttgccccccgtaccctgctccccgacccgcaacccagccccacggacaatccagatcgagttcccacagcatagctcggtgctgctggaagccctgaaccgccacaggctagagggaaagttctgtgatgtgtccctgttggtgcagggccgggaacttagagctcacaaggcagtgttggctgctgcctctccctacttccacgacagacttctgctgggggatgcgccacgtctcactctacccagcgtcattgaagccgatgccttcgaggggctgctccagctcatttattcaggacgcctccgtctgcctctggatgctctgcctgcccacctccttgtggccagtggcctccagatgtggcaagtagtagatcagtgctcagagattcttagagaactagaaatctcaggtggaatttcaacctgtggggcgacgtcttaccacacttttctttcaaccacatcctctccaggaggctggtgcattcgctcttcctctttccaggccccagtgcagtcttcctccacctctagggagaactctgttttaggggaggggagtgaactgggagatgtgttacagattaaagttgaggaagaagaggaggaggaccaggggtcagcagccccttctcagacacctcagcctcagagggtatcaggagggtttccctgccctcatggatcccacccactgcctgtatccactacatattgtagggttccttgcgagagtgccccacttgagcctcctgcccttcatactgcaccaccccccaaagtcttctacattaagcaggaaccctctgagcctgaagaagagataccagggggtggaactcagtctggaggagcaaaggaggagaccaaagtgttttctggaggggacaccaaagggaatggagaactagggttcttgttacccttaggagcaggggcaacatatggaggaggaggaggtccatcctggaaaccagttgatcttcatgggaatgaaatcttgtcagggggtgggtggcctggagggggaggacaggctgtgcatgggcctgtgaagttaggaggtataccccctgaagatggaaaacgctttggttgcttgtgtggaaagcggtttgcagtgaagccaaagcgtgacaggcatatcatgctgaccttcagccttcggccctttagctgtggcatctgcaataagcgcttcaagctgaagcaccatctgacagagcatatgaagactcatgctggagccctgcatgcctgcccccattgtggccgtcggtttcgggtacatgcctgtttccttcgccatcgggacctatgcaaaggccaagggctgggccactgctcactggacttacaactgactgccaagggcatacacgaacttctaggataagagagccactgctgctgatggatactttttcatcaccaccatcacaccctgctcctggatcttgtaatcatgccaagaaaatagatatattccagacatctggttcttaagtgtggatgtcaacctggcagattctgggatctcagatttcttataaccaagttttttgctaaccaccccataggagggtggtttacagggcatatgtaaattgatcacttgccccataacagacctttcgtgcaggaaaccagatttcggattagaagtttggtgagagaaaagttagaacaaaagatgtaatgataaacatttcacttggtctccatgaggtgttgaaggagctggtctctattctagggatgtctgattctagggtccagtaattcagaaaccaattaaggtctatgctctcctctcccttgtcattgctgaaatgatttaggtagagttctttttatgtactttcttttgttcgatctttccagaagcctctcagatcataactcattctgcaccttcccaacacttcttttattaacattgtagttgagcactttaacaaattgagcgttccatgtgtcattagaactctctttttaatagaggatatcccctaaatagcctgtgcctcttgtttacctttgtccaccactgatcacccatatattgatcacggtgattagaatatgaccaaagaactcaggagatggccactgacctaaaatgctctcagggtagcaccactgtttttgaacaagtggctgttgtcagagactgagacagcacatacaggaaaggctgaagagtaactgcacagtaggaccataccccttatccatcccacttacacatgataggcccttgtttgagagagatagaagagtagatattggaatggggagactgtcacaggttacttaatttcttcaaataaactttgccctgaaatttaaactgacagtggattggattgagtaatttacgtgggagagacagcacgaaagcagagttgcaaagacttggatatgttacttatgcagcagggttatattgatgaggggaaaatgggatggtttcacactggtgcagagaacactgtcctggacttcagtgggccagattctaggccctgacttgccactgaatgatctcaggtaagttaccttatctttcagagtgtgaactgtttttgtttttgtttttgtttttgtggggtagtatgcatctcctaattggttctctgtcgtcttatttttaaagggattggttcatatgatctttacctataatcttccctgacttcatgtattacatataatgtttggtggttgtatggtttgttctacaaacatttagtgcaatgcagtatgctagacccttttactctgacctcaaaaagttcacagctactttcaaagctagacaaataataacactgtggtatgataagttcatattagtgggcagtacaggctaatgtaatggcataagtgaagtcaagagaaggtctcatacatcagcagaggtttcacaaagatctctttataccagagataataatatgggtggctgaacatgagtgaacttgaagttataactagggccaagattgatagctttccccaaagcattttccttaaaagttggtatgggacccagaacaggctgaaaaatgtgactttatggctgaggaggtgaattctagcttctgtaaagagccatgccatggtaccatcctcatggttaaggactgtgaacatattgggaagggagtcagggagagggctaccaaatgccacctacctgtcattcttttgacacattcagtaggtggctacagacatacctcagatattacaggttcagttccagaccactgcaacagagcaaaccaaatgcattttttaggttctcagtgcatataaaagttatgcttttacagtaacctagtaagtgtgcagtagtagtattatttctttaaagaaaataaagtatataccacaggcacttgggtggctgatgtggttaagcgtctgactcttgatctcagctcagatcttaatctcagagtatgaattaaagccctacattggcctccacatggcatgaagcctactttaaaaaaagaatgtgcataccttaaaaaatacttcgttgctaaaaatactaacaatcatctgagcttttaacaagtagtaatcacagaccacataactaatatattaataatgaaaaagtttgaagtattgcaagatttaccaaaatgtgacacagacacaaagcaagcaaatagtgttggaaaaatggtgccagtagacttgctgcaaacctttagtttgtaaaaataaaaacaaaaaacccctgcaatatctgcaaagtgcaataaagtggagcacaatgaaatggtgtgcctgtctatccattgagcaagatcctttggttgcaagcaagaaaagctggccttgaccttcccaaaacaggatctatggaagtatgtgaaatggctcctgaattggaaggaagggctgaaggaccagcctttggaaggataagcttgaggggtccagggagaaggattgctcctggggaatcttttcaggtcatgttttgggatgacagtcattcttatttcttttttattttttatttttttttcattcttatttcttttgttacttaagtcatttgagtggctcagtcagttgagtgtctgactcttggttttgactcaggtcatgacttcaggttcgtgagatcgagccccacatcaggctcagcacagagtctgcttggagttctcttcttctgcttcaggtctcgcctctggccagaggaccctgaatcatatgttccatccatcaaggcaacaaagtgggcatgtaatcctcaaggggaaattgaagtcctgggatagaagaggggaatggggaataatgctagccagccagcccacaggaacagaggtgcactccaatctccacatgttgcccatcttgggatccttaaagcctcagatatactcgccctctgaacttaaggcagaattgcttctttcctctccttagtctctgtaatactttttttattactgctgtaagtcaattaaaataccatgttagagttttgtttttgttttgaagttattaggaattatacagaaaacaaattccttaatgaaagatctggattgattgaaactgatttttaaagattttattatttgagacagagagatggagagtatagagggagagtgtaagggagaagcagattccctgtggagcagagaggctggtgccggcccaatcccaggaccctgagatcaggacctgagccgaaggcagatactcaaccaactgagcaacccatgtgccccgaaagatctggattttgaccagtgccctacttgagtcatggagtagccttcttcaggctcctctgcaaatgggccctgtggccaaaggccccagttcctgccacccaggatcgtgcacccaggcctgggaagggtcatgcggaggtttccaccagcccaggagctatcccctccagtggctcattcatggccacccatgactattataccacctgggttccacttccaggaatagcttctgcggaagtgcaaagtatctcggggaagccatctctcaccaccctggtctccccagaactgactgtgacctgagtcactggtgggcaaacttcttttttgggaagtctgttctctcagtcttgtttacagtactaagagttcccagaatgcttggaatctccccaggcctccagcagcacaatcacctgtgacttgactctggaagcagcctggtggctagccaggtaaagctagctggcaaaggcaacacaaggccccagtgtttgtatgtgtgtttttaagattttatttatttattcataagagacacagagagagaagggcagagacacaggcagagggagaagcaggctccccgcggggagcccatgtggactcaatcccaggaccccgggatcatgacctgagccaaaggcagacgctcaaccactgagccacccaggcgtccccaggccccagtcttgagtggtgttcaccagccacaaggtttcaagaggcactaggctcatcagagcctctcccctcccccatagactaggccaactgtagcaaacagaagcagttggattcttttataacagcaaaacaccaaaaaggaagttgagagaaccccactctttactatccaaatcacatgcaaaccttcctgacaccctgtaactatatgccttgcaccaaatggaaaataaactctaagcagccagttaaaaaaacaaacaaaaaaatttatatatatatatatataaattatagagtgtacctctctacctctgtcctctccttcttataatggaagaggtgtccctcctactgaccaaggctaatccccttcccaaaacccttgctcgtttaattaccccatctgttcatcattttcactctggagttcctcatttgtccttactcatgctcacaggtttgtaagaattaatacatgtaaaatgctgaggacagtaccttgccctcagtaaacttgataaatgttagctgttattatgagggagaccattagttccccactaatggggaacctttactgggatcagtgatctcagggaggggtcaaatatataaggggaaatattttcagctaagggggaaatgaggcatactcaatgtcattattacctttctcataaatactagagttcttcaggggtctttgcaccctcttctaactttatatattcctgggtgatttttatccactcttctgagttaaaccatttaaatactgatgacccttaattttatatctccatttttcccgacccccagattcacttagatttcctcctttccttccttcaacaatagggccagctggggcgcctgggtggttcagctggttcagcttctgactcttgatttcacctcaagtctccatctcagttgtgagttcaagcctactttaaacaaaacaaaacaaaacaaaaaaaaacccaatgaagcctgctgtgtacctggcactgatgagaagagcaggattatcacttgaagagacagatgtttaaaccaggtatgtctaaataaataaataaataaataaataaataaataaataaataaacaaaccaggtatgtctgtacttcatgggcctctcaagctcaatttgtctaaaatactgtatcccacctctagccagctgctctgttgtttcgaggtttagtaaaagttccactatccacccaaatgcccaagactaaaggctgggagtattcctgggcccctgtctcacatcccatactggccctatcaatgctatctcctaaatatttcaaattgatacgttctttcattcccaatactgctactgcaccctcctaactgtttttgtttttttttttgtcttgcttccctttgtgtctcattcccacacactatggccagagtgatctttctaaagcataaagtactgtttcactagctttccagcttaaacctttcatttgctccctcctgctctttgatgaagtccaaggatctgctcccaattgttgcactcttgccactcatgttttccttaggcctctgcttttttttttttctttttgctcctcatgcttatcactctgcctagaatagttacctaccctggaaataatctttagtgggctaattcttactctcttcagatatcaactgaagcatcacttcctttagaaatctgaccattaggccaaagtgggacctctgctgtgtactctaatagctcttattttgctgtcatagaattttcttggcatttcctttactcagtaagtatttgtcaactatccactgttatatgtgggtgctgttttaggcatggtggacagttcttaccctcataagattacattccagtgctgtaaggaaaataaatcaagtaataaggtggaggataacagaaaaggaaggcatgctgtacacattgatttagtatccaaaggagaagaaagacccagacttacaaagtgggacaggggagaaggttccaatacagtatgtagcaaatgcaaaggccaagaaagaaaatgaggcaggtgtgtgacaaaccaatggacttggagaggaatgagatgttgtcttagtctattggggatgctataacaacaccatagactaggtggcttataaacatttctcacagttctagaggctgggaagtccaagatcaagcaccaacagattgagcttcatgaggacttgcttccaggttcatagatgggtatcttcttaccatgttctcacatggcagacaaaggaatttccctgaggtctcttttataagggcactaatcccatttatgggactctaccttcatgacctaatcacctccccaaaggaggtgggagaatttgggggagaatactatcacagtggggggttatgatttcaacctatgaattttgggggaacacaaatgttctgtccgatgcagatgtgatagaagagataggctggggctgagttatatagagcctttcagatcatgttaaggcatttgggtttcatctgaaatgcaatgggaaggcaataaagagcttaaagtagagaggaatgatcttttaacattttaaagagattcctctagctacagagggaatattggatcatttggaggcaagagtggaaacagagacaaatcagactatttcagtagtacagacaagaggtggataaaagcagcagatatggagagaagtaaacggattaaagctattataattggaggtagggctaacacaggacgttctaacagattaatatagagattgtgggaaaataaaaatcaaggaagaccaccagaattttggcttgagtaattgaattagaggccatttactgagtggaagacagaagtagaagaacctgggagggatcaagggttttatctgaatggctagaagcagctggctgtacttgtccagtgctcttctacaccaggggttggcaaacttatgctataaaggatcaaatagtaattaggctttgcatgccaaaaagtaaaatcaaggatataacataagtacataaaaattaaagaaaacatttccacaatttattaatgacagaactcaaagtataatgattgagtacaattttttggtaatagaggtttgctgcttaattgaggtacaaagttagtattccctgtcatcaaaatcaattgcaaatgttcatttgttagtgtcgatctgtaatgagattttacatatttcgtctttgaatatgtctttcacacagatagtactgccaaatgctgatattaatccaatagtgtgtaattttaattgagcatattcatcacctgagagacatttatagaattcttttatattctttccttgatatttgccttttaccatgttattacattgtggattaatcacatcaaaatgaaggaggaaactcctcaactgcacaattaagtgaaatatagaaattttctttccacttgcattgagatttgaaaaacactgctggaactttagttcaagctcagaaaatatatatgcttcaaatccatgagggaatggggatcttgcttttttttttttgatcttgctttttgttttaacttttgatagcacaggaagtgtatacagccccttgacattacctgagattcattacctgatgactttgctgcagtatatgtttcctatattatcactgctttgccttgtaattttagattaaattcagtaggaagtattaccatgtttgcatcaagtatccactgatgggtgaatggataaacaaaatgtgatatttacatacaatggaatgttattcagccttaaaaagttaggagatcttgtgcatccctgggtggctcagtggtttagcacctgccttccgcccagggcttgatcctggggtcccaggattgagtaccgcattgggcttcctgcatggagcctgcttctccctctgcctgtgtctctccctctctctctctctgtgtctctcataaataaatgaataaaatcttaaaaaaaaaaaaaaaaaaagttaggagatcctgactcatactacaacacgggggaattttttttttttaagattttatttacttcatgagagaccgagagagaaagagagagagagagagagaggcagagacacaggcaaagggagagtaggctccattcagggagcctgatgtgggactcaatcctgggaccccaggatcacaccctgagctgaaggcaggtgctaaaccagtgagccacccaggtatccccaatacgagtgaattttaaagacattatgttaagtaaaataagaaaccagaaaagaaaaaatactatttgatttcatttaaatgagggattaggaacagccaagttcatagagacaagaagtagagcggtggtggctaggtaagggctgatgagaggagggaatggagagttactgtttcatgggcgctgagtttcagtttagaaagatgataaaggttctgcagatggatgatggttgtaaagtttctcctgccgacggtggtaagaaaagaggctacaaggcaagtggatctgagagatgaactttattgcaagcaccctcgggcgaggttccacgactcacggaggagaagagaaagagagagagagtgtgagtcgtggaagtcgcgctgggagggagttggcagggtccttttatcgggttgaggcaggccataggcttgtgtccgtattaggtaaggtagagaggtcatggggtgggagaagcccgtgatggacagttcccaactgggaagttcctgggtggaaaacttcagtttcctggtggtgacctggaggccgcagtgaaagtggcgggaaagtcgccatcttggagagggttggccggatgatccgccatcttggagccccggtccccccgctccccccccgcgcccatcaagatacactgcgtagcggtgtaaacgtacttattgttcctgaactgtatacttgaaaatggtttaagtggtaagcttcatgttacatatattttatcacaataagacaacaatatcaacaacaaataaccgaaccatgaatgaactaacggacataggcattgggcattagtggtgcaaacaaaaaagaaacaaaaaagactatatgtgcttcttatggaaaagaccatgaccacctatgaattagtctggcccaaaatattgaacttgaatgtgatcaagcctcaaaatataactaccaattcacagaaaatgcaggggacagggaaacatgtcaaaccacaccacagcgaggtaatcagcaaaacagactgcaagaaattctaaggaacaaacactccattttcttcaccaaaaaatttcaaagggacaaagggaaaggagggaaatctgtagtttcaaagattttcttttttagagtttattattacttttttttagtaatctctgcacccaacatggggcttgaactcatgaccccaagatcaagagttgcacacctccaactgagccagccaggaactccctaaaagattttaaaagacatattaactggggcacgtaggtggctcagttggttaagcagccaactcttgattttggctcagattatgatgtctcaggtcataagactgagactcacatctcctccatgcatagcagagagtctgcttaatattctctctttccctctcccactgccatccccatgctcattctctccctctctctctctctcaaataataaacaaataaataataaaagacataatagccagccagagtgttcagaccttatttggatcatagtttatttaaaagattaaaaaaaaaagcgagagagacaattctggcccttatgagataactggggactcaactaagtgactggacacttgctaatattaggagttactgttaaagtttttagttgtggggcatctgggtgactcagtaggttaagcattcactctcagctcaggtcatgatcccagggtcctgagatggagccctgcatggggctccctgctcagtggagagcctgcttctccttttctcccttgctggtgctgtctctcactacctctctctctctcaaataaataaataaataaataaataaataaataaataaataaaatcttaaaaacaagattttagttgtgataagggtattgtggtaaagaaggattcttgtctttggatggtatttgttatttatgggtaaataaatttattcatagttatggattgaataaaaatatcaaatatggggatccctgggtggctcagtggtttagcgcctgccttcggcccagggcgtggtcctggagtcccgggatctagtcccgcatcaggctccctgcgtggagcctgcttctctctgcctgtgtctctgcttctctctctctgtcataaatgaataaaaatctttaaaaaatatatcaaatatacacatacataagtactagataattgtataaattaaactataatttgtgtatttatagtcaatttttttagggcagcccgggtggctcagcggtttagcgcctgccttccgcccagggtgtgatcctggagacccgggaacgagtcccaattgagctccctgcatggagcctgcttctccctctgcctgtgtctctgcctctctctctgtgtctcatgaataaataaataaaaattttaaaataaataaataaatttaaaaaaaataaagatttttaaagaataaaatggaaaacaaaagaaacaaacaaaaaaacaaaaagtatggtttctttaagcatgtattttgcttttccagtaaaagtttattttaggataactgaatagttctagttaataaagagaattttcacagaatgctagttaaacaatgtaaaagaaataaaagaattagaaaaacataatttcatgaactccaacagaactgactcaggcaaggattatcgattggtgttaaaaccaatagatggggatccctgggtggcgcagcggtttggcgcctgcctttggcccagggcgcgatcctggagacctggggtcgagtcccacgtcgggctcccggtgcatggagcctgcttctccctcggcctgtgtctctgcctctctctctctctctctctatcataaataaataaaaattaaaaaaaaaaaaccaatagatgattggtaattgtaaacatgcatgcagagtcaaagtaataccatgtggattactttctagtctcaaaagggaaagcattaactgtaaatcgagggatcattcaccactaatttaatctaggggttcaatctcagcatcactaatgattaatcataggtgtcttctaatgggatgcagcattaactatacaataatataactatatgactttattcttcctagtatattttatcctagttctggtatccctcagaagatctttaagaatccattcctaaaaatatgttggatagtgaatttttaggtagtgggagtctgtaactcattattctattttatttttgcatgtcattttattttcaaattttatttaaattcaactaattaacatgtagtgtattattagtgtcagaggtagcattcagcagtgattcatcagttgtgtataatacctagtgctcaggcagcccaagtgactcagctgtttagtgcctccttcagtccagggcgtgatcctggagacccgggattgagtcccacgtcggggtccctgcaaggagcctgcttctccctctgagtctctgcctctctctgtgtctctcatgagtaaataaataaaatcttaaaaaaaaaaaatccagtgctcattacatcccataccctccttaatgctcatctcccagttatgagatacttccactcccctcccctccagccaccctcagtttgtttcctatgcttaagagtctcttatggcttgtctccctctctgatttcatcttgtttttccctccccatatgtcattcttttaaatgaaaaaaataatactgtatttccagcaggtctaaaaaccccaaccaatttccctcagtgcttaaaacactcttaaaaatctatataacaatcaactaggtttctctgcctttaaaacaccagttacttaattaacacttaattaactcaatgagtttatttgtgcaataacataggatactgatgttttcctcttaaacaattgttactgtaatgtaagtgaacagtgaaatgatatgttcaaaggcaaataacactcagcagcagtgaaataaacaaggcaagtttttaaatgtggttactgaaattgcagtgtcccttaagtgaggttggagatgagaagggagatatggaagttgtagtcactgttgctgtttagtggggggatgaaggtgaacaagaatgagcttgagcaggagtgaaacagtaaatgtctgaggttcatccatgccggtggataattagcttacctgagactcagcaatgagtctcagaagtggatggtcatgaattgtcttctgaaagtattgacaaagcacgacaagaaactaaaaatggacaatattacattccgtttgcttgtgttatgcagcttttgataaccatagactgtgctggaaattgcatttttaaaaaagatttatttatttactttagggggaggggagaggggaggggcaaagggagagagagagaatcccaagcagactcaccccctgagagtggagcccaatgtggagctccatctcacaaccctgaaatcatgacctgagtggaaaccaagagttagctgcttaactgactgagtcacccacatgccccggaaattgcatttttggatgtgatttttctgctcttgtcatgatcatgatctcttataagcaacagtgatgattctgtctctataatctagaatttctcttagtggagcctacctggttcagttggaagagactcttgatctcgtggttgtgagttccagccacatgttggatgtagggattatttaaataaataaaaacttttaaaaataaataaaatttcctttaaatatttgtcagggatgcgtgggtggctcagcggttgagcatctgccttaagctcagggcataatcctgaggtcccaggatcgagtcccacatcgggctccccacggggagtctgcttccccctctgcctgagtctctgcctctctctctgtccctcatgaataaataaatacaatctttaaaaaacaacaaaaaaagatttgttgtcaaatattagtcttctagggctgccattacaaaataccacagactgtgtgggttaaatgacagatatttctttccttttttttttttttttttttaagattttatttatttatttgagagagggagcaggagtaggggggaggggcagagactcaccactgagtagagagcccaacaaggggctcaatcccaggaccctgagatcaggacctgagctgaaggcagatgcttaaccaactgagccacccaggcgacccatgacaaatatttctcttctcacagttctggagactagaaattcaagatcaagatgccagcaggtttggtttttcctgaggcctttctcctcagcttgcagtctgccaccattcttactggtcacatggtctttcttagtgcacgggcactcctggtgtctctattctgataccagtcatattgggttaggctttcactcttatgaccttatttacctttaattacctctttagggacggttgggtggctcagcggttgagcatctgtctggctcagggcgtgatcctggagtcctcgatagagtcccacaccgggctccctgcatggaacctgcttctccctccgcctatgtctctgcctctctctctctctcttctccctctgcctgtgtctctgcctctctctctctctctctttctgtatctctcatgaatgaataaataaaatcttttaaaaaaattacctctttaaaagccttatctccaaatacagtgacattgagcatcagggcgtcaaatacaaaattgcgggggaggggggacacaattcggttggtaatactgctcttcctccaacttagctcctcccagattattacctccagtggaatgtgtttcttggaaggagcatggtaactctccggaatgaacaaaactttaatcatttgtgtttgttttctctcatacaggaaataaggtattccctggaaacacgtgcacggccatgcatatatatatttttttatgccttcacctcttagtacactttatcacttccaatatacatgtctctctagtctttttttttttttaagattttatttttaagtaatctctacacccaatgtagggctcaaactcacaaccccaagatcaagagtcccacgttcccctgacccaggcaggcgcccctctctagtctcttaagtcacctgctttcttcacagtttttccgtttactgtgaaaaatattactaggaacactggtgaacgaagatctgtttgagtccttattttcagttctttggactatatacccagaagtgggtataccgtcaaaagtatacataattttttgttgaaaggtggacatcttgaatattatgaaaaaaaaagaaaaggtaaggaaaattactctctagatctttccagattggctctggattgcagtaactccttcagtgcttaactaggccatttacaactctttcttagccttcacttcctgcttgcattgagcctacagatcagccagagatgaatgcctatgctcttctcaggtcttttctgagcatacattcttccctggacatatgtatggattttgagttcccacggtatacatgagagcttttcaagatccctgttcctccccaaatctctctggcttttcctcccaggtttttattgtgtctgttgtttgctccaacagctttatttgccccagaaggcagcagcttcttcatttgtctttcaatattctcaaagaatatcctcagcatagggaactctgcccgggtagagttctgacatagggaaatgaaggtaaggtccttatgttaatccttcaggaaaactccagtcaggtcaaaacagacaaacataattccttgggaacaaggtccattcttttccttctgaacagattgtacacacactgggaatacaatctgccatctttgagactgccaccaagccagggagagagtggacaagactaagttaaaacacttcaaagaaaacaacaacaacaacaacaacaacaacaacaaaacacttcgaagctctcttgccttgttacagtggcctttctcctggttaagcatttacttggttgctgtaagcccttcactaccttcctgaatacagggaggattgagctgagaaccaggcacaggacttgatttcaacagtagcagaattatagagaaggcttaaaagctgttaagactcctacatctgggtcgctggttggctcagtcagttgagagtctcttaatttcagctcaggtcatgatctcagggtcatgagatttagccctgcatcaggctctgcactaggtgtggagtctgcataagattctccccctctctctgcccctcctttccctgttttttctctcaaaaaacaaaacaacaacaacaacaaaaaagactcttacatcaaaatcagtgccctgataagaagagaatgacaacactctggtacttgaaatggggatattgtgtggacatgcttgagctccagattcccctgaacttgctggacctaaagaaatgtctcatttcccctttgttggatgataacagcttccacttattcagaaacatgtggaggcaaatgccttgtaagatgatacctgaagatttgcctccaacctcccatggtttctaggtcaataatttggatcattcactcaggggatcattcactcccctgaagatttgcccccaacctcccatggtttctaggtcaataatttggatcatttttttgtcacagcccacctggggaaatattgactccattttgggaagaaaaaaaatatatatattaaaaaatatattcatggatctttctaatatataccagtagcaactgggaaaatatgccagttttgagggtgttggaccaaggggattggaacataagattggataaagaagaatatataaggacactctttgtgacttgggatttaatgttctggaaaagacatctagaattgatcctagtacatcactgaggaagctccttgatgcttggaaaaacagtaccccataataaaagtaaatggagacgctggaactgccttgggaaatttagtatagatatgctagaatggatttatcttaagatcaaaaatcctatcagttgactgtgttccctgaaaggctcagaggatactctcctcaataaagcagtaaaaaatatgctagataagagcactgacattgttgagaatatcagtagtagctgttctttgaaaactaagtttcataataaaggaggttgatagggaaccagagtccctggggtcaatgagggtgataggattttgaaagagcagaggccctgatttaattagaggcaaggtggatataattaccataataagcagcaaagccagaatggcatccagaggggagaaaaccatggagatttgtgtcaatggctaataggccatggaatccccagcacaagatagatagaaagccagttaatatattactcaatctatataaccaaaaaaagatcaagagtggttgaaccaaagtctgatatttgctactgaaaaaaatcacaatcccccactcagttgctaggcttgagccaattctcagacccagaaaagactgaattatcttaaggaaggactgtgacaaagcagcagcaatttctcttatcctaaagggaactgatacaattaactaaggaaactgtacacaggaaaaaagagaaaacagcaagatcttttgagaggtgtgggtttcagagtctcaggtggcacttgtatcaggtacctaaagtgacagcatgtcccccctgttaagtagtgtatggagcctgggtgatagagtcctgacccaagtttttctcatagtggatctgtggacacatcccctggtaatatctctaattcctaagagcatggtaaggatggatatatttagattttggtaggccctcgcagtaattcccaggccaatggagtaagatccataatggtgggaaaagacaagtaaaatcccctaaaactatctttcctcttcccaccaaaccaagataagttagaagtagttttgcattctacatggaagacatagattagtatcatcctcagatacttaaacaatacagttgttatatatatttccatttatttcagcactgtgatgcctgtgaaaactagattgatcatggtggatggtagcggactctgtggtagtccaacatagcctctggatcttgtatatggcttttgatttggtaattgtgttcttttctatatcaggaaggaagatcagaaacaattcacattcacatgcaatagattgcagtgtacggtcatggtcgttcccagagctactctcctgctctcttgttccattataggctaccacgaccttggtcatctggacattctctagaatattatactgatcaactatattaaaaacatcttggggaaaaaaaaaaccatcttgggccaggaaataggaagtagcaagtagcctggatacccctgtaagatgcaggtacgccagagggtagaagacaagccatacacagatttggggctcatattagtgaagaaaaaggtgtccagatacatctccaaggtagaggggaacttactgcaccttacgtcttctgctaccaaaaagatgcacagtgactgttggtctttttggattttgaatgcagcaacagctatttgctgtaattttttcccctctctctttggttttcagcagttttattatgatatgcataagtgtgtgtgtttcttgaatctgtagtttgatgtttattaattaattattgggaaaattttcagccatgattctaacaaatactgcttctgtcacattctcggtcttttcatcttctagaattccaaccacacatatgttacactttttaccctttcttacatgtatcttatgctctttttggtatttttaatctctttgtctctgtttcagtctgaatattttctactaactcatttttctggtcactaatctctcttcagctgtgtcaattttgtcaaatctattaagttatcatttcatttactgtatttttacattctaggatctccactttttaaaaaagattttatttatttattcatgagaaacacagagggacagaaacacaggcagagggagaagcaggcttcatgcaaggagcccgatgtgggactcaatcctggaaatccaggatcactccctgagctaaaggcagacgctcaatcactgagccacccagttgtccctagaatttccactttattgatttttatagattccagctctcctgaaaactctccattgtgtcatcttttttcttaaacatattaattaggtattttaaaatcttcatctgatacctcaatatctggatcacctgagtccattcctattgactttctttcttggtcccatttcttggtatgcctggtctttctttttttcttttttcttttttaagattttatttatttaaagagagagcatgagcaaggggagggacagaaggagaaggagagaaagactcccaagcagacagtaagcccagtgtggagcccataatggggttcagtcccacaaccccaagatcatgacttcaattgaaaccaagagctggatactcaaccaactgagccatccaggtgctccatgactggtacgtttttattcaatgctgaatattttatgtgaaaattgtaaaaaaaaaaaaattgtagagactctagatgaagttaccttttttcagagaagacttattttagcttctctaggcaggaagttagagatacgacagatacattgatcaggaattgaactaatctgtggctgttgtgctctgtaaggctttctctatttctgatttctggttttcctttatttttttttttaagatttatttatttatttattcatgagaggcacaaagaggcagagacacaggcagagggagaagcaggctcctcacaggaagccggactcaggactcgattccagaaccccaggatcaccaccaccctgggccaaaggcagatgcccggccactaagccacccaggtgtcctagatttctggttttccattaactccaaggatttagatcttatttaactgacagcctggggtttatagggaactctcctccttaactggcctgaactccatgttttacgtccctaacaccatgagatagccaagaactccgtttagattctcatccccttggtatatgttttcctttcagctcctcagcctcccactgtgccccttgcaaagaggcaaatgcttcacaaagaaagtcatttggggggactctcctccccaggatctgggcccctcaggtcctgattgtctcaagagcccccctcatccctgtgaggtcattgaggaacctgctgagcttcttggcctcttagtggccactttctgaccagcttcttagtgtctcaccctgtgccacttataaactagcaaagacttattctttatgaagaattgagtagaatttggacgcacctcaatgatttttcattctttttggaaacttggcccctcaaattctggctgtcttggtagctgtctgatgccttcaaataaaatttgttttgttttgtttttagctttattcagcctagcttgttcttggtgacaagaacaagctaccccatcatagctgaaaggggggggggtctcttcttcacttggcagccctttcttgctttatttgcacatcatttatagccagttgatatctttttatgtttgtttatttattgtctgtcttcactcattacaatgtgagttttatgagagcaggcaattgatctcttttgttcattactgtaatgctaggacctacaacgacctagtacatagtaggagatgaataaatagttttaaataaataaatgttgcaatagcctgacaaatgagttgtaagcacattccttctcttcttctccccccctcctcccccgccggaactgtttgtatataagcactatagcaaagtaattgagagtattatgccagctatcaatttattaacactcagctccaaattcacccttcagaacttgctctgcagtaatggactggactatttaagcacttcttctgtagagtgagtataatgtagagggcacaggaggacaaaaggaagaacggaatttttcttcctggttccaatatgcagcattttgcttttattccccctgatacatggtcgatcagcaatgtgtgtatgtgtgtgtttgtgttggcctagacaggaaccatccaggagtgctctgctccagccacgtacccagagaatgcagccctgcagccaccatgaagccccagaggccccagtgcagacccagtacactccaggcctcatggctgtgcagtgccacgactccctctgcctgcccacccaccagcctcagcttgcttcaacccagttatttcccacttgaggtgaacaccacatattctacatgcctcagctgtctctgcatgtctgcccaccagcctcagttcacccacgctctggaggattgtgtcctgcttgcctgcttgctgactagctctggcctgggaaacccagcaaacttctctgccatccagtaggttgcggccataccttctccagtaagttctgagccataggcttgggcattcccctcagctttaggatacttcttaacttctttgtagttactgacctatcattgtttaacaattctttacattaagctacattgtttaaattactatgtggtttctgtctctcaattagacacaaagtaataaagaattggtaccaggaatggtcctaggaagtagacccatggaggtggcatttgggcattggtttggtaacacctttcggcttgagcatggcactgatctctttgtcaatgagaaatgggctgctagtaatccatagcatgcagtggcatcacaattacttggattatctatcatatgtagttgattgtgatgaagtgccaaatgaagcacatgccttgggagtctatgtggttgtggcctttcactgttatgacactaacgatgaccaggaaaagtgccaatggcctggcactcagtggagtgtgcaactattcatcttggtgttgtgagttcgagccccgtgttgagtgtagagattacttttaaaaaaatcttaaagattttgactataaagattgtggtgtgggacaggtttttttgtttttgttttttgtttttgtttttttttttagtatacttgagcacttataaaaggaaaataatagctcagtctattaagtctcagctcaagtatggaagcttccatgataaccctaaaggaatttcttttttttttttcccttttaaatttatttatttatttatttatttatttatttatttatttatgatagtcacacacagagagagagagagaggcagagacacaggcagagggagaagcaggctccatgcaccaggagcccgacgtgggattcgatcccggatcctcaggatcgcgccctgggccaaaggcaggcgccaaaccattgtgccacccagggatcccaccctaaaggaatttcttatttcttatagttccagggctgatattactaaaaatcaaaaccaaaatttaattgtgtaggttgctgaattataatggctattgaattaacagtcttgccaagtttgtcgtgtgaaagttaggcactgatctggaaagaatgggattctgaaccttgaaattgagacatcccaaatgaattgagacatccaaataaaactgataatcttgaacccccaggtcatactgagcccccagagtttgccctctcatgtctgaaagtgatggtttttctctacttaaaaaacttgtgacaatctgacctgaagcagatgccttgaaagaggatgataattcttctcctcaggatccaccacagccacccccttttgccactaggcccataaatagtgtaagccttagcatgctccagaggtacaggaacacaatacaacccaggagaaagtaatttaggctaaaaagaattgcagaacttttctaacatgtgttggtagtaactgcagaatatgtgtgggaatgggttcttaggttggtaaatcaaggagggcaagatatataacactagatcagaaaaattaaaaaaaaaacactatatcaaaaattttaaacatttttaaatttatgtaagtaatctcttcacccattttggggcttgaactcacaaccctgagatcaaaaaacaaaaaaaacaaaacaaacaaaaaaaaaaaacctgcttttccaatggagccaaccagatgctcccactatatcaaattttttgtataaatatgcttactagaattccagatgtagtatgttagcttgtgtagctagaggtgactttaatttatttggttggttgactgaaacttgaactcaatattccagtttaatgaggtttaatttaatgcagtcaagatgccagagcttttctggtgtgaagtgaaggaggaaatccagatgtgcagggaggttgccatgttggattggatttatcatgtgtgacctatcccctaactatattctatgtgaagggggaaggcattgtgaaatatatttgtgagggaagcacctctatcctttaaaaggtctgtggtttctctcccttgtaggccagttatgactgtagggaatgccactttcttttttaagattttacttatttatttgagagagagagagagggagagaaagagagagagaaagagaacaagctaggaggaggggctgagggagagggagaagcagactccccgctgagcagggagcctgatgtggggcttgatcccaggatcctgggatcatgacctgagccgaaggcagatgcccaactgactgagccacccaggtgccccagggatgccacttttaaactgcacttctttttttttttttttgtatatttttaaattggagttcgatttgccgacatatagcataacacccagtgctcatcccgtccagtgcccccctcagtgcctgtcactcagtcaccccaaccccccgcccacctccccttccactaccccttgttcatttcccatagttaggagtctctcatgttctctcaccctcactgatatttcccactcattttctctcctttcccctttattccctttcactattttttatattccccaaatgaatgagaccatatgatgtttgtctttcgactgacttacttcactcagcataataccctccagttccatccacgtcgaagcaaatggtgggtatttgtcatttctaatggctgattaaactgcacttctgattttttttttaaagattttatttatttattcatgagagacacacacagagaaagaagcagagacacaggcagagggagaagcaggctccatggaggcagcctgacgtgggacttgatcctgggtctccaggatcacactccaggctgaaggctgcgctaaactgctaagcccccgggctgcccatgcacgtctgatttcaatgaggatgttggtactgttccattgtagcagaggccaaatagaagcacttaactgtcaaacacagggtgggcacctcaaccgtaaagggcattggggatggttcagtaatcagaatgccttggcctgtggagatctctagtggtaactaattgatcatggtgtctttaggatgaaatagataatcagcctactagaattgcttgatccatgtaacaggaaaaactctacatctggtagccaatcacctaacttgggtcaccatagtagagtatgatgccctctcactcagtgtccagacccaaacccagtcagtttgcagacccaaagcactttcaaaaagccaggttccctagagaaaggaccttgctccaccgccaaaaataaataccttaatcttccttcaagcattcccaaagaaacgcacaactatttactggagtgacagtgcactggggaaaaggaattacctgggcctttcgggggctactagacaatggctctgaactgatgctaattccttgggattcaaaatgccagcaaggctcacccctacccagagtaggggtatctgatggataggtgatagaatctcaactcccaagtgtgactctcaacaggcccatggcccatgaactcaccctggggctatttccctggttcctgagaatgtaattggaatagatgtttggccaatgtcagaatccccacattggctcttacctatgggatcattatggggtcgtgatggtcggcagggataagtggaagcctctggaacctccactccctgccaagatagtaaaccagaagcaacactgcatctctgagggaaatgaagacattgacactcccatcaaagacttgaaagaagcagagctagtgactcctaacccttcccatttaattcaccagtttggtctgtgcaagtcaagtgtaatcctagaaaaatgactgtgacttaatctggtgggattccagctgcaggtgctatttatattcaagatgtagtccctttactggacttctgactcatcttagaagttgcgtgtgtgggatcctgggtggctcagcagttgagcacctgccttttgctcagggcatgatcctggaatcctgggatcgagtcccacatcgggctccccccaggagcctgcttctccctctgcctgtgtctctcaagaataaataaaatattttttaaaaagtatcttcttaaaagattgattttaacttgattgcattgtagtctaagcatattgtcttctatgataatgacctttgcaatttgctaagacttactttttccccaatacacagtcaatttttgccatttttgtaagtgtcccacatggacttgacaggaacgtgaattctctaatatttgtatgcaagattgcttatctatggggtgctaatctacttctcactttgtctacctaatctagatagttctcagatacatgttaaatcacccattgccattgggaattataaatctctccttttggttctgttagtgtttgcttcttatatttataaagaatatggggcagccctggtggcgcagcggtttgtcgctgcctgcaacctaaggtgtgatcctggagaccctggatcgagtcccacgtcaggctctctgcatggagcctgcttctccctctgcctgtgtctctgcctctctctctttgtgtctctaagaataaataaataatcttttaaaaaaataaactatgttattttgtgcatacaattaagaattttaaactcttccttgtgcattatatcatctgtgattatatagagatcctcttcatttttttaaaaaaactcatcaggaaaaaataaaaaaataaaaatcatcaggcattttattttattttatttcatttttattgaagtatagttgacacacaatgttacattagtttcaggtgtatagtggtgatctggctaatttataggttatgccatgctcacttcaagtgtggtaacatttgacatctgtcatcatataacactgtgacaataccattgactatattccctatgctgtgcctttcattcctgtgacctattcattccataatgaaagcctatttctcccattcctcttcacccactttgcccagcaccctgccctgctcccctctggcaactgtcagtttgtcctctgtacttatgtgtctgtttcagctttttgtttgtttattcatctgttttattttttagattccacatatgagtgaatcatatattatttgtctttctctgacttatttcacttagtatactaccctctaggtccacccatgttgttgcaaatggcaagatgtcattctttttcatagctgagtaatattccactgtgcatatatactacttctttacccattcatctctcaatggacacttgggctccttccatatcttggctcttataaattaagctgcaataaacatggtggggggtctatatgtcttttcaatttagcattttcatattccttttttaaagatttctttatttatttgagagagagaaagtgcacaaggtggggaaggacagagggggagagagccttaaggagactccacactgagcatggagcccaattcggggctcagccccccgtcctgagatcatgacctaagctgaaaccaaaagtcagatgcttaactgactatgccacccaggagcccctagggttttcattttctttgagtaaatacacaatagtagaattactcggtcatatgatatttctattttttaattttttgaagaacttccatactcttatccacacacagcatctgcactaatttacattcctatcaacagttcaggaggattcctttttctccagatccttgccaacacttgtttttcgtctttttgattctagccacaccgacaggtgtgaagtaatatctcattttggtttggatctgcatttccctgatgatgagtgatgtggagcatcttttcatgtatctgttgggcagccatatgtattatttgtgggttttttggggttgagttttataagctctttttaaaaagattttatttatttgacagagagagatcgagagagcacaaacagggggagcaggctccctgctgagcagaagcctgatgtgggggcttgatcccagaagctgggatcttgacttgagctaaaagcaaactgactgagcgacccaggctcagttctttatgtattttggatattaaccccttactggatatatcatttgcaaaaatcttcccctattcagtaggttgatttttcattttgttgatggtgatcctcttcatttcttttttttttaagatttcatttatttattcatgagagacacacagagagaggcagagacataggcagaaagagaagcaggctcccttcagggagcccactgtgggactcgatctcaggacctcaggatcatgccctgagctgaagacagacgctcaaccactgagccattcaggtgtccccgatcctctctctatgttagttttttgtctgctatgtctttttaattttttttattttttgagagagagagagagagagcatgcagcagtggcaaaaggggcagaaggaaagggagagaatcttaagcagactccacactgagcccaatacaggacttgcttccaggaccctgagatcatgacctgagccaaaatcaatagatgcttaaccaactgagctacacaggcaccctgtctgatatgttttttttttgcatctatctattttaaacttttctgtacctctttgttttatatatgctctagtaaatagcatatggcttcatatttaaaattcttccaacccaacaatccttggaaagataggaagataatatctattctgattagtgatatatttggacctattactatcatcttgtgctttgtgactttcttatgatgcttcttccttctttcctgcttgcatttgggatgattgtgttttcttttttcctttatttcctttctagaggtttgaaagttatactcctgtttttattcttttggtaaatatctttaatattttggggcacctggctggttcagttggtagagcatgcaactcttgatcttggtgttgtaagctggagctccatgttgggggtagagattactttaaaaaaataaaataggggtgcctggatggctcagtcagttaggcatccagctcttgatttcggctcaggtcatgatctcagggtcatgagatcaagccctatgctggcctccgcacggagcatggagcttaagatgctgactctccctttccctctgcccctcctcacactcacactctctctaaaaaaataaataaaatctttagtattttaacatgcatacctgccagtttaaatttacttaacttctgtaccttctttcagaaaaataaagggcctctgagtgctactacactgaccatctcccttccatctgatgtgttactgtatctagtacacagttgtaacttattttatataccccatatttatgctattattattgctttatataatctaaacatgtttacatgtactcaagtctttatttgtaaatttttctcccttgcatctcaatgtcccgtttttccttcatcctgaaatacagcccttaggaatcttccactctgagtttttctttgaaggaagatgaccttatttcaccctcacttaaaaaaattaacttgggcagccccggtggtgcagcggtttagtgccgcctgcagcccagggcgtggtcctggagacctgggatcgagtcccatgtcaggctctttgcatggtgtctgcttctctctctgcctctctctctctctgtctctctctctgtctctattaataaataaataaagtctttaaaaaacatttaaaaaattaacttactttacatttttaacatccagaattttagatgtcttgatatttcagtcttaaatatttgtgcctacattttgaaaagaactcttactcacatagaccaaattaatacaaacacatctaacaacaggaacagtagtaattccttaatatcatcaaatgtccatttcatattcagatttccccaatggtgtcagattatcagattcagatttatcagataattcagattatccccatggtgtctgtttttccaaactagatccaatctagaacgacatcctgcatcagtttatttattgtgtcccttaagcctcttttaatttcaaactctttttttgtgacactgattcggtggaataggctggttgtcctatgaaatatcctcgcttctgggtctgattgtttccttatggtggtgtttagcctgttcctctttcctctatatttccttataactgtaatttagggtccaaaggcttgattagattgattgattgattgattgattgattgattcatgagagacacagagacataggctgagggagaagcaggctccactcagggagcccgatgtgggactcgatcccaggactccaggatcactccccgagccgaaggcagatgcccaaccgctgagccacccaggtgttccaggcttgattagatttaaagcaaacattcttggctacctcacatcacaggtgatgcagtattcacaatactatgttactgatccagctgttagataataaacattcttgcacaaagttctatgctaagattgtgccccttgctaattggggctttgggggctttttttagataggacttctggggacacctgtgtggctcagcagttgagtgcctgcctttggctcaggacattatcctagagtcccaggatcaagtcccacattgggctccctgcatggagcctgcttctcccttggcctatgtctatctctgtgtctctcatgaataaataaataaaatcttcagatagcacttctgtgtgatagattccagggaagttccgataaacaaaagactgggaagtgttggaaaatgcatgctgaagatggaaggacatatatatttaactgctaactagcacacagtatggtaggaccatctagcttatgcctctgaacatgtagactttcgctaggatataaagttaaaatgtcactgttggttcacagcattaggagtttcctggtataatctgaaactagtccccatctacagggggagggagagacagaataaagaggtggggcacctcagattggtaggtggcagttttaataagcaagggaaattacttatgggcttgtcttgggcagtgaatagatccccagcacccacccaccaaatcttataagtttatatagaggctttaacttgtttcagtcatgtatcccatctaggtggtctcaataacatatttctttctcaaggcttcgtatttgaaaaaggctcccaccatgagaatggaagggagaatgtacattccaaggagaggggagtgtgtgatgagccttgggttcagctcaagggtcaaatggccattacatcctcttgaccaacttctccatcagcagcatcaatgggcagaaggaaactgcatctttgactctaccacttgataccaaattactttccagttagccaatttatgcctccaccaatgccaatacttggtattttcagacttttcttttttacttttgacaatatgactagatgaaataatagctcattatgttttttaatagattttatttatttattcattagagagagagagagagagagagagagaggcagagacacaggcagagggagaagcaggttccatgcagggagcctgacgtgggactcaatcctgggtctccaggatcacgccctgggctgaaggcggcactaaaccgctgagccacccaggctgccctcattgtggtttttggaaagttattacatacatcaagagatttcacccctgaatacttgagtattcatcttttgaaaataaggacatttcctacttacccacaatatcattctaacaaaagaataattccccatacaatctaaatttgtctatattcatatttctccaattatctgaaaaatcagtaaggatttaggttcaaggttcaaggcacttttatcctcaaataatggattagctaggtgtgacggtccaaggtatcaggtatttcctctaagaactaggaagacaataatcctctgtcttggggtttctatagttgctgttgagaaatttattattggtcctggcatcactgtattatggaaaacatgttttctttctggtttcttttcaaaggtttccccatctttgagttcttcagtttctctctggtgtatctggatgaatatttagtagtgtatcttggaattaatttcctgagactgagaattcttgtccaaaatcagttctggaagatgatcaaccatgatctcatcacctcattattggtgaaagattatgcctggcacactttaggtgcttagttgttgaataaattggtaaataaatgagcattttctccattccctgtcattcttttgagtctctggtgctcagatttttttacagatatttgttcaaacatctcactctacccactataccttttcctctattatttttcttgctacattttatttttttaactcaccatttttatttatttatttatttatttatttatttatttatttatttaagctctacatccaacttgggacttgaactcatgaccccgagataaagagttgtaccctctacccactaaatcagcaggcatccctttttctgtgctacattttagataattttgtcagatctatcttctagtgctcaattctaagctcagctacttttttttctttaaagatttatttattccagagaaagaatgtgtgtgagaagggggaggggcaaagagagaggcagagagaatctcaagctgactccatgctgagcacagagcccaatactgggctcgatctcaccaccctgagatcatgacctgagacgaaaccaagagtcggatgcttaactgactgagccacccaggctcccttaacctcagctacttgtaatcatttgcttaattcatccattgagtttataataatcatttgtaatcattgataccggaccttttttttataacattctgttatttctcatgcttttgattctttgttttatgatgtcaataacttttaacatacttatagcttgaagcttatactaattccattgtctgaagtgatccagggtctaatcctgctctttgttaggtaggtaaattttcattcatggtggattatttccttgtgggttttccagttttggattgtgaactcatgttgatggccttcaggagtgaccttcataggctatagtgaagattaaatcattaaatcaatgaactcagatatgtctcaagttcaggtggaaattaaatcacatcgaaaagagtatacagaagggcaagaactgtccaccaggtcatgctatatataaaagcaatgcagggcagtccggtggctcagcagtttagtgctgccttcagcccaagttgtgatcttggagacctgggatcgggtcccatgtcgggctccctgcatggagcctgcttctccctctgtctatgtctctgcctctctctctctctgtgcctctcatgaataaacaaataaaatcttaaaaaaaaaaaaaaacaaggcaaaacccccacaagattgacatgcttaaaccatcaaactctggccagactcacactagggaatactacaaacactgtctctcatgtgacaggcactttattcatatctttaaccttcatatcaactgcaaggaaggtgaaattcccattcgacagaacagaaactgccaaagaatcattaatttatagctaattggtggactccaattaaaactcaggtcgaatgattgtaaagatcatgctttctcaaattgaccccattgttcctcagaactattactggagggtgaatgggtgacgggcactgaggtgagcactgggtgttattctgtaagttggcaaattgaacaccaataaaaaataaatttattaaaaaaagaactattactggaaaaaaacaccatcatttggactacatacatattttttctaagttccaattttaattgaggccagttaaccccatggatcataaaaacatgttgagtaagtagtgaaaaaggaaaacgaatgcattaaagctacaaaagagttgcattttaagtaaagaaactttcattcctcatttcctttcatttttccaatttgagattttgcttatgtacgaaaaaggcaattaacaagaagcttacttatgagaaacccccggagctcccagaagctaataaaaatgtatctgagcattctgagtacaacaaagcaagccagtgtaaatttgatctaataaggagtttgcaaatataccttcaacctaagcaattttacatcagtaaaccaggacaagttaaagccaattggtggcaatacttttcagctgtcaatcctttgtttccaggtccagagaggccactgcaatgtgcccgctccaaatgtaggttggagcacccccaccccccttgcctgtccagctcttccaagaatcatcatccagggatcactgaggtaatcgggaatcgccaactgtcttaaatattatcagcataaattgcacctagtatatggagttagagggtctgattttaatcaggttgattcaatttgtgacttacttaaaatgctggtctgggtttcttgatttaatcaactttcaacaaaagttagtgcttatcatttgatagaaattttatacatgatcttcacccctcagatctggctctaggttacattttactatggggactttaaaatgatattaataccattgaataattaactaattaaaattaatcattaactttgcaaatgtatccaaagaaatatagaaagacgattctgctaataaatttaggaaaaatagaggatgtaaataattgtggagtcactgggaggtaaactctgtccagttaattggtcagttttgtattttgaccatgagtttatttttgttagactctgtgaagagacgaccattactgacgttattaaagtattttattttcctaaaagagccacatcatataatctggattctttcttctatctgtttgactttaaccaaaccgattaagtgattttaatgctatgaagcaaaacaaataaaatattgttaaaatgtaaaatattgttaaaatttgtaatcatctcaacgtgaaaaatcaccttgccttcctatttagagccccttaaatataagctttcttcctctttcagtttccacaggctacagagtaaattatttcttttttttaaaaatttttatttatttatgatagtcacacagagagagagagagagagagagagagagagagataggcagagacacaggcagagggagaagcaggctccatgcaccgggagcctgacgtgggattcgatcccgggtctccaggatcgcgccctgggccaaaggcaggcgccaaaccactgcgccacccagggatccctagagtaaattatttccactgaaaatgttctatccacatctgctttaagaaagccactgctgaaaaaaaaaaaaaaaagaaagccactgctggggtgcctgggtggctcagttggttgagcgctggattcttggttttggctcaggtcgtgattgcaggctcatgggatcaagccccccacagtgggctctgcgctcagtgctgaggttgcttgagactctccctctgccccccctgccctgtgctctctaactaaaataaacaataaatcataaaaaagaaagcaagtcggccactgcaagctgcatgctggcgttcatcccagctgcttgcactcccgcacaggctgggatgaaggttcccaggcctgtctctgcacgggtctgggcagggcttctctgtgctctgaacccaggtgagagtcggcacatgtgccaatagcacaaagcaccacaggtgcctctccagagggcggtattctctatgtatccacaaaagttgcccaaggagcccagctccccagctcttggccagtgtttcatatttcccacgtttctaactttggtctctctgactggggtaaagaggttatctcattgccatgaatttttcatctcattttttttttttgacagatcctgccgcatgtttatttgtacaaatagcgcaggaggacaccagccccatgcagatagaagctcatgggtcacacccggccttctgtcctcacactggcagactggagcctctgcactggagcctttgtgcaaaggggcctgggcacctttgggagcctgagccgcagcaggagctgcagctggagtcacagctgtagtctgagtcttgtttaagccttggtcttggacttcggactccagagccctgagaccctgggcaatgcggcaacgagcagatttcccaagcttggggtgagcgatgcaggcaagttgagcttgcggctgccaccctttgggatcttgggcttgacctccttggggactcctggccttggtgttgttggcctgcgtcttcttcaaatctttcttgttgtgcttctgggaaaagtgcatgttccttaggaacataggatctgccctcttaagagaatcatatcttctttttttaaagattttagttattcagaaagacacacagagagaggcagagacataggcagagggagacgcaggctccatgcagggagcctgatgcgagactcaatcccaggtctccaggatcacgccccgggccgaaggcagaagctcaaccactgagccacccaggcatccctcatatctttttttttaaagatttatttctttattatttgagagagaaagagagagagaaggagcagtagagagagaatctcaagctgactccatactgagtgcagagccccacatggggcttgatatcacgactctgaaatcatgacctgagtgaaaaccaagagttggacacttaattgactgagccacccaggcaccccaagattcatgtctttgtgactaggtttctcgatgccatttctgtgccatctttgtgactggttatccacggtgttggttgcatttggccatgcctgaacccgagcccgaggctcccaacatgccttccatttcatttactgcatttattatttgtagaagtccagtttggttcttttaaagatgtacccgtgtcactttttctaccttcctattccctgtagatatattcaacctatttctttacaacaataaatttttttaaaaagattttatttatttattcatgaaagacacagagacagaggcagagacagaggcagagggagaagcaggctccacacagggagcccgatgtgggactcgatcccggaccccgggatcacaccctgagccaaaggcagacgctcaacctaaaactaatgttacactgtaggttaactaactagaatttaaataaaagaattgccatttgaaaattgaaaaattaaaaaaaggcagacactcaaccgctgagccactcaggcatccccaacaataaacttattttatcatgtgtatcatatagttccattatctaaagtctttacatggggctgcccctaggccttagggcatctttctacaaattagaaaaagtggcccttcttcaaccacatgtttttgaaaagttagaagattaccacgaaacctgaccagctccaccagggagaaaatttcaacttgggggtggcacacacatgcacacacagtgtcgtgcactcacacaatgcctggccactggggcacacggctcctgatgccacacactccctccgtgccaccccacccctaggtgtcagatgtggagtctagcagccgggcagatgtggaaccgggcttctagggcagcaggctggagcctgatttccgtgtttcccgagttatctttgactatatgttggttattatatttgaaaaattatttgtaggagtaatttgggatgaaggtaatttcctccacagagaatttgtgtttgctgcttccaaaagcctgagggcactgccagcgctgagatattcagagtcaaggccgcggataccctgggtaacccaggcaaatggaagcaggctgttcattctggccggttggtccacttctggtttacacttaacctggcttactgggggcaatggggtctcccattagacttttccccgcccccgcagggctgtggtggagacacattcatctcaagaggccatcagaaagagagctcaaccctccacggtgggcagaggtcctcaggaagagagcaacctctgagctcctccctccttgatccctgtgccctgtgccttccagcttgtcagctccttacagatgcaattttggacattttatccagcctatttagttgtttcagcaggagggttgctggagagagttatcctcttattactagagagtcccgttgttttaatttgcagtcctttgattagcggtgaatcccagcctctctggtcgcagttccaatttcctttcctgcgaaatgcctgctcaccccctgtgcctctttgctcccggtttcctgcctttctctcattgacgtgaaggtgttccttaaaaactctagatgttaattctgtgttaattgtatataacattttctcctggcatgttatccagccagtcagtgcctttctggtggcctctgctgaacagaaatccttgattttgatgtgggcagattcagcatattctcctctctaaggtctgtgatgtgtcactatcacccttcatgggacacctgggtggctgagtcagttaagcatcccactcttatttcagctcaggtcatgatctcaggggcctgggatcctgccctccagcagggctccatgctcagtgaggagtctgcttgagattctccctctctccctgccactcccactcctgccttttctctctctcaaataaagaaataaatcttttaataaatcccccttcatgattcaaaaccaggtcttccagcgtcatttgacccgcataagtagaggggccctgacctccctctgttgttcactaagcctgtatttgcaccgagtctccagtgttggtgaccttgccacatcactgcctcatttgttagcgtccaataaaaaccaaagtccctgccacatgtggctgtgaggtctacccacccccatcctgtgctccgcaagctgagtctgagacccagagggagaacacagctctattatttttcatcttgagtcagcccaccatccaggctgctaagttatatttggacctcgattctctcatccagtgcttcggctgtcccagttttttggccacctgaaactttggtaaatatgtcatccgttcctccacccaagtcacaggtaagaaggagcaaggagagaggatgaaggccagaaccttggcccacgtccctggagtccttttgggcaggtatcgattaattaatgataacattccccctgagttctccaggcgcaactgagtgccgatcctgcgctagtgctggggaggaggcggcggggcaaacaagtcccccacccttgcagggctcacacactggcggaggaggcagaggcatgccatctataaatgatcacttccactcattctgtgatttcatttttacagagaacccgctcacggaggatctcttttgtgctctgtttgggatgggcaggcacctgggagcaagtggacttagccacaaagcagcccacgtgtcccaagttaccttgcagggcttttggggagtcagccccgcactttgctgaagttcctgcgtggccgggactgggcacctgctgccagcgggacagacctggcccaagggcttcctggcgggtgcgcaccctccccctcataactgctaattctttgttcatcattcactgccagtctcacctgcagtgcctcctgaaaggtctgggaggcacgttctcctgcggtgctggggtgtgattcatcaggacccggagattccagacgggcctgcagtccgctctgtttatctggggagatgtttatcctcctgcccagcaattcagggggcttggtaaagccctcttctgggtccagggtacctcctccactggccagaggcagtgatgctgggcttctccaagtgtgatgggcatgggtgggggggccattgggggtcctgtcccattaatggatgaagaaatgcatttagggcagcccgggtggtgcagcggtttagtgccgcctgcatcccagggtgtgatcctggagacccgggatggagtcccatgtcaggctccctgcggggagcccgatgcaggactgattcccccaatcctgggatcgcccctctagctagaggcagctgctcagccactgagccacccaggcgttcctagcatttccttttaaataaaacagaacgaagagaaggtatcagcgagccctgcaggtggtaagggtacctgctgttttatgaacttttcctttcagttatatattagatctatgtgcggtgggttcagatctaagatccgtcttttactgtgggtcttcatggcagaggttccaaagctacaggcacagtgattaaatccatcctcttgagtctgctagaacagggttcggctctgtgactttggagtctgttacccaacctaagagaatttcatcaataaagcaggattgtcgtacctatctccttgggcttttatgaggattaaatgaaataataagtggaaattgcttggttcagcacctggaatgtaatgtgttccgaagatgggcttgttttcttgctttgaagatatgcacacatggcctggtttccttctcatccccagcgctattaatttcacttcctactttctattttcagcagtttggagaagcaagtctgtggctttctagcaatcctggatttcatggatattatctctcacatctcagagggtttcaaggctcataaacctgcttctcttggggctcgatgcctgtgctgcctgtagtttgggaccggcccccgcccaccgtcctttggaggcccgcctcctgggcccttgttacctctccttccttttcctctgaggaatggaaaccttttcctgtctgtcctcccagaggggtaaactctcccgcattccctgggccgggcctcttttcccttctgccgcctcccggaacccctgctgctcagcccacgccctctgcatccgcatcccggggctctcgctgttcagaccccgagcgctggagacagctggcaccagggtttgagggatccctgagccgggatccaagagccgggtgggcagacggaaaagcccagctcctgccaggagcagcaccgggttggcttgactggttggctttctccccacgtgaaagccccgcagcctctcattcatccgcagccagggctggaggtaccaagatgaacgaaggacggctctctgcgttcaggggctcagtctggagtctgggggtggctcagtgggttaggcgtctgccatcggtttaggtcctggagtcgagccccatgtggggctccctgctcagcggggagcctgcttctctcctccctcagcccctcctgtggcttctgctctctctctctaataaatgagtaggatcttaaaacaataacaataacaacaacaacaacaacaacaacaacaacaacaacaagccctagctcagtctaggcctagtctttaatgcccctccttgaaaaggtttgcatcaagcaatgggtgcagggggcggggatacctgcaggaggtcacccagaagggaacctctaacagtggaaatcacctttcttaacaataaaatttgaattcaaatatgtcacagtttatagtctgatagaagcaggatcaaagaaatgtggaggatgagagtttgcttttgaaaaagcatttcagggactctcctcctcaattgtaaaacagaaaccatccttgtttttcttttcagattacacattgagcgctgggtgtcaggagcggggtggaagccagaacatcccttctgggccacgctgaacacagcacgacacagagaagaccctaggtcatgaagtctgctcctcgtctgggaatgggtccctagctgaccatgggacaccccccctctgttcacaactcgcagataaatataacttagaaaaagtattgctgtcagtacaccaaaatggatacttttcaaatattcccagactatataccattttcagcaatcccattagaactaggctttgattattaaaaatgccaacttgattagatagaaactattttctctcaactttccttttatcacaaaaatgtgataaaatttttaaaaaatattttatttatttacgagagagaacacacacacacagaggcagagacacaggcagagggagaagcagcctccatgcagggagcctgatgtgggactcgatcccgggtctccaggatcacgccctgggctgagggaggcgctaaagctaaaccgctgagccacccaggctgccctgataaattgtttttaatctgtgctttacataccatgtggacctggtgtgtcaaaattaaatttcaagagaaataggtgtatagaaagatcagtggagcagagccctcatcctgaaaacagtacatataaaagatactagtaactcatggttggtacacatatttttcagtattttaatttctctttctgattacaaaatacattagacgcacatgacacagaaagtgagcttctccagtaattccatttccaatatcaaatttcagaaacagttgcctgtctggcccacctcgtagggaacagagagatgccggtgcatgaacacttccaggagcatacgtagaactagaaatgtttggggcgtctgggtggctcagtcagttaagcgtccgactcttgatttcagctcaggtcatgatctcagggtcgtgacatcgagccccgtgttgggctccgtgctcagtgtggtgtctacttaagactctctcttcctctcaaataagataagtaatttctttgaaaagaaataaaaggacaaatgtttgcttccattagatggtttgaagtacttctgcctggggagaatgcagggggcagaggaccttatgccagccttcggggcagcaccctgccagccctgccctgtctctcagctagagctggtgactgggagtgtgtgtgtggggtgttcctccttatgccattcgtcagtctgggactaaggacagggaagggaaagagctgggaggtggcaagcaatcactgcggccacaagaggcgtcaggagaggcaaatgcgcagagagagggtcgcacacaccctgccctcagtgaccttaggagactgccccgtgcaccctgccactggggctgtggggcacctgcgggtgggcaggcggcagtggtccccctggcagcacagagtgactgctcaggatgaagccctccccaagggacatggggaccggcaggttgcgcctccccttctccggttcatgcggtcagcgttagggatgctgggctggtcctccatggtggagctaggctgagacttgagacagatcctccccaccagccgtgctcccccaggtgctctccctccatccctcctgccatcaccatcggtctcctctcaacagggcctgttgcagccaaggcctccgcctcagaccttctgcttagctctcttttgctcaagccgagatgacctcaactcgcaattcccgaaagcacaccaccatttgtggcactgttcaagaaatcctagacaatagagctggggtgagcaattgccatcggagagggcaagcctaactaacgcggggtgccctgcattcaagaagactacctcttcgtcctgcaagtttgggaagtgggtttaactatgtgaggacaggtttcttgtggctgtggggaggatgtgccaacggttttatggatagttgcctcagattgcaggtaaccggcttctgcgagcccccccgcacagccccttccagaggggcccacggaagttgggccatcacaagtttggctgtgtaacaggaatgctttgctacacctccccacttcctctgtcccctgctcctgagaatgtgtgcagcatacgtgtgcgtgcgtgcgtgtgtggaggggcacagggtgctgcatcctactcagagagccgggtatcataggatccctgctttcatcaggcaaatgtgactcagtcgtaccctccagctgagactcactcgcggactacactacctccgcccccattcttcccagaactggctcctgtccttcttttttttttttcctgtcctttgttaccatttcctcgccaacaaaacctggcatgggctggattgtgcccctggaacctatggatgcaaacggatttgggaaagcgggtgtttgcagatgtcattaaatcaagaatcttgagagagatcatcctggattatgagatgagccctcaatccaaagacaagtgccctaggagccatggaagagacacgacaggatagcgggcctgagaagacacctgaggagcctggatttcctgcacgggtggcacaccgaggagcgccaggagctctgggagctggcagaggcaaaggaatcccccccccccccccaggactgagaattcctcctgttttaggctcggctggtggtcatgtgcctgggcagctccgagctgggccttccgggcgcaccgcccccgcagcagcagcgcccttggggtgcccgccccatcccccgatgcgcccttcgccgctgtcctggcccctccagccgttggcctgcctctggaagccttcgcagtctttcccgctgagacctgtcttctctctgcagccaactgcccgaggccccagcgtgaccttcgtgattccccttggtgaaattcatcctgtctcacggctccaaacgccctcggcacacggtggacgctccctatttccctctgcaggaacctggcccagcaggagctcaaaacctatttggaagagtagaaccttttcacataaatcaccattgtaaatgtgtttaccgtagaggggcgcccagctgctggctccactggaggagcatggggctcttgatctcgaggttgtgagttcgagccccacgatgggggtagagatgacttaaaaaagttaatccatgtgtttaccatattcactttggaagcactttcagatatactttcttgctcttcttagaaaagcgctgtggcttttaaatgacccagtgcttgccttcagctattttgtggtaatacccaggtttctggatctttcatgcctctctgacagcctctctgacaaggccggagcacccccggaaggctctgctccactgatcctgcagtggcaagatttctctgcaggaggaatcccgtctagtgactgtactctgactatcaaggcttcctgagaggcttcctctctagaacaggtgttggccacatacaacctgtgggccaaatccagccggttctctgtttttgtaaagcaaaccatacgggaaggcagccacattcatcagggtacatatttctggtgcttctgtgctccaacagcagagctgagtcgcttcaatggagactgcagagcgcatgagccaaacgtttttattctctggccctttacagaagtggcttggcggcccctgctctggaattagtcacagggaaggctttcccctcctgctatgtttgcacaatccgtctcctacatccactctgggagaaggaaggtgtgatctttttctgttttcccacacatcacactcccaggattcgaaatggtatgaaatctactacgtgagtgacagtcttcgtgattgttaaccacctttcttctctcctccctcccagccgaggcctcctcccagagtggtgtgtctggtgatcaataaggctgggattcctcagaaaggccttcccacattggcaatactcccagatccctctcttgtgtggacttttcttttctttcttttattttttataaaagattttatttattcattcatgaaagacaatgagagagaagcagagacataggtagaaggagaaacaggctccatgtggggagcctgacgctcaaccactgagccacccaggcgtcccctgtgtgggcttttcaatggaaccttcgattcggtttggctaaaggcttttccatgcctctggcactcaagacttctctggagggaacattgggtggctcagtggttgagtgtctgccttcggctcaggtcatgatcccagggtcctgggattgagtcctgcattgggctctccacagggagcctgcttctccctctgcctgtgtctctgcctctctctctctgtgtctctcatgaataagtaaataaaaatcttaaaaacttctctggagtatgaatagcctgatgagtgatgacatggaactgctccctgaaggctttcccacacccgccacaggtaaaaggcttttccccagagactactcaagaggaagcaagtattgggagctttgacatttgtggggcttctcttcagggtgaactctatggggctcagtagttgatataatccataaaagctcctctacccttgctgcacacatgtggcctatccggggtatgaaccctctggtgtgtgatgaggtgggacctgtctctttgaggcctctacagcttttttctagcatgcaccgtgtgatcaacaacaaaaaaagcagcctcctgagcaaaggcctctttgcgctcaccaatacacacatacttcttcccatcaggaagaaaaggagaaagggcctcgttgtcctggaaggttctcacacttgttacatttatggaggttttttgattacaaagtattgatgcgaagcctgaatgactgactcctggtacttcctctccatcctcagcactcaggagacttctccccacgagtcggaagctgggagctagagctaaaggttttgccacattgcacttgttcacaggccttctgactgtcgtggatggtcacgggcctgcacacaagacttcccacacctgccacagaagagggctctctctctgtgagcaaaaacccacctgaggacagaacaatcaaagagagaacggaggcgtgtggccctcattctacctacccttcacagcaagggagggaaggggcctgggatgcggcaggagccggcaggcaaagaaggcccacggtgctgactgataacatgcagagactaggagggaggaacacaggcctgggcaaagacgcagggaatgaacagggaagtcagctgatgggtagaggggaagtcaacccccaggaggacggggtaagaaaacaaagctgcaggaaaaggggtacggctgtgggcggaggtcctcggtgtcttcagcaactggtcggtagaggcatggcaccagccagcatcctctgggtgccgagggctaacccaggggagaggagatgggcaccagcgtattaccgtattactgtggaggtttctatcagatttccacctactggctaagagactgagagaaaaatgaggagtcacctaaatcggggctctgccctcggtgcgtcaatgtttcaaaaggcacaagggaaggcaatgccacaaggaggggtgctagtgggctcccctcactcagccatgcaggtgaagccctccatcctcagtggccagcagatctggtacctgccatgcctctccttgttcccggaagatgatcagatcaggctaggaaaaatgaaatcctattcatagcactgaaaacaggaaaggggagataatgggcccaaaccaggcttagtccttctgccaacatgaaatagatatggccaggggctgctctccaagggggggaccatctcaggccagaagtaaaatgcccatgggcaaggtcttccatacaaaggcagatcactgggtgctggagagcatagactcagatcacaggaaaggtgcccatttccagtaagggagatatcacagtatgacgtttatgggaagcaaaaatagtgcacttttcatcaggagggagcatgcagcttacaaggattcagaagctaaaatcaactaaactgaaatctttattttatttgtttattcatgagagacacacagagagagacagaggcagaggcagagacacaggaagaagacagaggcacaggaagaagcaggctccatgcagggagcccgacgtgggactcgatcccaggtctccaggatcacaccctgggctaaaggcagcactgaaccgctgagccacctgggcttccctaaactggtctttagaccatgctgctaacaaatgggtggtgacaatgacttagcagtggaggaacagagtcacacagagagcccttacccaatcagatcacattcccaacattctccatcacgtcttaaacggagattcctctcagaagggtcacacaattccagttcctatgagcgaagtgtatggccatggcctcacacatcctcaaagatcacccaatcctgaaacacaggatttctgctgtcaccagaagaagaatccttggggaattattcagcaggataaagaggaggctctgagtctgtgtttatacctgatgagcaaggacagatatggaacaagacaagggtcttccagcagggaagggagtggttagggctgctgtgtccagcaaacgccacagcaatgaaagtgcaagggaaaactgtatttccctcccctactctcgatacttctggtcaccaaatatgtgtgtaggggggtgttcccacaccaaacagttctctgacaccagctgggtgtccctcaattttttttaaagatttaattttgaaatttttttttcttcattttttaaattttattattatttattttttaaaggaatctccacatccaacatggagctcaacctcaccatcccaagatcaagagtctcaagctccaccgactgagccaggcaagtgccccaagagagtggagagagcatcagatccgataggtgaagggctcagccccaccaggctgcctccacttcagatgctaatcacaagtccaagtcgtcacctgcacttctgattgaatggctaaaaatcagaggttcctatgaccctctcctctcctcagattcaatcaatttgttagagccactttcagaactcaggaaaacagtttacttatgattgccagcctattccaaaggatgttaaaagatatgactaaatggctagatgaagagtgtagatacttctgtccccagtggacttaggctgtgtcacctccttgcagaaggatgagccccaggaagagctcatcaaatctcactgcccagcagttcttatcaggcttaatatccagccctctccccttcccataggttggcaggtggggctgggaattgcaatcctccaactacttggtctctctggtggccggtcccatcctgaggctgtccggggaccctacctgccctaagtcccctcatcagcataaactcctgtgttcttggaaagggactccttaagagtaacaagagacaatcctatcacccaggcaagtccaagggttttagaagctcagtgccaggaatcagggctgaagaccaaatatatttattataccgtgggagggaatgcaaattccaattgattaattcgccagccaaggtctcccgaaggagcagaggaaacagagcttaccagatccaagtgctagggctgcagccaccatgactgggcctcaggactttcttctgcagagggtgggggcttcagggccacaatgggcaagtttctgaggaacacacacacacacatacacatacacatacacacacacacacacacacacacacgagaggcagccctctaccttgtaccctgacccattcccaatgcccacggagggaccaaacacacagaacaggaatatttacagagggggagtgtgcacagccctgtagttctgaccctgcattcaaatctgcttcagaaaccaggctttgaggcagcaatggacagtaagtacccagcatccctcatgtggaagacaagtaggcttcactctagaatttaaaaatcttcccacatgtaccctaaccatcttaacttgggccgctaaataagtaaacagctaaaagtatcgcaaataataaatctccatcggtcagatggatatggcatgtctctgctgtgaaatccatgagctataaagagcataaagtagacttacatggaaagacctggagatgtttcatgatgtagtaaggtgctataagtggaaaaccaagatttggcttgatccttttaaaaaacacatatgcttggggcacctgagtggttcagcagttgaacagctgcctttggctcaggtcgtgatcccagggtcctgggatcgagtcctgcattgggttccctgtgggaaggttagcttccccttctgcctatgtctctgcctctctctctgtgtctctcatgaataaataaaatctctaaaataagtaaataaataaaaccaaaaacatatatgcttacctaaaatctggattttattctaaattctttcaaaaaaggatttaaaaaggtatccattcactttccacatttttacacaaagagctttatgaaaaacattttctctcaaattcttttattatgctaagtaatatataaacataaaatgtatttcttgatttttatttatttatttatttatgatagtcacagagagagagagagagaggcagagacacaggcagagggagaagcaggctccatgcaccgggagcccgacgtggaattcgatcccaggtctccaggatcgtgccctgggccaaaggcaggcgcttaaccgctgcaccacccagggatccctatttcttgattttttaaacaatagcaaagatttatttttcactcatgttatagaagggctgtggctggctatggctttgctccatggcactcaggctgaaagaaccccaacaaaactttctcatggctgagcccaaccagcaaccactttttttttttaagattttatttatttattcatgagagacagagagagagagagagagaggcagagacacaggcagagggagaagcaggctccatgcaaggagcctgacatgggactctatcctaggtctccaggatcaggccctgggctgaaggaggcgctaaaccgctgagccaccctggctgccagcaaccactttttaaaaagactgattgattggttgatttaaatattttatttatttgacagagagagagagagagagcacaagcagggggagcagtaggcagagggagagggagaagcaggatccctgcaggagcagagagcccggagtggggctgaatcccagaagcctaggatcgtgacctgagcagaaggcagacactttaactgacagagccactcaggtgccccttaaagatttatttgtttgagggagagagacaatcagagaaggggcgggggaaaccatcttcaagcatactttccactgagcgcggagcccatgtagagtccaacacggggcttgatctcaaggtctacgagatcatgatctgagctgaaaccaggagtcagatgtttaacctactgagccacccaggtgtccctcaaccactctttttttttttttcaactcttaaaaaaaagttgtggtatgatgtatagaacataaaatttaccgttgtagtaatttttaagcatacagctaggtagcattaaggacattccagctgctgggcaaccatctccaacatccatctccagaacttttctcatctctcatctacccaaactgaaactccatatccattaaataacttcctcccagcccctggcaagcactgttctactttcctttaagaatttggctcctcaggactcccgggtggctcagtggttgagcgtctgcctttggctcagggcatgattcccaagtcctaggattgagtcccatgtcaggctccctgcatggagcctgcctctccctctctgtgtctctcatgaataaataaataagatcttaaaaaaaaaatttggctcctcaaggtacttaagtggagtcaaacagtatttgtcctctgtactgtcttactgcactaatataatgtcctcaaggctcatccccattgtagtagcatggtcagatgtccttcctttaaaagtctgagtaacagtccagtgtacagatactgtgtttcatttctccagtcccccacgggtggatcctgggttgcttccactttctggttattatcactaatgctgctataaacatgggtgtgcaaataactagagtccctatttccaattcttttggaaatataccaggaagtagagctgctgggtcatatggtaattctaattgttttgaggaactgccatgacattttcagagtggctgcaccattgtacattctcaccagcaatgcacaagggttgtgatttctccatagcctcacgccaacatttgtagtttgttttttctggtaatagtaattgtaatgggtatgaagtagcatctcactgtgggtttgacttgcatttccctaatgatgagtgatactgagcatcttttccagtgcttattttgccatttgcatatcttctttgggagaaatgtctattactcaagtccttggccccctttttttttaactacttttaaaaatatatttatttattcatgagagacagagagagagagagagagagagagagaggcagagacacaggcagagggagaagcaggctccatgcagggagcccgctgtgggactccatcccaggtctccaggattgcgccctgggctgaaggcggcgctaaaccgctgagccacccaggctgccctactgtctacttctgtatagtgatttagtgtttacaaagtacttttatgcgtattttttgataaaatagaattttatttaaattcaattaacatatagtgtatactccagttacccgagcccccactcccctcccctcccacaaccctatttgtttcctatgattaagagtctctgggacgcctgggtggctcagtggttgattgtctgcctttggctcagggcgtgattctggagtcccgggattgagtcccacattgggttccctgcagaggcctgcttctttctctgcctgtgtctctgcctctctctatctcaggaataaataaaacctaaaaaaaaaaaaaaagaaagagtctgttatggttcgtctccctctctgatttcatctttttattttttccctcctttcccctataatcctattttgtttcttcaatttcaggagtgagatcataattgtctctgattgacttctcttagcataatactctctagttcatctatgtgattgcaaatggcaagatttcatttttttctgatggctgaatagtattccattgtatatagatacacatcttctttatccattcatctgtcgatggacatctgggctcttttcatagtttagctattgtggacattgctgctataaacactgggatgcatgtgcccctttggatcactacatttgtattttggcggtcaatacctagtagtgcaatttctggattgcagggtagctctattttcaactttttgaggaacctccatactgttttccagagtggctgcaccagcttgcattcctaccaacagtgaagagggctcccctttctccatatccttgcttggcccgttgattaatgggagttgtttggttttaattgtaggagtattttatttattagtttatttatttgagaaagagagagcatgtgtgaaatagcaagagcacaagggagagcagcagagggagaggcagagtgagagagagaagcagactccctgttcagaagggagctcccttctggatgttcagaagggagggatcctgatgggggctcctcacggggctccatcccaggaccctgagatcatgacttgagcagaaggcagatgtttaatcaattgagccaggcaagcatccctaattgtaggagtattttgtatatttttggatgactttcaatttttaaaaactttctaaaaaactttttgcacagggaaccctgggtggcgcagtggtttggcgcctgcctttggcccagggcatgatcctggagacccaggatcgaatcccacatcgggctcccggtgcatggagcctgcttctccctctgcctgtgtctctgcctctctctctctctctgtgtgtgactaccataaataaataaaaattaaaaaaaaaaaaactttttgcacagaaaatgcctacaattcaagaatactgtttacatttggattgggattttggagatttcttagttttttttttaattttgaaatggcatatctcaaaggatcctagatgtttgcgtctggagttagaacagcatcacaggctgaatgtaaaggcagaataaatatgcaaagctaagcaagagagttagtctcttagcccatctctgcccctccagccctccgccatggtcacttcacaaatcagagtgggaaaactctagtagagagaatttgcatctgggaatagtgacaagggccatcacttcatatatattacaaagttattttggttttactgagaacatcctcagaaaaaatttctacaaagggtaggcagtggaaatcatactttcttaccaaaaatgaactgtgacaattaacaggacagttttcaaaaagctgcttcaatgtgatctgagcactctgtcagaggctgctagtcacctataaacacctctctcttctttcctactaacagaaacacattttttaaaaaagattttatttatttatccatgagaaacacagagagagaggcagtgggagaagcaggctccacacagggagcctgatgtgggacttgatccccagactccaggatcacgccccaggctgatggcagacgctcaaccgctgagccacccaggcgtcccagtacagataatctaaataaatttattatttaatatttaaataaatttaattatttattatttaatatactattatatttagattatattaaatttaatataatattatttaaatttttttttccaaaaaaaaaagtaattgtctacttttgggtgtgggctgatgagaaaatagggaataaagtaaatgagaccttgcttaactaatggtgacaagagacctcaaatggagtataatttgcacaccctttacttctaaggttcaaaaaacttccagctcacatcacatacatttttgattaaacatctactcactggcttgagttaagtccttggttttcagatttactaaataacttttggctacattttaaaataaaaggatccttaagagataaagactagtcacatttcaggctcacatatatgtatccattgcaaaggcagctcaaaaaacacttgagccagcacagtaaaactaaatgaagtaggtagggccttccaggatccctcctttaaggggaaaatgttgaaacacacacatttaaaaaggaagcaatgcagcttcctgttgtgtgcactcccttctctccctttccttcttgcacggctctccacactctgtatataagaatatttcaagaactaaaacacacacacacacacactaagctgtcttttgaatacagctaaagttaaaatgtgtatgtaacaatccaaattggcaaaattcaaactaaactaaaactgtaacaggagagtggctctgtagatactagcatattgatgccacccagtgaaattcaataatgcccacatctgactcacttacacataaattcatgagggaaagaatttttatcttttctgttcattgatgatctcaagcatctagaacaggatgtggcacataggaggtgtgggggaaaaatttttttggaaggactacatagcaataaacaaagtctctgcttgaagtaaagggtattgaataagttcccactaatctgtgtactcatctaagtgtataaagtgaatacaaatcttatcaatcaaatacttagatgttacaaacacatggattttccccacacaaggcaatgagatgtaaattatgggggtgggggaaagatgacgaggcagcatgtacacatgatggacaactgtgaggatattcaggtgccagaccatggggatgagaacaggcactcaggacccaaagagtggaaggaaagacaagattaatcacttgcaaactcacgcacctcaggctagatttaaaggtgaggatcagaagaccccgatgtgcgtgatttgggctttgtctttgatgtaacttggaaagctgtgatatagacaatcttattcaaacatcttcaaatctgtattaacaggctaccacgtagcttgctgatacgggttattaagatcaatgtccctttttttaaattctatgatataatttgactttctatatcctttttatagggaaatgatgtgtgcccaacttgcagaaatagtcttgttcgcttgccagatttatttctcattgtaaattcacatgctggctaattataacagcttggaagttacataaatgtccaacaatagggaattggttaagaataaaattcattatagtgcatatgtataagacaacgcagccattaaaaaacatgatgtaaaagtagattattgcaacaggaaaatatccacaaatagagggcatataaaaaatcaggttataaaacagatgcatcaaataatcccagctgtttaaaaaacctactcaagagggaaaaaaaaacctggtagaattttactaagcatagggttatgtatgccttagggtacaattagagattatctgttttattctgtagttttataaatttaggtcttatttttctgtattttccaaattttctataactgaacaataattacttctgtaatcagaaaataagcagcaataatttctcaattttcactcatatgaccttagggaagttaatcagcgtgtctgtgctggtttttttacctgtaaatggggacaaaagcaccccagcccttagattactagaacacgtaaacccttataacagtccctggcaagtggaaattgcttagtaaaggttggctattggctctgaaattcttgcgagtacggggttatgtgcttgaggaccaggcctgtctcacctgtggggactctccttgtaaagtcagcctaagaagcccataggtgctttcagctctttctactaacagctaacagaggtagaaagggaaattgagggctgagctcacaaattccccagtctctaggcaccagggaagaaatgtaaatgtgagtgaagcagctgggaatctgacaaggggggggggaccctatggctccccagagagggtaagactccccaaaagtagctcaattcagcttatttaatttaattttatttattttaatatattttttttagtttttatttatttatgatagtcacacagagagagagagaggcagagacacaggcagagggagaagcaggctccatgcaccgggagcccaacatgggatttgatcccaggtctccaggatcgcgccctgggccaaaggcaggtgccaaaccgctgcgccacctagggatcccagcttatttattttatatacacatatgtattttaaaagattttatttatttattcatgagatgcatacacacacacacacagaggcagagacataggcagagggagaagcaggctccatgcacggagcctgatgtgggactcaatcccgggactctgggatcacaccctgagctgaaggtgggtgctcaatggctgagccacccaggcgtccctacatatatattttaaagatttatttgagaggaagcacacaaggtgaggagaggatagagggagagggaggaagaaactcaagcagactctgtgctgagcaaggaggctgatcccacaacccatgagatcacaacctgagtcaaaatcgagttgtacgctcaaccaactgcaccacccagacactgtatttattttttaaagattttctgtgtgtgtgtgagagagggggagagagagtatgtggggggagggggggcagagggaaagagagaatctccatcagcctccatgcccagcttggagggcccgttctcacaaccctgagatcatgacctgagctgaaatcaagagccagacacttaactgacccacccaggtacccctaaacatttcatttttaagtaatctctacacccacctgagggctcgagttcacaaccccgatatctagcgttgcatgctctgctgcctgacccagccaggtgccccagttcagcttattttaaaagcctgcactggcccaacagcacatctgccctggagctgcctgaaccgtgcattaaaaagtatccacagaaggtgcacctggtggctcagtggttgaacgtctgctttgggctcagctcatgatcccagggtcctgggactgaatcccacatcaggctccccatggcacgctctgtgtctcatgaataaataaaatgttccaacaacaacaaaaaagtctcacagaaaagaatttaaagtgatggggattttagaggttgttaataagccactccagtcaatgcttcattctctttagggtgtttatgactgggtttcaaatatttgtcagtgttccctcagggaggaagttgttaaagcacacagcaacctacagttcccatactcacatgccagaggctgtattaatgatggaaaccaactgtatgacctacctgtggtgagagagattccaaagcttgcctgttgaggggtctgaaggcaagtcagtctgactgattccggcctgaacgactgaagaggtaattcagagagtaggaactaatccttcagcaaatgtgagctgccttagaactccagggaccatataatttgttgtcacaatggggatacttcttacctctgagagtggaagggaatgctattaataattacaccaggacactgggtcttgactggaaatgcctcaaacaaactgggatatgcggctacccagttaaaatcaaagcattccctgaggccttgggtaaattccagctcttcacctgaaaaccatctacttacgtggcaggaagaaaccactcttttcaaaccactgtttactagaaaataatccagaagacctatttcaagggcttactacccacaagagtttgggatcttcatctctgaaatccctggactgaaagcagagaggctttacaaccaggatgagggcccagcttcccagagctgatagagtgaaaagtgtttcagaaggaaaggcaggaaaggttagttgatctctcagtccctggtcctccagagatccctgacaccaccccagcctcagtgaggaggggagggagggagctattctgagtagcagctccatctgaactcagcagggtcagagtctatgccaccagtgaacctctgttccccttttcccactggactccaggggttacagccgcaatataatgtcagaagccacagatacaataatgacaggaggccatgatttcaggccaaagaccacgtccatagctgacaccagatgggacttaaatttgatgcatgttctaccaaacaagtgtcttctgcattctacagatggaaaacggactcctttacattcccatggtctttttgacaattatcctacccagcccttttcctatgttgtgaatttttagcttcttaaatttgcctctctcttccctcctcctgtactaattaacagaatcccaagtctggctttgaaactacagaacttcccaactaccggtgaaaaaagtctcagcgaaatcgggaggaaaaaatatttctctcttctacagctgcagaaaagcaagcaccatacaatgtcccgaaagtgttcttgctgaggttatttttaaggagtctttcaaactcctggacttcagacacttactacatcctgggaaagtgatcttcaaagtctgtaaattttaaagaatttaatatcgacgattctgattggttacttcatttgtaatcctgaggggcacctgggtggcacagtcagttgagtgtccaacactagatttcagctccgatagtgatcttagggtcatgaaatcgagccccacatcaggctctatgctcagctcagagtctgcttgatattctatctccctctgcccctccccccacttgcacacattcgatctctctaaataaataaaatctttaaaatgataataataataatttgtagtcccagtagcactatttcaatagatatggtaggtttttttggaaggtgtgattttttcattcttaagccaggaagaggttcattactagcaactttgtctattcataagagcatggagataaaaaggaataaaaacagtggctttattggattttgtttttaaagagaatttgacaatcaaatgtttaaattaattttatcagcaataaagcaccaactgtttcaatgtctgatggttgaagttattctttttgcttttagcaaatctgtaagaggactgacccaagctgtctgagtcatagggagtgcatcaatcctacactggggccaggtatcaagccccagcaaccagaagttgaacaggaatgggctcttggcccttcaagcaaccaggaaaggtcttcaccttctataggcaaaacagtctgtcctcttcctgttcactgggatgagaagtcccagtaatttcactaagaggacagaggtgaggaaggagggttggaggtcccactgccatcaccgagaccttttctcagtccaaagtcagaataggggccagattcagattggtgcttatttgaacatgagggttctgagaatttgagggggtccagatccaaactcccattctctactctgcctccatttccaaagaaaaatgaaaatgcagattctaaatagaacacataaaaactgtaagtgctatgaatacctggctggctcagtcagcagagcatgtgctcttgatctcacggtcctgagtttgcgccccatgttgggcataggttacttaaaaaaaaaaaaaaagttaattaacaacatatgaaaagaaaacctttaaatgctactacactctgctcacttagaaatcttaaatccactgggacctgaggagggtgggaagaaatccatcttaagtcttccttcatagtgactctgaaccagagttcagtgctgagggaaaaggcttggatagtcattggtaatagtaaaataaaccaaactatataaataaaataaaataaaccaggaggagaaaattaactgggatgaacctaattcttaacaagcctttagaattactactataatgggtataagttgaaggcagacaagacaggggtcccaaaggccttcttgcacgtacctggctatggttttgtccagtccagatacacaaggcttccccactttccaaatagcttactgcttcagttttatagactgaaaatcctatttatgggcaaggaaaagggtcagcatgttaaggaatcagggtatgagggcaactctgctgacgaaccccctaatttcatggctccaggcaggcaaactgtcctcctccttgctcctgccccttggctccttctcactggctccagatattccatttgcttccttctttcctatctttccatgaccaactgtagacttcccagcttcccactatcttgctgtccttgctaacctaaaataagcttctcagatgaaggtttttctgctgatcaccagagaaatacagaaaatgggtagaaagcctgggctatgtttctggcattccagataccctgggaatctcttttctgccactttttcatatcaaggttggatttcaactccatccattagtacatactttttccaacatttatactgggggacttcttttgtaactacgaaatatgggggtgggggtgggggctgagaaactccagatgcgaatctttcaccttaatagccctccaaatttaatctaattaaatcattctgatgacagaggattatagtgataaaaggaactaaagaccgattccctgtattcgagagaagttggagaaatatgctctgaggggcataacatactctgaggctgggatggacctggcaggcaaatcctttttgtgcctctggaatgaaaaaaaagacagtggcagtgggcagctgccctagaaacctacgggtcagtcccaggcctgggaccctgacccgtggagtgcttacacagaactctagctgtgagaaaggtaagaactgacaaagctcagaagattgtcaactttcggggcgcctaggtggctcggtacattaagcatccgtctgtggatttggctcaggtcatgatgtcacagctcatgaggccaagccccagcgggtgcttggggctcagtgggggcacgcttggatactctctccctctgcccctttcccactcgtgctctcttcctctctctctttttttttttttaatatttttattttttatttttatttatttatgatagtcacagagagagaaagagagagagagagagagagagaggcagagacacaggcagagggagaagcaggctccatgcaccgggagcccgatgtgggactcgatcccgggtctccaggatcgtgccctgggccaaaggcaggcgccaaaccgctgcgccacccagggatccctctcttcctctctctcaaatgaatcgaaaggaaagaaaggaaagaaaggaaagaaaggaaagaaaggaaagtaaaggaaagaaagaaagaaagaaagaaagaaagaaagaaagaaagaaagaaagaaagaaagaaagaaagaaagaaaaaaaaagaaaggaaagaaagaaagaaaaaagaaagaaagaaaaagaaagaaagaaaagaaaagaaaagaaaagaaaagaaaagaaaagaaaagaaaagaaaagacaagaccaaaataacaaccaaaaacagaagaaggttgagctctgctatccagaaagttctggaagctctccagaccctgaagcgttccacaacattggaaacggaaaatgccgaaaatgccgagagaggtccacagttagtgagaagccgcaatgaggccttccagtcgcactgcctgggggccacaggggtgtcctgacccggcgcccccgccccggcgtgtccgtgtcaaaggccttcccaggccagtccaggtgactccacccttggtctctgaagcccacgtccgcatcatcgaaggtcacggcccctgcaacaggttggtccgctatggcccgggtcgtaccaacacttgctcctcgaaggggaaggaggcctgggaactcgaggggacggaggtccggcggcgggcgcggggagcggaggggcgccgaggggggcaggccccgaccaccgaccacagaccaccgaccacccgggcatgacccccgcccgaggcctcggaacccgcacttactgcgctggggccacgctgcaccgccaaggcgaggtaacgggagaacagagggcaaagcgcaggacgcgcgccccccgcagcacagcactcttcgcgccgaccctcagccgccgggtcaccgcggctcgcccgcgcgcccgccggccctcggccccgcccctgcccaccgcggcctctctaggctgcgcggaggacctcgcccctcgctctcggtgggccgctccctgggacgtgggtagcggggcggcctgggaccgccaacaccgcccgggagggtcctgggcgcttggccttccactcctcacgttttacgccagtcatctttaaaactcccttccccccattctctttccaactaaagagagagaggggggcgcctgggtggctcagtggttgagcgtctgccttccgctcaggtcatgatcccggggtcccgagatcgagtcccgcatcgggctccccacagggagcctgcttctccctctgcctgtgtctctgcctctctctgtgtctctcatgaatgaataaataaaatcttttaaaaagagagagggagagaaaagcctgtggcacaccaaatatatggaaataattactgttaacattttagagaattttactcctataattttctacatatagtttgatatttttgtgtttctgtcgtctccaacttccccacttgattttgtcatataagcactctctccccccatattgtgacccccgttgtgatactcttaactggattatcatcgtggattcattctatatcaaatcactcaaactgagcccaggaaaccagccttccactgaatggcacacctagtggcatctcagcctgtcctcggggaagtgctatgaagttcaccactgtttatctctgaggaggactgtacttttgttacacagcccctttctgtaatcactcaaaagaagacatttttatggtcttgctatcaagaaaagtttaatagagcaactggttagttttggcctatggactcagggagttttgaatttgagttgagtaggctattagaaagctagccagggagaggcctgggtgactgagtccgttaagtgtttgccttccattcaggtcatgatctcagggtcctgggattgaggggctccctgctcagtggggagcctgtttctccctctccttctgcctgctgctcctcctgcttgtgctctctcattctttctgtcaaataaataaataaaatcttaaaaaaaaaaaaaaaaaagaaagagagggatggctgggttgctcagcggtttagcgcctgcctttggcccagggcatgatcctggagaccccggatcaagtcccacattgggctccctgcatggagcctgcttcttcctctgcctgtgtctctgcctctctctctgtgtctctcatgaataaataaatacaatcttaaaaaagagagagagggcagcccaggtggctcagcggtttagcactgccttcagcccagggcctgatcctggagaccagggattgagtcccacatcaggctccttgctcagagcctgcttctccctctgcctctctctctctctctctcataaataaataaaatcttaaaaagagggagagagagagaaagctaactacaaattttacctaacgattaaggggaccagtaaatgcaagggtaactttttacccaaatctattctcagaattcaacctgctgccatgtttctttttcttttttttttttaaagattttatttatttattcatagacacacacacacacacacacacacacacacacacagaggaggcagagacacaggcagagggagaagcagactccacacagggagcccaacgtgggacttgatcctgggtctccaggatcacacccagggttgcaggtggcgctaaaccactgtgccactggggctgccctgctgccatgtttctatagataacattcttgcctggcataacaatatggtttagttattttgcagagactcaggtttcagtagaaacccatcagaacaagttaggacccccaaccttctcttggagcatgcaccaatgtctgatggatgaatatttgatatagaagggcctaaaaccctaccctggaatcataccaagtgggctattttctcatcatgagtcatatgaagaggcaagcagaagatctgtgaagatgctgacagtgagatcacttcaacccttcccttacttatttatttatttatttatttatttatttatttatttatttataaattttatttatttattcacgagagacacacagagaaaaagagaggcagagacccagacagagggagaagcaggctccatgcagggagggagcctgacatgggactcaatcccaggtccccaggaccacaccctgggctgaaggtggcgctaaactgctgagccacctgggctgcccccttcccttatttatgaactccctttatgtgattttttctttaatttttttttcatttatttatgatagtcacacagagagagagaggcagagacacaggcagagggagaaagggagaagcaggctccatgcaccgggagcctgacgtgggattcgatccggggtctccaggatcgcgccctgggccaaaggcaggcgctaaaccgctgcgccacccagggatcccctcctttatgtgattgtaaaatcatgtagctcctcttccctatacccaggtcctttttcatttacctttaaatatccctgactcttcccccttgaagagaggattttgagggttgagttcccttctcctttgcctttttttttcttttcttttcttttcttttcttttcttttcttttcttttcttttcttttcttttcttttcttttcttttcttttctttctttcttttcttttctttcttttttttttttttcagataagctcaatgccaaacctggggccccaactcatgatcctaggatcaaaagtcacagtctccactgactgagccagccagtctcccctcctttggctgcctcttgaataaactctcttcttgctgcatacttgatatctcagtgattggctctgctgtactttagtcatatgaacttggattggtcacaaatttggtgagccagccaggagctctttgatcttggttccactgcaccagcctattaaagggagtctggtgaggagtccaagaagccacataggctctttgtcctggggccacaccccaatttgactccactgacctcaggcgcttaatttaactcttctgggaaggaaatccctttggtttccgtatagacagacatccctttagtgagtaactcagtacaagtgaccaaattctttcttcctctcatttggtggaatgaatagggggtttggctttagatctcttggcctttttcttgtttacttaagaaaaggttgactagcaaaccatttactcagttggtaaagccccaacttttagaatgaaactagtgaatctttgttcacagaggtactcttggcctcatttgttcctgcagtttgtggtgtatttgaataaaactggctgtgttctaattgggaaatggggaatgacaatttgatcactgcatgcagccctttggattatattctcaaaaattggacaatgtttagttgtgaacctatgaaaaggaaaaaaaatgatcttttgcaacactgcttgactacaatattcattagactctggaaaaaaatagccaattaatggatccttaaattataatatcatcttgcaattagatttgcctttgtaaaagggaaggtaaatgggatgttcagtcattttttgcttttgtatcaaataagccagctcagaaaagatgtaaaattctattccaacaaaccagtaacactaaaaagcccgtgttgcctaatcctcaccagggagaggaggatgatttattgattacgtggattaaactccccttctactctatggggggcaccagagctactgcctgtcctcagcagtcccagtcccaacaacttgaaccccttacagagcccaaaccatgacccttagcctcagggggccaacaggtaggaatgatctccccttcttataccctaactcaatttggtcaaattgagctagttcccagggaggataatatctgctaaggcaggtcccagtctgaggcttaaatgcaggggaaagggggatttcctgtagggatgatttgggtccactctccactttgtgtaactggaaaaacaatatgcctacttacagagatgaccccaagaggatggaaattcattcacatctatttttgtcacccagaaccccacttttgcagatatacaaaatttgttaagtattctcctcacttctgaggaatgacacttaatactaaaaaaaaaaaaaaaaaaaaaaactagggaagttacctggctgcatgctaaaacccccataactccctaagagctaatgccatgatgcctgttcctactgtaaatcccaactggaatgtcaacattggagaccaaggtaagtttgaatactattggtggtattttagctagattaagaaagggggttcccacactgtgcagaaggtttttattttgatgtagtctcaataatttaattttagttttatttcctttcctgaggaaaatgtatctagaaaaatgtttctgtggctgatatcaaagaaattactgcctatgttttcttcatgttttatagcttcaggtctcacacttaggtctttaatccattttgagtttgtttttgtgtattgtataagaaagtggggggtgactggctggcttgctgagtggagcatgtgactcttgatctcagggttgtgagttagagcccacattaagtgtagagattacttaaaaataaaatcttaaaaaaagaaagaaagaaagaaagtgatacggtttcattctgttgcacgtagctatctagtttccctaacaccatttgttgaagagacttttcccattgtatattcttgcctccatggtcatagattaattgaccatataagcatgagtttagttctagactttctattctgttccattgatctatatgtctatttttgtgcagtactataatgtttgattactacagttttgtagtatatcttgggatctgggattgtgatacatccagctttgtttttctttttcaagattgctttggctatcttttagggtcttgggtcttatcttagggtcttttgtggttttatacaaattttaggatttatttattctagttctgtgaaatatgatgttggtattttgataggagctcattaaatctgcagattgctttgagcagtatggacatttcaacaatatttgtttttccaatccatgagcatggtatagctttgtttacatttgtttgtgttatcttcagtttctttcatcagtgttttatagttttcagagtataggtctttcacctccttgtttaagtttattcctgggtattttgttctttttggtgcaattgtaaatgggattgttttcttaatttctctctctctttttttaagattttatttatttattcatgagagacagagagagagagagagaagcagagatatgggcagagggagaagtaggccccatgcagggagacccatgcgggacttgatcctgggactctgggatcatgcctcaggctgaaggcaggcactaaactgtagagccacccaggcatcccattaatttctctttttactacttcattattcgtgtatagcaatgcaactgatttctaggtattaatgttgtatcctgtgacattactgaattaatttatcagttcctgtatttttttggtggagtctttagggttttctatatatagtatcatgtcatctgaaaatagtccaagttttacttctttcttaccaatctggatgccatttatttctttttcttgtctgattggtgtggctaggagttccagtactatgttgagtgaaagtggtaagagtggacatccttgtcttgttcctgacctgagagggaaaagatctcaggttttcaccactgagtatgatgttggctatggatttttcatatatggcctttattgaggtatgttacctctaaacctactttgttgagagttttcatcatgaatggatgttttactttgtttagtgctttttctgcatctattgcaatgatcagatggtttttaccctttctcttgttaatgtggtgtatcacattgattgatttgtgaatattaaactactcttgcatccctggaataaataccacttaatcatggtgaatgaccttttaaatatattgttggatttagtttgctaatattttgttaaggatttttgtatctatgttcatcagagatattggcctatagctagcttcctttgttttttttctttcttttcttctttctttctttctttctttctttctttctttctttctttcttccttccttccttccttccttccttccttccttccttccttccttccttttttcctttctttctttctttgcctttgtctggcttttgggaaaattctggccttgtagaatgaatttaaaaattaaactacaccaaaataaaaagcttttatacagtgaaggaaaccattaacaaataaaaaaactacctacggaatgggagaagatatttgcaaatgatgtatctgataaagggttgatactgaaaacatataacttcttcaactctacaatatatattgaacttgggatgcctgggtggctcagcggttgaacatctgccttcggctcagggagtaatcctggagttccgagattgagtcccgcattgggctcccagcttctccctctgcctatgtctctgcctctctctttctgtgtctctcattaataaataaataaaatcttttaaaaaaatatagaatttatacaactctacacacacaaagatacacacacaattcgattataaattgatttataaatataaaggcagaagacctgaataaacatttttcaaaagaagacatacagatggccaacagatacatgaaaagatgctcaacatcacttatcatcagggaaatgcacatcaaaagcacaataagatatcattttacacctgtcagaatggctaaaatcaaaaacagatgaaataacaattgttggcaaggatgtagagaaagagaaaccctcatgcacagttggtgggaatgcaaatcagtgcagccactgtggaaaacagtatgaatgttcctccaaaaattaaaaatagaattaccatacgatccagtaattccactactgggtatttacccaaagaaaacgaaaacactaattcaaaaagatatatgcacccctttgtttattgcagcattatttacaatagccaagatatggaagcaagccaaatgtccatcaatagatgaataaaggcacctgggtggtgcagttggttaagcaactaactcttgattttggctcagatcatgatcttggggttgtcggatcaaaccccacattgggctccaccctcagcaaggagtctgcttgagattctctcttcctcttccactgcccctcccactcatgctctttctctctcataaatatataaatctctaaaaaaagaaagaagatatgatatatttatacaatagaatattactcagccttaaaaagaatgacaccaaaggaaaaaaaaaagaaaagaatgacaccttgccatttgcaactacatagatggacctagagggtatgatgctaagtgaaataggtagattggtcagagaaggacaaataccatctgatttcactcatatgtggaatttaaaacacaaagaaaaaagagacaaacaaaaaacaaactttttaaaatagtttttctttctttcttttttttttaagattttgttcatttattcatgagagacacagagagggagagagagaggcagagacacaggcagagggagaagcaggttccatgcagggagcccgacgtgggacttgatcccaagtctccaggatcaggtcccaggctaaaggcagcaccaaaccactgagcacctgggctgccccaaaaaacaaactcttaattaaatacagagaacaaactggtggttgccagaggggaggcaggtggggggatgggtgaaatagatgaagggaattaagagtgcacttaccttgaggcacctgactcagttggtggagcatgtgactcttgatctctgagtattgagtttgagccccacattgggcatagagattacttgaaataaataaagttgcgactaagttttaaaaaagagtatatttatcttgatgagcgctaaaaatgcatagaatttctgaatcattatatcatacacctgaaactaagaaaacactgtatattaattatacttgaacaaaaaaagaaaaagaaagggggtccctaaacaaagaagtttgagtaagttttaagaaataaagcaatggggatccctgggtggcgcagcagtttagcgcctgcctttggcccagggcgcgatcctggagacctgggatcaaatcccacgtcaggctcccggtgcatggagcctgcttctccctctgcctgtgtctctgcctctctctctctctctctctctctctctgtgcgacgtcaggctcccggtgcatggagcctgcttctcactctgcctgtgtctctgcctctctctctctctctctctctctctctctgggcgactttcttaaataaaaaaaaaaaaaaaaaaaaaaaaaagaaataaagcaatgggtgcctgggtggcttgttcagttaagcatctgactcttgattttggctcaggtcatgatctcagggagtctgcttgtgatcctctcctgctgcccctcccattgctcgttgtctttctctctctctctcaaataaataaataaatcttaaaaaaaaaaaaaaaaaagatagggtgcctgtgtggctcggtctgttgagcttctgccttcagcctgggtcatgatcctggggtcctgggaaggagccccatctccccatctctctgctcagtggggagcccacttttctctctccctctgcctgccactcccttgcttgtgcacatgttctctttctttatctctgtgtcaaatgaataaattgttttaaaaaaaagaaataaagcaaaaacagaatgaggagccttcagactttcttgaaaggatttttgagatatataggagatatactgatatggatcctgtggtaccagagaatttaaaaatgataaatatgacatggcgggggcaaaatatcctagacattcaaaagaaactccaaagtctagagagtaggaatgtctgtgtcacaattggttgagattgcttttaatgttgttttgtttgtttttttagagagggaaggtggggaggcagagggagagaatcccaagcagactctatgctcagcacagagcccagtgtggggcttaatggaggacttaatcccacgacctaagatcatgacctgagctgaaatcaagagtcagatgcccaactgactgagccattcaggtggccctatctttaaagtttttttttttctttaaagtttttaacagacatgtgcaaaagagaaaatagcatagaaaatgaaacagcaggctaccttgctatttgttgccctaattcaaggaaaaccaagaccaggctgaggaccacaatgaggatgaggtgtacccagataagaaatttgaggttcttgggccccacaggatgtctcaatttggggcttcaaggaaggccattggaaaaaggaatgccccaagttcacaaggtctcttaatgggacaggacaacaaactgcccaccagatgcctgaattgactgatagtgaccaagaatgaaggagctcaggggttcctttaaaccctgaaaagcttgtcatcatttcctacaaggaaccccagataacaatgaaggtggaaaatgaagttacagactttttttattgatattggggacacagagtcagtactgaactcctggctctctctgctatcagatcaaaccatggctgtagcaagagtctcagggagaagtgttggctaaaaccttcttacaaccactagcctgacagatggaacaaattcactttaaacacaggtttttgtatatgcctgaatgccccattattttactgggatgtgacctgttaactaaatttaatgctgaagctacttcttctgtacctggtcacctggacaaaaaagtacccccagagcaagcttgtgcctttcaagcaatgttactacatgaaggtggataagtcctatcaaagcttcctgaagaagttatccaaaaggtaagatcactttacacacacacacacacacacacacaagctaagatcagatgtttgggtcaatgggaagctggggcgaacaaagccggtggcactcatgcatgttaaacttcgtggtgggtagagattcagaatctcagtacccaccaaaggaacaaatgaaaaaaagagcattcagcccattctccctgcctttttggaatttggcctcatcggcctgtgatgatctccatacaattcacctatctttcctctacaaaaatcaggcactcaagacttaagagctattcattaaccatattgcagactatatccactgggtgctacccaatctacatactctcttaacaaccttgtctggggactttaggtggttcactgctctggatctaaaggatgctttattttgcatttttcttggtttagatttgtgtgaactgaagaccactgagaccaagagtaagcaacagtattgctggacaatccttccccaaggttttaacaactccctcaccatttttggggaagtcctagctaaagatctgagaaacctctaattagagatggagactctcctccattacgtggatgatatattcattgctgagtaaaacaaaagagtcttcacacttcaatactattttgactctagacattttggctgagggaggttacaaagtttcaaggaaaaaggcccaaatctcacaaaggcccaaatctcccaatgaaatagcacagttttgagttttcaaagagacaaagaaatctgctccctgatagaagggaggctctagtctgagtggtagtccctaccatgcaggagacaattgtgcaagagacaattgtgcagcttgctttctttctttctttctttctttctttctttctttctttctttcttcctttcttctttctttctctcttgattttattttacttattcatgagagacacagagcgagagccaaaggcagaggagaagcaggctccatgcagggagccggatgtgggactggatcccaggtctccgggatcacgccctgggctgcaggcggcgctaaaccgctgcgccactggggctgcccaattgtgcaggtttctatgaatgactgggttttgttgaatttggatacctaactttgtttgacctgctagctaaacccctttatgaagcacttgagtgcctgatttttgtagaggaaaaataggtgaattgtatggagatcaatcacgggctgaatgaggccaaattccaagaaggcggagagaatgggctgaatgctccctttcgcttgttcctttgatgggtactgagattcagaatctctacaccaccataaagtttattttattttattattttttaagatttttatttatttattcatagagacacagagagagagaggcagagacacaggcagagagagaagcaggcccagggtctccaggatcacgccttgggctgcaggcggcgctaaaccactgcgccacgggggctgccctgccataaagtttaatatgcatgagtgtcaccaactttgctcgccccagcttcccattgacccattgagtcttcttgattggactagagaatgtcacaagaccttttggattatcagagaaaagttgttaactgcattgggcctcctggatattaagaattagccttttgatctatctgttcatgaatgacaaggaattattacccttggagtctttttttttttaagatttttaatttatttattcatgagagacagagagagaggcagaggcacaggcagagggagaagcaggctccacgcagggagcccgatgtggcacccagtcccgggaatccaggatcatgacctgggctgaagggaggcactaaaccgctgacccacccaggtgtcccatggccttggagtcttaacccaaaatcttggctgtactagaagatctgatgcttatttctcaaagcaattggacactgttaccaagggatggcctgtctgcttaagagctgccacttgtgatctggtaaaagcagcagaaaattttattttgggccaacccatcactgtctatactccctccactgtgtgcttctcttactaaagcaaaaagaggaatattggttaacatctagaagactggacaaataccaatccactttactagataaccccaatgttactttgaaggctgtcttcactttaaatcctgctaccttgctacttgttagtgcagaagaacccatttatgattgtattcaatagttgagcaagcttattctagctgtctggacctaactgttgtgccattgtaggatcctgacatggaaatgtttactgatggaaacagcttcatgggccaaggacaacagaaaactggatatgcagagattaccagctaaggaactttggaggtggaaactcctccaccagatacctctgttcaaaaggcagaacccattgccgtaacaagggccctttatttggtaagggaaaaaggtaactttatatatagattcaaaatatgctttctcagtgattcatgcacatgggtccatatggaaagaaagagaattattaactataagaaacaaattagacacaccgaagaagttctaaacttatcaactgcagtaatgaaactgagagaattatgcttataatataaccagaactggaagtagttctttgcccaggatataagaagcctaataattatatagctcaaagaaataatcaggctgatcttgtcaccaaggtggcagcccatatgaagtctccaaaaccttctatgatgccgttagtgccagacataggcctaactaaatgccaatccagatattccttggaagacctaagaagagctaaggaatggggatttgggaacaatgctggcacgaaagtcagctagaagggatgcctgggtggctcagcggttaaagtgtctgcctttgactcagggcgtgattctggagtcctaggatcgagccccacatcgggttccctgaggcctgcttgcttctcctctctgtctctctcagaacaaataaataaaatcttaaaaaaaagtcagcagaaatatagtgaataaggagtattccttatcccagaacatcttatggaagaaatagtcatattcaccaaagcaccattatgagtgagatactacttttcagtgggtataagatatattgtgaaccccaaactccagagaattatccaaaagatagtctagaaatgtgacatttgtgctaagaataattctaggattgtgtccccaccagtcctaaaaggtataaaactaggggacacctggctgtctctatcagtaaaacatccaactcttgatcttgaagttgtgagttcaagccttatgttgggtgtagacattactttaaatacatacatacatacatacatacatacatagaactcaaaagcactgaacctggagaggaccagcagatggtcttcaccatgatgcggagaataacagataatttccaatgtttgctagtatttgtagacttttacacgttgggttaagcctttgcatactgttcagagaagttctcacagattgtcaaaaaactttttaaaaatttatttaagaaatttctatacctaatgtgggttttgaactcaagaccctgagattgagtcacatgctctaccaactgagccagccatttgtaattctaattattgaagtgttatgtgtcacagaaataaccagatttctttgtcacctgcattataatgaactctcatcagatctttaaccatggccatttttgagtcttatcatttacggttattgttttaatctgttgctcctgcaaatgtatttcagcttcagagagattcacagaaaggactcggcgaatacaagtttttgatacctttaagatcataaaactaagctgagtaagaatttccagaactaatgggctggatagtgaattcttctggtttcctcaaatacctgactacgactctctaaaactaaaatttttccccattctcttgacttggaatcattgagaaccaaaactgccctttttcctaaagccctgaaaaactgaagctgaacaatttgaagtaaattttagagaaattgccacaatggtcatgtgtagacaatcttagtgcctgttaccgtatgggccactcaagaagatgaccagagacattcaaactgcaaatggggaaaaactatcagattgccactgcctgccctcactccatctgaagatgcttgaagcctgacatctagaaatcttctcactggcagcactcgggactcaaacactggatttataacattaacctgtgtttttgtttccacagaaatatttcttattgcctcttaatataggcctgagaacccacctgcaggaaccacctcctgagatgacccagctgtttaactgaactgacctattctcaagactgagactggttcatgatgtatggagcagactttgtacctacagtccagaatgaatatgagggaacagtgttgatttgtgatgtttttgtaagaaaaaaatcttggtcaaaagagggatcttctcattactcctaaccaatcctgggcttatctagctaggtactgacatttggagaattggaggggtctacacactagggaaatttggttactcctttctctgttcactattccagtgaacttttagaccttttattgagcgaaaagggaatcgacaccagatagggattacttgcctgttatcaagaggctagatcttggtattcttttgggagaacatttttagttggccaacaaagctgctcttaccattgttgcccaacttaaaaagaaagtaaatttgttagctaaggtagcacttgataatcacattgctttgcactatattcttgcagaacaggatagaatgccattgctagcacaactcgctgtgtttatattaacgcttctgctgcagtaaaaactaaaatctcctttagataaaatcagagagcaagccacttggccatagcaaatttcgccagaggtgcctggaaaaagtgactggattactggactctttttctggattccccaagggattagcaatgttacaaggactactcagatttgggttatctatacttttcatttcattaattgtatctgtactaataagatgtgctttccaatgttgctctaaaatggccaaagaagaaactaatgttttggtcatgcagaatgtacatgttaagccgaatactagggaatacttccaacaaagtgcaaaattgtttcattcctcaaaccctaaaactgcaggaagtagccagagcagtcattgtcccaattccttcaagactgaggaatgatcataattctggagggactgaaaatgtgccccataggattaatgaggttaagactaataggaaatttaaagcttgtttttcagaggcctgtctctccctaatcagctattgtttcgtttcagaccccacaacaaatccagtaactgtttccattgaggcttggactgatataaatgaggctcactgacaccaatgccctgcattccttccctgtgataatgagcccaagaacttatgcagtatatacttcctttcagagatgggcatagcccctcttgtcctacagttgacttcctgacatcaggcacccaattgtgcctcgttttaattttgtatctccaccctaaagtgaacatgggatgcgcatgctccatctttcctcatgaatagtcataaatctccctgtcttttgcatcaatgtgtatgtaatcccacccctaagattataaacatttgttctaatttcactcaggggagacagatttgaaccaacctctgtttcctctttttgctgcctttcgaataaatcttttccctgctgcgtacttgatgtttcagtgattggttttgccatgcattgggcagacaaacttgggttcatttacagcattggcaattggttgtgtttaaatcaattttcaattaattaaagttgtaaatttacaaacagattttcttaagtttttaagttgaacttgcataactttgatgttctatttagaaatcttgtaattttcatataaaaataaaagcaataacttgttccttgattaatgttcaattagcccatgggcttgacatattaaatctgcttgaacattactcttgccatttacaaagttagctaattaagttctcttacatatttaaactacatttacaaatttaatatatttgattttttcaagcacttcaaattcctcatatggccaatttatacatcaaacaagaaaatattcaagcatgtaaatgactctcataaacctaatatttcaagcttttaagtgtggcaaatcaagttatcttaaagatttcaatactgtttacaaacataatcaaattatcttatacctttcagcttcaaattacaagtctaaattacacaattcaatttgaaatcacaagactaatctgtcagattctctaatatgccaacttctcttaaatattatacacattaaaaacacgtatacagactatctcaattttcaaaaattttttccttaagggggctcctgggtggctcaatctattgggcgtctgactcttggtttccactcagggtcttgagatcaacccaccctttgggctctgtgctgacctgggagtctacttaaaattctctctcacctccctctgttcctccttgaaactccaactctctatctctctcttaaaaaaaaaatctttttgctaaccttacacaaatgaagtaacattatggacttctttttatatagtcgtttctatttttcttcccaatatggcagaataaaaatgttttctgctcatatttttcttgccacaattctacaatcatcttattgatttgtccctacaactaaagaaaagtctgataattatccttctatttttcttaaaggtttatttattttatatgaaagagagagtgaacatgagtagaaggagagagaatctcatgcaaactctgtgctgagcacataacctgactcagggctcaatctcacaaccctgagatcatgagccgaaccacaagtcagattaaccgactgcaccacccagacgtccttgataattatccttctgagtgtaaacccagatttaaatgaaactaatcaatgtattaatttatattatttatctatgcaaaataataaaaataacacttatgatagagtgaatgatgcaactgaccattatcttataccatcctgttctttctttagtatatgcaaatatatatatatatatatatatatatatatatatatatatatttgcttcatctataaaatgggcatagtaatttctgtcttagtgagagtacagccaaacaagacatctgacataagtacaataactcagcacatgttcatttacttctttctccttttctgtcactacaatctttccccaaaactcagattaaattggagaaattccagagtctctccttcttttaagtgtaaggggcagagggcatatctaggaggcagttttgtgaaacacagaaaaactggctttcttcagagaggcacccccttcctcaccctcatccctccactgcccacagtaggattttgagatgattcactgtgtaaaaaaatagaaataggggtgcctgtctggctcagttgctggagcctatgacccttaatctcagggttatgggttcaaactccaagttgggcatagagattacttaaacaatgtgcatatttgtatcttgtattttaaggatatgttaaggattctaaggtcatgtgaagacaatctgttccattacaatatatattatactatatactatatatcactatacacccaggtggtttgccccatacccttaccaggatagcacttggctttgagcctgcacacaactcttctctcacagagcccagtagcagtattattcaggttttggaaacctcattcttttccagcagccatgggaacccacatctctaagctcaacccagaacatgccttgcactctgattcacaacatccacaattcagagatgctgaacatgtcaaatcctcccgcctttccctggtatggtccacctgagaatttagcaagaaaatgttcccattctggaggaagcctacccatctgccagaaatgaattggagaaattgttctcagaaggccagaggtcaagtgagaaaggggtcagatcaaaacatgacaaggttggtgagcatagcttccatgcagccaatcaccacattagtctgaactttgcaaaaggagtttttcttgtgatgcaatagagcaggcagctttgaagaactgcctttgtgctgtgttcttagccaaagctgggaaaagctgaggcattaagcgccagggatgattccaagattgcaaagcaagagttgaggtaagtggagatgagaaatattctgatttgcctattgatttcaacaatggatgttccctcaaatgttactctccagggcacctgggtggctcagtccgttgggtgtctctcttcggcttgggtcatgatcccagggtcctgggatcgagtcccacattgggctcccagctcagtggagtctgcttctccctctccctcttctcccccccccacccaattgttctctctcactctctcaaataaataagcaaaaaatcttttaaaaaataaaaaataaaaaaataaaaaacaatcttttaaaaaacaaaaaacaaaacaaaaatcaaaaatcaaaaaacaatcaaaaaataaaaaaacccacaaatgttattctctagatgtcacacatgccttcacatcctcataggcatccatttggttaccaaatcccatacttcaggtggagaaagattttatttgaaagagagagacagcaggggtctctctgcctttctctgtgcctctcaacttctcacacctcgtttctggcagtcccggaatgcgctgagatttcagttttggaaacttcatccaggcagaacaaagggcagagtggaggggttcggggtagactcaggccaaacattttggggctcccacaccttcaggatggagttccaactctttccttacaggggcagaggaagccacagcccctgctatggctttagtcccttcagctcttaagtgacttttctcagaaaagttcatttcttctcacattagttcatcacctgatcttggtctgatgaagctgcttatctactggatcattcacacaatttgctgtggatctgctaccggtcatatatgctcagtaggccagatcactgctttttgtttccttattatctgagggcagaacccccaccccggcatttttaatatgccaggggtctggtgtttaccttttttttttttttttttttttttttaaatttttttttttattttttatttatgataggcacacagtgagagagagagagaggggcagagacacaggcagagggagaagcaggctccatgcaccgggagcccgacgtgggattcgatcccgggtctccaggatcacgccctgggccaaaggcaggcgctaaaccgctgcgccacccagggatccctggtgtttacctttttaacatgtctagcaattggtgaacatgccccagaagctgggtttgctagtttcctggttcctttggacgcttccagcaatctttggtaactccattccatctcttcctcttttcctcactgtctgtctctctttgacacacacacacacacacacacacacacaccggattagactgaattaaatccatattttacaagtgtctttgatcaggggcctttacatctgaggtatgtacaactggagtaggatatggtgatggcttcttttaattagtgaatgaattaattttattttaatgctactcaattgggtcataaaaacttactttcaattcactgagtggtttgggcaaaggaagaattttcttgtttggatggacacaaaaggaggaggtaaaacagcagacacgtgaaggtaaactgtgggggtggggtggggaggcagggagacaagggaggctctgggtacaaggtaaggcaggctttatacccacactgcacagctgagcagatgacacctggacacgcctctctcctggggctgtactgtccccgtgcagtgcccccacagacaggaatctagacctctttgatggaaagaagctacaatttcagaagaaccagaattttgagactttaacttccttaaaacccgcagaatccatctgctcccctgcacccgcaggacctctgcctttctctgtgcctcccaacttctcacgtctcgcttccggcagccccggaatgcgctgagatttcggttttggaaacttcatccaggcagggcaaagggcggagtggtgggggtccgggtagactcaggccaaacattttggggctccccacgccttcaggaggaagttccaactcttcccttacagggacagagaaagccacagcccctgccgctgcccgcccgccttccttctagcgctagaaacgccctcaagcggttctcaaaaccccgcggggccggcggggcaggtgcacctgaggccccgcccaccagagggcacgctggcgtgcttggggcggcagcggccatcttggatcctggcagcccgcccaccttcgcggtctccgccttcctggggcggtggcgccgcggctgcgagcgggtgcacggagaggcgagtcgccacccggcctctcttgaggcttggcggtcttgtgctggagaccgacggcctcgtccccacctggccggcctctacgtaaaacttcgagccagtatcgagggggcaagtgccggctcctgccccttctacctggtgactctgggcaggtacctcagtttcctttatctgtaaagttggagtttaagcctcagcctcacctcccaacccctcaggtcactgattctaatacttactgattgggcgtgtatgataaattctcagcacatggcctggcatggagtgtgttccctgtaggtcgtctaggagcttttcctgcagattgcagggtgccttgtagccaccactgttggggggggatctccacgagggaagtgtgtagtggactttggtaagacccgagtccaaagggagaggggactgcaagatgccctcaagcagtgaaggtgaagcccctaagccctttaggacttgcatgtgaccattttggaagggtgtcagaaacacagaccgggatgcccaggactggaaagacttagtaggaacatttgaacgcccccgtgcttgttatttttatcacccctcgttgccttcccatagggactgggatgcagcacaaaattcctggaacaaaaagccctgtgtgtgtgtgtgtgtgtgtttacgtgtgctagttgtgggggacatggggaataggggactgagacactgtgtcccagggagagccaggtgtgagggagaagggtctattgggccaggatggatagtggccccggggagcggcattaaaatcaggcctggcggaggcctctaggagtccccagacatgcaactgccctaccaggtccacagacagagcccagcaccctaatttcctaaggggtgggaaacttgcctgggacacaagagatgagggaggtgcctggggagggaccaaggccttgtagggagctagggcctgggagaatcatacccagccttctacaggtttgtggaggcctaataatgagctctaattcagtaataacccgggtgaatgccaggcatgcctgggttctcctagtccagcctggtggagtgaggggtagcaggggatacagaaattagcatatggaatcaggggattacagtttattttcagacacactcagagggtgggggctggtcagcgggctccatctgcatccgctccctgcatttggcttaatcatgaacttctctctcctttcccccagacctgtaggctgtgcaagatagacaaggtatttccacccccactcacagaaggggcttaggcaggtgaggagtgtgaaaagtggggggttggggggtcgagttcaagtattcagtttttccatccacacccccagattacactgtgcccaggccacaagggaggatcccaaccctggggttcctagggacattaacagcccttttctcactcagaaacctccagatgagctccttaccctctttccctgacaatagcaaaccagttctaaactctacagtctgggcaagaaggggacctcagcactccacttatccaagacccctccttccttgtttgaagtgatagggccagggtgggcttcacttgtagtgaataggtcgggtttaaatggtaataggtgagaggaaggaagaacactgaggatctcaggaggcagacttagggggtgctgatgaagttgtgacagctctggtctgcacccccatgccatcctcatcccacccagacccagaatccctgagagtctgctgcaaaggcagtatgaggtgggggcagtgggagagcaggggggagagcttaggaagtgccaggactgggctccaggcccagtagtcatgctctggccttctagaacagctgagtcctacggaatatagagtggcctactaaccccccacacctcagacatcctggcttagacagagtggtgggtatggtggggagggtccttccaagggcattataaaaaagctataactgttaaaaatttgggggaaagtgactctcagcctcttgcttccccaagttgtcagtctccccagtacccaaagatagggtggagagagccccagagagctgaggaagaaggatacagcctgtctctgacaggatggggcccagagaggggacccattagcaccatgcaatgttggggcacccctggcagcctgactgaccctgggcagggaccctctcaaactggagtgcacacttgctaaagcttctgtaatcttgaggagggcccctgctggggagggggtgagggagaaggcttggctgaagtccaggcagaggtgtcagctaggacccaaagggcccctctgggagtcatgatttgaagaatcttcgtaccacaaactggcccaacagaaccacagacagcactatcagcacgttcaggatggggccgtttcccaagttcagggctgccacctgccaggagagacagagtggtcacagtggggctgacagaaaatataggcactccagggctggggcagagctgggagagagaggtgtcccagtagcagggaggaggtagccagtgcttgggcacctacccagccacccctctgcgcgatccaccgggcaatgcaatgatgcagcatgaagtcggccacgaagcgggtcacctggcccaggaagccggtcaggccgcgttggtagacatgcagggccaggcggtagccaaagcccaggagagccaccactcggccccagttgatgccgctctcaaataggctgcagacagaatggtgatactgtcagtggagacccccggagggcccgtggcctgctcttcctctcccaccatctggtacccacccgccctgctcccagctggaaagcaaaatggcttagctgtaatcagggtggcagaggctgccccagcctggcctgagtttgggaagagcctgcatctctgtgaaaggagaaaaactcagagggcagaggagcagggcgctgctgctggattgtggccccagtgccgtggggagcatagaggggcagagagcagggagggcagagcaagcagacggaggcagcggggagattacctgtgggtgttgctgctggcctggcagcccgagagacagcagagagagaaggacaaagaggaagttaggataggtcctggaatccgagaggggcaggtgtggcttcgaaggacggggcatgatgttccagctctgagcactaaccctaaatctattgcctacccctaccttcaccgcagcgtcagtcaccttgaggctgactcctaacccagatctcacaatagatgacaccagtaagtacagccactgttctaagcctacttcctctattttatagacacggtgtctgagggccagagggtttcacaaagcccgtaagtggcaaagccgagatttgacccaggcatgtggtcaactacagcagactgcctctcagacaccagatggtagtaaaggggaagtcatttccaggacacaagcagcctgtctttggtagggaatatgattccaaactggaaggatagctgtgtctcggcgaggctgggaagctctggggacatcctgatcctgggcacctctcgagtcctgatctatcccgtcaagtcctcggtgcctcagctcacagaagctgtgagcttatacactgaagatgacgagtctgggcccagagagagagagagacaggggcccaacaccatgcgtgagctaacagcaggtacgggaatggcacaggtgtctcttgacactgacagagaagcgtgtctcttccaacccatgggcaggacaccgtgtgaaggcgacagcacagtagagaggccagggctggggctacctcgaggcaatcttggtgaagtactcataggcattctctgctgtcggctgtaggtgctgcagcatggcctggaactccgagtcatagcgctggttgatgtcgtccccaatgatagcgagctgccgacccacctgccccatggtgctggaggaatgggagccaggtaggtgagcacagggcaggcaaggctggggcctgggctcacggagaaggggttccacctaagatgcctccggcctcgtggacccctccttggagattcctaaccgtgttctcaggcccagcctggggtcatggggcacacatgctgccatgaagggcgcaaggtcccacatggaggtggaagcccaaatgaaaaaggcaatgatggcagaaggacaggaacccccggacccccacccaaggcctccccagctccccgacctgcagggcattgaccccatacgagcctccatctccccgaagatgtcccagagggcccggggggctgttgctcacctgctaggttctaggggcaaggtgaccatttctgggtcagctggcacagccgccccctcagcctcctgctcctgccgatggcggtaaaaaacatagctgcggaaaacctcctcggtgtcccgggctacctgctcctctaaggatcaaagccaggagtcagggaggaagggctggaccaggcagccccgtgctctgtggatgggtcacccttcctgaaggccccagccggcctctcctgtgtcttccacggaggacagtgctagctgctccagcccttcgttaacagctagcgatttctgtttgggatgagcctcccaacagccttgcaaagtaggtgagcaccagtgtacagatggggaagatgaggcctgcggtgttacatacctgcacgaggtcacacagagcgagccacggagtaaccagggcctaacccaggcatgtgggatttttagtgtgagcttagtgtgcaatggtacctggccctatggctcagagagtatggaaggcgaaatttgaaattgtagcttttgggcccagaaaagtcacgcagggacatagtgaccgagcggagccctgagcccgacacccagagagcagtctgtagtggtctggggatggcaggcttccctgatggtccccttggaagagggaagaagggcagccattgtacttcctccccaaagtcgtaacactaacaattgctttcgccagttagcacgcctgacagggtgataagcctaggaacttccttctttctcttactgtaggaataggagagccacaccccactcttctcacctctcctcacccctccctgctcctttttccttaggatggtgctgtgtcccacctcacactcactctgggggctctcctagcccctgcccccccacgccccaccctgcccccaggcccagactcttccccactcccagggattaacctggactgtactccagcttctgaggccacccacacccacctgcactgggtggggagatgcttttctcctttatcccaggtgagtgaatagagggcaggagagcctgcctataagtcctgcctggccctgtccacttctgctctcaccatcctctccgacagccctggtggttatgggatgggtgaggggcagagagacccttaccagaagtagaagacggggcagcctctccacactcccgcctgggaggccctgggccttgcccggatgccatttctcaggtcccagtggaggactgggtcagcctgtggggatgggtgagaaaaagcagagatggagacgggctggggctgttgcaagacattcccacagccccacagccacagagaaaggaggaggggcccccactcctagaagaccccatggccctagctgtagccgcctctcatttcaccaccttgggtccctgtggagtctgctggcagaatcagaacttcctgagcatttcactagcagtccttcaagagagggagaaaggcagggcagtcaggactcacatctagggacccggagcctgcagccaggaccctggggaggggtgagagcagcagtgcccttgtggctctcaagtcataattcacctcactcctgggcaaatgaggggagttttagaggccgagggttctttctgttgctcctggggcctcttgcaccctacctagcacatgcttaccacaggattgccaccttctagccaatgacccatgaaggctgtgcttgaagggcccacttccccttggccagccagagcatgcctgatttccaactcaggcctgttagccacgaacatttcctgagcaccttcgccttacttacttctcccactcctccaggggtgccagacactgaaaatgtacatccactcagcaaggtaagcatcagcagacccattctacagggggtgaagtgagggaccaagaagttagggaggggcccaagggagtcaggtcggtaatgggaacctccaggagctcataccttcaattctaacttaagattgattttccagtttgtgggcctcagggggtaccctttcaaggcgaggagacctgtgtacagcccaccggtgctctccccattcctgcctgcagtgagctaaggaagccttctctgcggctgccccccgcccaccccacaggtcacctaccacatacctgctcctgctctcctgtccccagccccgttttcctctttgctcagtgctggccacagccctgatctgctctgtgaaccctcggccaagggagtgtttcctggacgtgagctgtttcactttcaatttgcaccccttcatagccaactccccccccccccccaggctgcctctgtcagccttttggggaagtgctcctcctcccacccctggggaaggtgtagtccaaccctgggccaagcactgccacctcctcctcccctcttggaggacctgagagcaccctccccgcctacctcctgcctctcaggcctggggccatttttgaaagtgccccaaggcaggggttctcaggaaggggtgtggagggctctccgccccagcatttactgggggcaggggtagggagaaggtagggcctcccctcctccagccctgggagccagtgcagattgcttggcacacccccacccctgctgctccttccggaacaggatgcccttccctctcccctgtccccaaacaaaagtggcaccccgaggacaccccggcaggaggatgctgactgcacaaccaactccaactgcccctagcccagggtctcactgctgggaagtaggaggggtgtcagagcagcccccagggccagaggcctgtgccatcctgccctcatccaaaggcctgacttcctggtaaggggagtccagtgctctccacttgctaggcctagatgttccctagggggagatgcctgcttgggaggctcctggggcagaaagaagcatcatgtgagttctctccctgcccttgaccttggctctgacctctgattcccaactccacctccagcccccactgcaaaaggacccggttctttggtgcccagagccagggcaggttcgggggtgggcaggtgggggggcaaactgtctgaggggcagccagagggagccctgcctggatcggccccagcaggggttggctgcccaggcaagcctccagacctaccctcccccccaccccccccatccccaccccaacctggctgcctgcagactcctgggtctggggctgctgaacgctgcgaggatgggcaagaccctcctaccttacctgcccgactctagcccaggcctgggatggctcacagggccgaggccaaagatcctgagaggccagcagctgttccccgggggctgggtgcccaggcccagcttccaggaacaggcgtcaggagagtcctggagtctggacgcagcctcagcctgtcacggcgtggccctagtgctgcggtgatcctagaggtgccggctgctccggctccgatcagctccccctagaggaagctgctgtgtggccgccggatgcggatgctgagcccgtggcttgggggtcggtctaggctctcacgtgggggaggcgctccaccccccacacttggccccggtcaggcagtgtggcttcccctctcccactcctgatgcccagtcccggcctttgatcttcaccccctttcatcaaacagtaccaataaaaaagccaggatggcagagtttcttaagcaccacagtgtgccttgcactttagcgagggacacttatccctctgaatcttttcagtaacccctggaagtaggttctgtccactacacctgttttacagatgaacaaactgagactcagcgggtttaaggaactccctaggtcactaagctggatttataatcaagtctgtggatgccgtggggaataataccactaaattgagattccacgtgcaattgagatgtgtacccaaggcaccttggtggtctccagagattcaaaatcctgaaggtgacagacaggtagacagagatgaaaacaggggtgtctgggtaccacctgggcacgtgccagtggatgctgcaaggagagaagagaggaaggacagatagctgtagggactggttctcaagggcaggggcagccccgaccagggaaggacaagccaggtagagaggggtgtgtacagaggccccaagagcccctgcccccttctccgtccaggtacctccagcttcctctaccggcccccccaccccccatgcctcctggagcctaccccaaatccactgcctcatacctccttcccctgcctcatgactcttccctctctgcccccagctaatcccccctaccatgtcttcctcccagcctccccatcccccccaccctccatctgacctttgccttctagaactcctggaagtttccaactggaggttttaatttggaaactcctcctgttcttaagcagttggtggaggtggctgctacggcccctcccttggagtcagggtccctcaggatggagaccccagcttcaacccctcaatcccgaattttgggccgctcctccatgttccgctttttccgtagcctggtggggagcaagggcagcctaaagagctctgacaagggcctgatggggagtcaggcatgcccctcacaagagcaagatgccacccccctgatgataaactgccagggaggggtggggaggaaggagctgaggccgcccaccacactgtcctacacgctctctgtggctttgccacagcacaattccttggggctagggatgggggacacaggggcccagatccccactcccatggaggtcctgagagtgggggcccagggtagagaggtgaaacccatcctgtccaggggaagccagaagatgctgggcagcccatcggagaagaaggaaagggaaaagaaagagaaggcagtaggggaggcctccggagatacaaggacctcagacaagtgagggactgggctatggggggcaggtaggggccttggatggggggactggggcaagatatggggctgagatgggaggacccatattgaggagggtccaggaatataggtcttcagatggatagaggactggagtaaggccctcacctgggtgcggaagggacagatatatcgaggataggagggaacctgaggggcttggggaccagagatggggtgagtcttcccacaagtcagaggttgtgggtggaggcaccaaagatgagagaaggacaggctggggatcgggaggggcaagtgcaagggtgagccaggctgccatggcttcccagctccttcctggtccccactctaccctaccttccctccccattctctccctcctggtccccactcccatggggacctggcatcactccctgtgaggaagagggcccacctcctcttctgttccccaccttccttctcactctgccttcaaggagggatacccccctgtatggtgaagaccctagagggccaagcagggatctgttggaggtgggaggggggaggggcctgagcagggcccatgggagggccttagggagtttggggggtttaaggaagcctttgtcacatctctggctccacctgccacccccatctgactctgctttggggtcaggggccactttgtccaagcattggaggtggaacagcatccccacagagggctgtggggccactggaggtctgccccaagaccttcaccagggaggagaaggagtgtctgcttgacggtgagtgtggtggccataggcattgagacagtgccagaaataggcccttgtcctaagactcgttaggggtgtggggcctggaatggaaggacaagggataggtatgagggaaggaggggagggagggggcaggctgcctggatttgaatcccttctggtgcactatgccaagctgtgggatgggggcaaagttgctcaaccattctgtgcctcagtttccttacctacagaatgagaatggagcagtatctacctcagggggcaggtgcaaggagtcagtgagatgctctttggaaagtgcttagtgctatgcctggcacataggagttgtttgctaacaaaacgaggcacctcaccctcacttgagcctgcttggtgtgtccccatcctgctgggcccaactaggcctgggcttacccctcgttcctgtcagcctgtcagttacactgctccttcacaggagacctcaggctggcctcttcgaaggtcggggcaactccttggaactgactcctcaccttgtacaagcagcttcagaaatcagccatggccaaaggtctgtgggactaggctggggcaatagagggggtgaagcctgggtcggggccccaacccacatgttgtgaggccccgggatttgtggcttgcgcagacccctctcagcccttggggagctgttccctcctgccttttgttttatctgggggtgggggcggggctgcaggcttgggttcttttcctcctcacctgttcagcaaccgggcataccctcagtttcttctcaaggaaagcttgtctgatgaggagaaaggcaaggaagaggaaatggaggaagatgacagctccttcaagctctgtgtcccaggcattgtccccctgcagtcaccgctgcataagactttcagatcaacaaatacagtggggaagtgcagcgtgcaacccgccctcaggcccagagggctcccctttgactgaggctcatgggtgtgataccagttcttaccaccaggtgggaccagaggacctaagatgactactggagccgggttggcggggcctgagtcctgcttagtctggctagagtcctttctcagcatttgggaggcagtgaggtggggactgtgactggggcttgcgctccaggagcatcaccctttctgagcccagaattctaacttgtttggtgccccttgctgcccagacacagtgagcaaggatgggaatagcttaacatgatagcataacgtgatcattgctgtcatttacatagccattattactatgggccagaccctcttctgaacacttttcatgaaataccatatcacaaccccaaggtaggtcccattataatatctacttcatagtgaggaagcagaggcacagataggttaagtaacttgtccaaggtcacacagctagtaagtggcagagctgggatttgaaccaggggagtttgggtagttccagatccttgttcttgagtctatggctggtggaaagtgggggcaggtgtttgtccctggcatgctctccccaggaggtgaggaaactcacactcatgcatgtaggagggagcccacggccagtgagcttccagggggatgtcagggagatggggaggagctgtgtggctggctccaggtaatggagatgtaggggctggggttggagatgaccagggactgcacagggctgggatgaggtctggagagtcggagccgccttttcttccatccccagcaggtttctccaccctctcctgcctgtcccatgcccatctctctgattctcaggtttcgtggagtcggagttaaagaagcttctgatagttcaacgggagtctggtctctggaagatgggcagccatgagggccaagagctgctgacccagccagagatcaccctggaggaggcgggcattgtggatggccaggtacttctggcctgtcccaaccaccacccctctgcctgaggccattggagaaagtagggcctcctacctccataggcccctggccctggcctcaacctcccagggcctggatagggaaggcatgattccctcttggtagtatttctgagagtaggggcttgacccccggtgcacacacacttgcccagcagtctctccatctcttacttgaccccataatgttgctcttttcctgttttctctcccaatcccccatgcttcctcccataaaggctcatcggttacccatctgtgtcgcaccatggcccactcactgcccaccctccttgacatcagccttcaaggtcaggcctgtcccagcttctctgagcacatacaggtggatctgttatggaaagaagtgttgatgtgctttttgaattaattttcattcattcaacaactcattctttcattctgtggacatttggcccagatagcctctatagtttccttttgtagaaaaatgaaggaaagagtgtagggttcagaggccaaaggctttagttgaagccttgttttggcatggattttctctgtgctttggatgcgggctgtggcatctttacttgtaaagggagactggtgggaggatcagatggcacttgatcttagccaaatgaccgagaagtgagtgaaggatcaaacatgatgaagagggggtgcctggcagtgccaagggcactctggtgttagggatgtgactttcccctttcggggagtgaataccaggaatgcctgtccccatcccctgggcactgaggggcagccttctcattgtcctgagtcacaatgttcccttgtgctctagggaactaggctgtgcaccccatcctagactacagagggtggtcagctctggcagggccctttgctttgccttttcacgctaaagggatctctagtcacccttcctgccctcttctcacccctatcctctccagaaccatccttgagtcagtctgcccctgtcccaggggtacggatcacggtcctggggtagcctgagcagtattgggggcccgtagggagtttccgggttgtggcaggtcggggcccagcccagtcctcacttgggggacagagctacctcaggaatgtcttccttctatgggtatttcaagggtcctgtcctcatcaccactccctactctctctttatctgccctcaaggacaccaagctgagggggaaggaagccacccaccagcctttggggaaatgctggggacctgggggggggggtgctgaggcagctgaaacaccactctaggctggagggaagggtgcagagtccccgtggtgtggcatccaggacagaggtgagggaagggagggcttggctggggtgcctgactcctggggctccaaggaccacctcccccatcaagttggagggaggaggatccctcatttagtgggagggaggtggactgggctggctgtggggagatgggggagggtctggcatggcctcagggtgcttatctctgggggtacagagcaggaagggtgagcccaccgagctgatgcctctttcttcatccatttctaaccctagcacttgctcctggaggagatggacgagatgggaaactggcccccatagtgaagctggtgttggcccgagtttgcttgctcccaggtcccttcagccccagtagaagtttagcctctctcatgagggcacacccgaggcgcccctggggccaaggggtcttaagatcaatggtattcatgcatctgcagggtgggctgcccagcagtgtctccacccaccagactcaggcctgtgctattattaataaaaccctctttgactttggcctccttggctatctctggagctcactcctcatcctcaggctaggtgccagctcagtttacccaggatctcagtctagccctcagtgtggcagccctaaccacagagccctgggttctagcggaggggctgcagtggggcatctaagctgcagggtcagaggcttggtgtacctgcctgggtggtccagaatgccagggaagcccctgtgaccacagggccagaccctgtgagtgggagcatccctgacttccctccctccaaagttcccaagccaggcaggcggcctcacggggaagatccgggaattctgcagcaggaagttcctgcccagctaccacagggacaaagccaggaaagcagccttggggtcatggggagctgcttggagactgggctgggggcaggtaaggggtccccgggagtgacacaggagggccgctgctataggggtgggggccaggccccatcctgctgcccctggttacagcccctctatgccatgctcagtgctaggtgcctcaggggatcttggccagagggaggtccagacatttagaagacccaaatcttcatccaggaagcaaggataggcttgagttgggggaaatgctgtgcccttagtggccatggaagggtgcaccttcatacctggcttttcagggatgcagtgggagggagggccaggcccagtttggacaccagaaggtgttgtttgcctggaatccttgactcaggctctgggctaggggctggtggaagggcccttctgactgtatgtcccctgagtcagccaggaagcagcctcgtgacaatatgactcacctgtgccctaattattttgtcccagagtgctggctgttgggaagggtgggggccttagacagtggcctgtgggggttcctggttccacctgggccctttgatcaccctcagcacagatggagcactcctcatggaccctgtctgtgccctacctccatcctcataggcccctgaccttgtgccaggccatgcccaggcttggatggggaatccagggcccagagcactgcaggacagaacgtctgctcccccgttgccctctgggtgggaccagccagtggagtgcacagacagccctacgttgggttggggtaggctaggtccccactggcagctcaggctccttggctgcccgtgtgagccacgtcgtcactcataggtcacctctgctcctagggaaggagcatctcatcctcagccctacaggagtgtggctgctggggaggcagggggcaggaaccttgatttagtatcagagactctgaagtgatcactcccctctctgcttctccctttccctttctctcagtgagggtcatgccacctcctgcccccctacctccggagggttcccatgaactacagagaaggtctctgaggctgggaggtatcctgtggaagcaggaagagggtctgcgcactgatgcaggcacaagggcctcatctcggccccttgaagtccttggctggcttgtgtgggtgggatgacactcatgagtgatgaaggcaggggtaacatgacctggggacctgctgtgggggaaggcccagtgggcaagtgcggagggctggactcaggctcacggccacagggagagaaccgggcatttcccagaggcttccagggacttctgtagctgcatctgtgggtcagatctgtggactgggtggcactgaaagtggccctcctcccccgcaggcacacagcagggcagggctgggtcaaaggccagagggctctggaacccagccagggtgcctctctctgattcactccagagcaccagttgggttgacagtggccctgggccagcctgtgggtttgaggggagccgttatttcggaactcacccggtctcggctcctttttgggtttcgtcttccctctgttgtctttgcatgtgtggctctgtttcgtgctctttccacatacacacccctcatacttctctttctgtgtttctatctctttcttactgtatctctggtgggatagaggtaagaaaagcagcctgcgattattctgagggcatttttgaaacccggaggtggctgaaaggaaggtagaggggagtgatgggggggtggggagacacagatggtcccagggaaaagtggccaaagctgggcctgcctggagagccggtgaatctctctccctgcgggctcctgggcaggacctctgtggaagatgctgccttgggccatatctagagtcactgttggtcaatcttgcctgtgcccgagcaagggaatggcaaaaccacctgtattcttttccaggtgggtggtgaaatggagaacagagaggcagagggaagagactcactgggttggagccccagctgcaaggctggcaagctcatgtgatcgcatacaggacccatacctctcagagtctcactttccacatccatgacatgggcaattcatggggcttctcgggttggctattcggcgtagaacaaatatttatcaagcacctactatatccccctcctattctaggcactagggaatagagcagagaagatgtacagaacctttattattttctttgaggatttatcatattgctagaaggatagacaacaaaatacatcagggagtgataagtactatgaagaaagatgagctgggtaatgggatgctgttttagatcaatggggtgggaaaggcagctctaaggagattatgtgttagcaggaacctggaggaaggggggggggtgttgggggaagggcattacagcagagggaatagcaagtgcaggtgccctgaggcaggagcaggctccagtgtgtttgaagaaggggaagaaggagggtggggggtggggacagggagtgagggagagggaataataggtgaggtctggagggaagggagaggacatgtatttagcccatctgagttttttctggggattatttgaacacagcgaggagtgacctgatgtggtttatggtttcagagtcctccttggctgctgagggggaatgagactatagaggcagggactgcagcctgcagcagggaggctgctggagtcgtgaggcaggtggcctcactgctgtaattattacaggggtactgactgggggctgctgtgggggggatctcccaccagggagcgccccctggcccgcacctctgtgcagcagtcagccaggggctcccccagggcaacctcccagccccgcccctgagggcagagaggggcaccctgggcttggagcgggagaaggcccaggaaggctagtggtaggccccagtcgtgtgtgggccactgcagtgcgagggcagcactgaggtgcgaggtgccgcaaatgcagcctggccccctgcccccacccccaggcccctcgcaggggcagagcccagaggcggtctgacttaattcatggggagaggaggataagatacctccctgctcacaggaaattcacagtcgggggagtggggtaacagcagactcctgcaatgaaagcagatgatgaggttcggacagtatgctggagggagccagtcatatcagcagggaggaatccagaaggcttcaaggaggaggcaccatttgtgatttggactagcagggggagggagaattcgatggatgaaatggggggggggggagggcatgcctgccaggagaacgctgtcctgatgggaaagtgtccagtgggcaccacatccctctgtccacctccgtgagccatcccagacgtctctcctgggcctcctgttctgtccacctgttcatatgtcatcctttgctccctgccatcagtccctcttcacacgtgctctctccaggcctttcctggagccccaaatcacagccacagcttcctgggcctctctaagctgctgccccaccatgcccaggtcctccctgcccctcctcaataagccctgcccatgtcatacagctcagctccagcacctcttctcctggagcactcaaatctccctggctctgcatgagcaggagctgtcagctcacctgctcttccctaccctggacagatactctgtgaggacaggatgggtcctggggggcctgggctcccgtcggcagtgtctacagtgtccactgtagtggttggcacacaatagactcaacacatgctgctagactgaggggggaagggaggggaggggctcaaggctattgctggaaagataggcaggggccagattgtataggaccactaataccatcctaaatggcttggtaagatgtactgtggagggtggaggggacaggattggccaatttggaggctctcaagtgtcctagtgagaagggtgtgggcctgagctgggacaggggcagatggggtggacaggaggacacttaggtagtcattctcaaccagggacattctttctgctaggagccatttggcactgtctggagacatttttggtttgtgacaagttaggggagggtgctactaacatctagtgtgtagagacctctctagctcagtttcctcagctttaataaaagtcattaggaggattaaacaggttaatacatgtttggtgtttagaaaagtggctgatacatacaatacactatgtaacatgagctactgttattttaaaacataaatcctctgttcagagctccacactggttccccatcagtaagtgtgagccaaagtccttccaagggtgataaggcccctctttatctagttgctgctccgtctctgaccccctctcctgctgccctccttgctctgtgtgctctggcctcaccagcttctttgctgttccttgcaaacactctcccccctgccccccccacacactcctgcttcagggcctttgcacttgctgttccctctgctttggaggctctgcctttaggaatttatgtgattcatttccttgcctccttaaggtctttggctgtcaccttctcaggagggcttcttatccactgtatatgttgtgggggggcgggggggaggcatttattccctttcattccctgaaactggctctgtccttgtgctcctgccttgcttttcttccaagcactttaatcatctaatgtagcacctatttcatttgtgtgtatgtgtgcttattgtctctcaactggaacgtaagcttcataagggcagacattgttgcctgttttgcttgctgctgtgtccacagggcctcgaactttactagcacattctaagtgttccttaaatattgcttaagtgaatgaatggagtgagtgagcgagggaaaaactccatcaggagtcagagaggtaggagacgaatggaaagaagaaagaatggtgcaggggaagggagaggccaagttgacctctgaaagggagaggcctgaggcatggagccttgctcatttgctctccccaaggccttccatccctgcttacagggatcttcctgcctctgccagccaggccctgagtagggcacccgcagcccaggcagatggccaggcctgaacaaagtgtccttttccctctgataagcggcctctttccaggggcatgcagggcaggatgtgtcctgctgctcaggaagtgcctgagggtctgggtgggcctctggagtgggcatgaggcctagggctgtagtcatcctgcctggaggctgagcagagagggtggggccgcggggggctgaccccagcccgccaccaactcctgcagacacccactcctccttcactcagcaactctattgagagcctgttggaaatatggctgtgcaagtccctgccttggaggggatgagggagactgggtgacaggttgccacaccctgggacattggcctgccttggctgctttgccttgggctcctgtggtatgaggttggactggaggcctagatcagctccagggacagcggggacaggtggggtactggagaggtggctcccttcttgacctcagggcaaggagtgaagaccatgcatttctccaggcctgcctgagcccccaggtcttccactcccaatctgcaaatgtttccctgtgctcccaggaaactgtcagtggtttctgatgattagctgttgctagcttcttgggaaccctgagccccaagaccccaggaccagagcgctagctcctccaaccctcatggacctttttctggctcagcacactcttgactcagccccttcctcttgaacccctctcatccttttggtcctgcctcagcttctccactgcgctggaaagtctgtgccctacaagaggggagtttggccatggcacagtatcttctagtgagtggagtaaccctcccctgttcaggcacacatgccagtgcttgtacaaagcaggcacagacttaaataccccttgggcatatgcatccccccacatacctctcccagttgccgaccccccctgggcgtagggcctgaggactccttggccttcgttgtcatggacaggcaggatggggcagaggcaggtagtgacagccaagctctgcactctgggagccccagtcttcagatctgtaggataggggctgacttaaggcctcttggtaactctcaggcctctaacctgtgaggtccctgttagcgcagggagagacccattctgcaatgttacctgtggtagtttagaagcatggtcccagtatcctttggcactctttccagggaagggtgggatctatgtccttcttcccttgaatctgtgagggttgtggctgcttccatcagtaaaatacaatggaggtgatgccatgtgactctggaaatgaagttatagggatgcgtgggtggctcagcggttaagcatctgccttcggctcagggtgtgaccctggggtcccaggatcgagtcccatattgagcctgcttctccctctgcctgtgtctctgcctttctctctctctctctctttctctctctgtgtgtgtgtctctcatgaataagtaaaatctttaaaaataataataaaataaaaactattttaagggatccctgggtggcgcagcggtttggcgcctgcctttggcccagggcacgatcctggatacctgggatcgaatcccacgtcgggctcccagtgcatggagcctgcttctccctctgcctatgtctctgcctctctctctctctctctctatcataaataaataaaaattaaaaaaaaaactattttaaaaaaaggccacgtaggttcctcttgcttcacttatattattatataaatttaattaatttaagatagtcacagagagagagagaggcagagacacaggcagagggagaagcaggctccatgcaccgggagcctgatgtgggattcgatcccgggtctccaggatcacgccctgggccaaaggcaggcaccaaaccgctgcgccacccagggatccctcctcttgcttctcttagggtcttggtttcctcacctttcaggtgggcggaacagcagcagtgccctgccacagggccatttgaagaatcagtgcatcgatagagacatggaaggactatggtaaggttcagaaaatgctcattcttattggctccgaatgagagcagtgtgagctgctaggtgtgtcctggctggaggtctgaacaggttctggagtcagcctgccagctgccactcccagcactcaagcccttaggggagcgagctggagaagccaaaggaagctaattagtttggaacccttgaatctggatttttactcgggcagcctggcataggcctcttttaaagaactccacaacctctgtcatcccatccccggcaccttccattacccacaacctggaagtcatccctgctgtctaatttcttttccccctgctgtgcgttttgtctgttgggacaaagggagagctaatgaatcatggtggttggtgctggagtctgcaggaatcagagcaggtgcagcctccatgtgtcccgcagactgtggtacccagacagaagccatcctgggcatggaggcccacttggctcagaatggagggagccaggccaggcccactggaagttggagtcggaggaaagatttagaaggaggctggagccataggccttggtagagtccctgtcccaatggtaagggtctcctcccagccaccgccgagttctaggtagggactgtgaaggcaaaggaactgccctctcgtgggcgtaactcgtgggtgagcacattcccctcctgtctgcaacccttctgcagagggtagattaagccggcaggctctgcgggtcaggcaggcctgagtttgggtcctagctctgtcacttattagcggtgtggcactgaacaagccccttcacttccctgagctttccttatctgcagcatagggacaccttactagtggacagccctcaccaacctgttagatagatgagtttccactccctcggtagcgtggggatgatccattagctgtttgattgccttcaagtctgctcagctctgtgagcctcaattttctcatctgtaaaatggggcagggatgaggctagcctaagggcagtaatgcagccatagcaccacctaggggcagtggtcagcaatagtttctgtttctgactcctgctccaagagcttggagagagcgccttcctctcagttcgcccagtcaattctagagggctggctgaggtgctgggggccgctcctgggtgtgcctatgttcagaaagagggcagtgctgactaaagagggaactgctgaggcccagcttggcccaagacctgctgctcagaggtctgctctgggtcaggtgccgggcaggagctgggtgccatggcgactgagatgcttaggtccttggggagctgtcaccctgctgcccctgcagagtggccagcaacacagcacgggactcagtaggtatctgtcaaacggctggacgcagcactcctcaccagactgccctgaaggtctgaggctgggcctgttcatggcagaccaggaggtcttccaaagaaaagcctggccagcttcaatggcccagacccagagggctctgcagcactggggccccaggaaggtagcaccttgctcaacagctcagggttcttctgtgcaccctgggactgttctcgtgttggggtgggattgggggctgggcttcgcccggcctctgtgaggctcctctcttggtcttgggctggagaggaagagagccccaggagctccgtgggggtgtgggaggaagaggctgattgctcagcccaggagtccctcctctcccgcccgctgctctccatctggccggcagcctcccccgctgccccaggacaagggccctagtgtctgcttggctcctgggcaaacagcaggcctttctctccttctcccctacagagtgcctcagctgtgacccttccctgccccctcagaagggcatggctcaccccttgctgcaggacctcttccatattatccagaaacagaggctggaataggagcagatcctgtttggtgggcgaacccctagatttcagccattcccagcttcggccaaggagcccaggcaaggaagggccggatcacagggctccagccctgccaaggtgggtgtggggcgtggctggaggccaggacccagcccaggtggacttgacatcatcctctccgtctcctgccagacaaaggctgctcctgcctggccctggccccagggagattttccatgctggccccctttcctagcaggatcactgagatgatatccttcttctaaatggcctccctttcagcaggtgaagtgcagaggcctgcgcagcttcccctcaaggggcagggccctttcccccaaatctggagagaggcagagttgccagaagccttctcctttctcgggagctccactgtgctgacctggatccaaggatggggtgacgtcacagtgactgggaactgtagtcagcctccactgtaacctccaccagtcccaactccctcagaattcagggacatttgatgctcagtccagcctcctcctggccagtgggtgaagtgggcactcaaacaactgattgttcagttggggaggcctcaggcatggtttgtggagagcttgataaaatcttgtgccttaccaatgtttcctccttggtctcctctaaaacaaaatccaccattagattgtcattcctttagacccacaagcctttctctttatgaagatctctcaggactatgcaaaggctacagagaatatttgctgacaatatttgctacagagaatatttgctgacagaactaagggctttacaaagcagttccttacgctagacattcagccctgccctccaggtccactgtccactcttctctgcttactctctgccctgggaggctgacctctgtggcctgaagtacttagactccctcaccgtttgagcaattagagggcaagggagggcaggaagagagagaggtccaggtgtttgttccattggctacttttcaggcttggagtggtcatggctctacacagttgttagctgcatggcactttcccatcatcccctcctggggcaggttaacctgcccgcacctctgtgggtggccccattcatgaacttctcttcagtccctccttggggatgtgttggcagtttcctgccatgttctcactacaacagtgccagatccttattttacacacgagaatgctgagggccagagggcctgggcagcttctctgtacctgttggcaggtggtcagggccaggactccaggggtcttgccccaggacttctgcctttcgcttctgtttgtgaaggtgcctggggagagggtcacgccttgcctgccagcacacctcagggcagaggaggagggaaggcctggagtagggccccctggtttcaggactccagagccagagtgcctctctctcaagagattaaaattagaaggaatcatgcttccttctgggaccagagggaatcccagaagattcttttatctctctcttcaccagcatgggaccatgtgttcaagttagctgaccacatttttataatctgtttcctgtctggtcccttgcatgtgaaggtggttagcaatgtctgaaatacacagatatggcatcaatgacggggtcgtgggggtggggtgaaagcaaacagaatgagtattgtttccttttaggcttcctgggagggtgagtgtgtgagtgtgtgtgagggtgtggatgagagtgtaggagtgagtgtgagtgtgtgagggagagtgtgagagttggtgtgagtgtgtgagggagactgtgaaagtgtgaatgtgcgagggaaagtgtataagtgtgtaggagagcacgggtgaggaagaatacatgaatacataaggaagagtgtgagtgtgagaagaagaatgtgagtttgtgagggagagtgtgactatggaatgtctgagtatgtgaggaggttgttggtatgagtgtgtgagggagagtgtgtaagagggtgtgtgtgagaatgagtgtgtgagaaacaatgagggagtgtgtgaaagtgaatgcgtgaggggaagtgtataagagtgcgtaagagagcatatatgagggagagtacatgagtatgtgaggaagagtattggtgtgagagtgaggagactaagtttgtgagggagagtgtgtgacaggaatgtgtgaatgtgtgagggaaagtgtgtgactttgtgtgtgatgtgagtgttggtgtgagtgtgtgaatgtgtgagggagagtgtgtgactttgtgtgtgatgtgagtgttggtgtgtgtgagggagagtgtgagtggacgctcctgaggcgacagccctggtggtggctaagtggttactgtgggctggggtgccagcccggggcagcttatggcatggggaaggaattctctgggaaccccagagggcctgggctggcaccccacccaccgcgggtgacggctgggtggttgctgcactgagtcagccctctggcctggctccgcccctgccctcttgctgccctatcaggagagaggggctgaggaagcccttcagaactacctgttatttgctccaaaccacaagatggcacagctagctaacatgggggtagcattcccacccctcccaactgcagtcatggagggacagaaagaggttaaagaacagtcagagccaagggtgaaacttgggaaggggatgtgaactctctttacaagaagtcacaggcccagagaggtctgtctgtaccctgtgcaaagtcacaggggagctgggaacgtgtctccaggaggcaactgaggtgggggtggggacatactggtgaaggaggcctagggttcacagctggtagcccctcctaggtccaattgtcctctgtccccccacccccacctcctaggtgaaaccatgaatccagggagagggtctgaggaccaccaccagttcttttttacaggcccaggatggacagagagtggaggtgggcttcctggaagtttcctgctggctcttggaacttgggggtgatgctttgaacgtctttatttctatttatttggggttagaagctgtatattcacatagtccaaaattcaaaagttaagaagggagtgagccaaaggtaatttcctcccaatggagccccatcccctctttggttccccctcctagaggcccctgcaattgctggctccttgtgaatcctgagttcaggatttcttactagagcttgccatcccctctcttccccctctgggagaggttccggtgggaggtgggtatgaggagatatccagccattgacactggggcctggataaggcacccaattgccctggggatggtggtgacctccttcctgggtctgaacttggccccagcttcctagcatcctgctcgagccacccaggaggggtggggcccattacttcttttcacctctttagctcagcatccctggaagttccctgccctccacctaggagacccaggcacctgacagacaccccgagctggggctcccacagtatccttttatctcctgatgtaatttatttatttatttttaaagattatatttatttactcatgagagacacagaggaagaggcaggctctccgcagggagcccgatgtgggactagatcccagacccaggatcacgccctgagccaaaggcagacgctcaaccactgagacacccacgtgtccctcctgatgtaatttatatactctcgccatcttctttctccttgactgttcaaatcttggggtgcctggctggctcagttggcagagcatgcgactcttgatctcagggctgtgagttcgagccccatgttagtgtagagcttattttttaaaaaaattaaacatggctttgttaagcatttattatgtgcctgacctggcctggagacataaagtgaagtggacatagtggcctgctccagtgaagagctcacagttgcctgggggagggccagaaagcggagagatcattacagttcaagatagcccgtgatatgttccttggtagtatgggggggggtataaattccacattaaagagtctgacaatgccaggtgttggtgaggacatgagtcagtgggcacactcccagtggctgatgagagggggaattagaacagccactttgcagagtgatttggcagttctagggaggaacttccctgtgatccagcaattctactttctaagctctttctctagagtttttcaaaacctctgacagtatcctcaaataagcatatattgcacgttcatgacgatgcagttctcaccctgatagttaccctgatgacgtgtgatgtatgttatttttgaatcagtttcgagttttaaaaatgctgatcttcacctgctaaattgatttgacccattaataggtttcaagccatggtttgaacaatgctctcaggagacagggaggcttactgcaacattgctgtcacagcaaaaactgaaatagggctttcacggttaccaacaaaatggatatggtgttgtgacatggtcaggaatggactatcacactgtcacactactgccccatgtattaaaagagacacacagggtgaaaccatctgaagccatctagaatggaaagccctgcagaatgatggtgaattgtgattatagttgtgatacactcatatcatttatgaatacatccctatgtggcataagcataaaaactgtacaaagtgaaacccatatcaggatagtggtcacctctgcagggagagggaagggaatgggattgaggagggataacataggggacttcaactcaatttttaaggttcagttcttttttttttaaaaggttctatttttttatttgagagagaaagagagagaatgagttggggcagggcagggccaaaggagagggagaagcagacttccagctgagcaggcagtcagatgtggggctcgggttcccttccaggaccgtgagatcatgacttcagccaaaggtagatgtttgaccaactaagccacccagctgcatcttaaggttcagatctttaaaaaatatattggaaccaaattttgcaaaatatttacatttggcgaagttagaggaaaggcaccaggccctgactatatttttaatattttatttaatattattatttctttttttttttaagattttatttattgatagagacagagagaggggcagagacacaggcagacacaggggagaagcagactccatgcaggaagcccgacgtgggactcgatcccgggtctccaggatcacaccccaggctgtaggcggcgctaaaccgctgcgccaccagggctgcccaatattattacttcttaaaatattccataataatgcttaggggactgatgttccagaacataagggaaggagattttcttctgactcctggatgggagtagaagggtggagtggagagggaaaccattgagctcaggtgcagtggtaggagtggatgaggccctgagtagggagaatgaacacctagtccttcctaactgggggcgctgtggtgatggctttagcccacttccctcccatgttggcaccacaccggtttccagatggaaacagaggctgggactcgaacccaagcctgtgagtcagagcctgtgctctgagcagtctgcaggatggttcctccttgaagagctgtgtgtctgcccagggagcaggggtagggaggagcggggaagggtggagacagacaggatctggtgcactgagctaagatgtgtagacttgattctgttagtgatgaggagattcaggaggatttcaagcaggggaatagtggagtgaactcactctagctatagcatctgtttcttaaaaaaaatatatatatatatatattataaaaaatataaaataaaaatgttttattaaaaatatattttaaccaacggaacctttctttaagcagactctaattcagaacccagaatctaaaagagcttatggtggagttgatttggcagaagctggtgatgggggcctagagcccagggatggctcccctgggaacacagcatggatgtcatgttccagaaaaatacctggaagtggtgtgtgtggcaggaggctggcagtggcctcccttctcagttggatgagagttgtgctctctccctctttccccgagtcctcctggttggtggagggacagaggttcagagtactcccaggctgggtacggagggagaaacagtggcatgtgcttttgtggggaggtagacctgagctccactgcctggctgggaggccttagctaagttatggaaccatccatctgaatctcaggagcggagaacatggattcctggatgtggcgggcgcaagggaggcacatgtcctgagtgtggccaccaagagggtgcttccagcacatccctcttcatccttgctgggtggggaggggaaaaagcaggccagggttcagctccatcagaggctggtgctcagcagaggccccgcacacagtaggccctcaataaacatttatgaaatgaatgcataggtttacctcctatcagtggaggcctgactcctgggagccagagaggctgttccagcagggctccaggcatggacagtgcccgtccagtgcagtatggagttctagagagagtatggggctgccagtcaggggccgggcttctggctcgggctaccaggaatataccgtgtgaccttgaggtttggtgctctttctctgggcttttgtcatttctttttggcagagaaatctggatgaggttttttttaactgcagttaaatgtgaggtacattaaaaaaagcaattaaatgggtcacaatcagtattgtaaaatgaaacaaaatacagaaatagaacagaaaatatcagagtgcatcaaaggtcatcagggtaagtattgttttgtgaaactattgtttcaattatatatagatagctgtgtggactgtggatgtaaaacgtatttattactgtgggtcttggtaacaaaccgtcaaacatcgagctcagcaatcccgcaggtgccccccccaccgcccccacattctaggggtctctgtggaaaagccacacagccagaactcttctcttcattcccccggggtcagcagctgtctctttactcttcactgcctccatccctccctgggtctctcttcttcctgcttccatccagtcccctcctccctttctcccagggacaacccccccaccccaccctcttcccaggaagtccgggtgggggtttcagaagagagttaaatggggatggcagtggacactcgattccaggagttaagataaaatgattaagaagcaaacacccaagcactcgggaacagaacagaaagtaggcgagctggagacgtgggtttgagggctggactccgtgaaccagagctcggtggcgacaccgcagcgggtcactcccagaggcccggtaccggccttgtcgttgttggcactcggtgcgctattaaccagcgaaggtagctttctcttttgtcacctccccacccccctttaaaaagaaagatagaaggagccaagagtttggagccaactcctggagagggagcggctgaactgattcggaagttggatctctttgtacacaggaatgcggagagaaaaaaacaaaacccaccccattgcttcatttcccctctaagcccaagcgccttctattgtgcaatgaaaaggcttttcacgttgagaaaaatgaatcccgatttgcgctgcgaaggaacgagcgcgtctctgggtgcgagacggctctcagctggggcgctcccgggtgctccgcgcgctgctccaggtagagcctgcgggggcgctggacccccttccgcgcgcgcccgccccggctcgctgcgacccgagggccgagggcagggccgcctggggaaccccgagggcgcggagccccccaccacggccgggcctcccggggatggcggttccgcgagtctgtttgggaactcgttggagctggaactccgaaacgggaagcccgccagagccccaggactccttggagcggcgcggggccggcggctcgttcgcgcccgggaggcccggccccggacgagcgaggggcgcagggcgcagggcgcagggaggcgggcaggcgcacatgggtgcccgcgggccggcggcggcggggtgcgggggggcggggtgtggcttccccgcctcccgggcgggatttgcatgtgtgtgtggcggccccagacttcctgctccttctacgctgcaggtacgcgcgggccgggctgggcgggcgctccgagacgcgggcacctcctcgcccggacgcccccggcggctcccgggccgcgccgcgccgccttccgctccggtggccgctagtctgccccggccgcgccgagcgccccgctcgcgggtgggggcgcgcccctccggcctccgcggtcaccggcgtcctctgcacccagcctggccccgcgccccagagcgcccccaccgccccggggccccggcgggctgcagccatgagcgagatgtccagctttcttcacatcggggacatcgtctccctgtacgccgagggctccgtcaatggcttcatcagcactttggggtgagtgagccgagtccgagggggcgcgggccgggagggggcccgggtgccatttgcgtgcgtctgccgccgcccccggacggaagacctggaagtccccaacttcaaggagcgaggtaacggctcgcctctcttttggagaaaggaagtgaaatgttcgcccaggtagaagtcggagccctccgcgggagttgttgggcgggggcgccccctccgcgaagcctgcacccctgcagacaccccgctcgcctgtctcggagcccggggagaggccacttcctctgcaggtggtcccgggcggggcaggtgggtggctggggcctgagttggggaaaggcatccgggcctggacgtgactggctctgggggtggggcggagctgtgggggaaggcaggctcagcctggagcccggagtcctctagtgacggtccactcgcaccttttccctccggctctctcctgccctgcccgctttcgtcggagcgtcttctccgcgccccccttccaggagtcccaggttctggccgcccccgcccccccctcgccccgcgccccgcctctccctgttaatttcctgcgcggctctcctggcgccccggggtccccggtcccaggatctcccgggcactttacaaacattaattaattctggacgtcaccccccggggtctggatagcagggaatctcttcagatccctggagaggtctaggcccggagcggggcatagggcaggaaaggaattaggcagaacgaataggtttattttcaaaggagcagttgggtgagtcgctggaggtgggggtagcgtggtttctccgcctctccagccaggcttctgggcagggcctgctgtctctgtcccattttcatttcggggacttgtgctaaattgtctcatcctccccaccgcacccagctgtcctttaggatagacccatcctcctctgctccccctactcttcagaccccagccagccacaaggtccctcctccctggagcctttggaggacagccctggaaccctccctcaccccaggcctggctccccctagcctgggaagtgggagtcacctggctctcttggtgtctcccagggttgttgggagtttggctctagtcccattggaaaggggaatccaacaggcctttggggattggaggactagctcggccagcaggggattctcactgggaatttcagtatacctgccctccttgtcctgccacccttttcacgtttctttcccctccccactgagtcgtggattccctagccacagggcctctccccgcactggatcggacagatgttgctcatttccccagaggatggggctggaaccacacgtgggcagcatctggacaggcctccccagagcacttgtccagggggtcctgactgctcctctggccagggctgtgcttgcagcgagcctgcacacagtaggcacacagtaaacacctctgacaacgctgggggaaggacaagtgtgggggaaatgcgggcagatggtggaagcccccctcctactgcctgaacagcactgggggcttttgggaaatgatcatcttctccgttgctcagtgcctgggtcagggctggcacaaagtgggtggattttttgtttttgtttactaatttatttatttgacagcacagagggagcacaagccaggggttggggggcggaggcggcaagcagagggagacggagaagccgattccccatggagcagggagccaatgcaggcttgatctcacaatcccaggaccttgaaaacatgatctgagtagacacttaaccactgagccacccaggcagcccagagtaggcagtttttaagtacttgtgagatctgtcagagtcagggaaagcatcccattccaccctccacacaagtctcatccccccacaagacattctgttgcctcccaacatagcttcctcctgcctctgctctttctgctgcactcccttcctccccacttcctccgggcaggacctggtgacctctgatggcacttctactccagggtgcctgttccctgtgcaaacatctccaacatctccatttgcaccgatggatgcccacctcccagcttggtgctctcacaccctaactgcattttttccccctaacttaattttctattttgtgtttcctacctcccctttcatagactctgcagccctaggtgacactactctgattcctggaacctaccccaggctctaggtctctttacctttgcacctgtgctgcccccgcccttcggccagcctccacctgggtaaatctgacccaccctctaagacctagtgcaaagtgacctcttttgagtgattcagctcctcctcccacaacctgggagaattaacccttcttcctttgtgctttgcgtggctttgcatagactcctctccggtattgtgtttcacaattagttggagggttctctgtagggccatctaatgctgggcattttgccgggattaactaattaattacaccattcatccgctcagcgtgtccacaggccccgtactggccactgagactctgagggagcagtgggtcccacccccttggaacttagagtccgtgagagaatggtctctaaaccctgctaagtcctcacttctgaaagtgtagtcctcggtccagcagcctcacctagatgctagctagaaatacagcaccgcagacctctgcccgtcccgcaaaatctgtgtgctggacctcgtggcatttggtgccttcaagtgtgagctgctttgctctacctcaaactctttctgctctatcctcaccggaatctatctttctttctccttccttcctccccccacccttttttttttcccccacccttttttaaaaaagattttatttattcattcatgagagagagagagagagagggaggcagagacagatggagaagcaggctccatgcaaggagcctgatgtgggactggatcctgtgtctccaggatcatgccctgggcggaaggcaggcgctaaaccgctgagccacccagggatccctccctccctccctccttccctccctccctccctttctctctatctctctctctttcttttcttctttcttctttcttgagagccagagcagagtatgagcaagcggagggacatggcagagggagaaccaggctcgattcacggctggatccccaggaccctgagatcatgacctgagccaaaggcagccatgtaactgactgagccacccaggcacccctcattagaatctttctgctcctgtcttcaactctggtcccctttgaagccttcaccctggctcttgatgcccatgtctgtgaaccctgaaggctgatttgactgagttcccaggctagcctaacacttgatgtctgagaagtgcccagtaaaggctggacaaaatgaatttgttgaagacaggggcggtcttggtgggcagaggggctggtcagctgggaggtgggaaggggggccttggtggaggagggagtcttgggcagccttcagattctggccagactctatggggtgaagtagaggaggtcaattagagctgcctgaataattagagctcctggtgcagattgtacattaactctgggttgggaggatgggaggggtctgggccgtagatcctggagcaggtcaagacctcagcagggaagggaaagcaggcccacgcctgttcttggcaggattgtgtggccagggccactgcctcacaactcaccctgggtgagtgaggccagggctggagtgactgaaaaggagcagtgaaaggtagagaatttatgattgttcctggccagcagatgtgaggaactggtcctgagtgtgcagggtgggccgctcagagtctgacatccagtttcttgaagatccctctgggtgaccagaggggtgggcccccacccacagggaatcagttggggagggtaggtgagctgggtcttgaggctgagctcctgacatttgtcaaagtgccttggagcaccatctggggggggggtctcagggcctctgaacctgcgtcacccagggctgggtgatcacagggagtagggtccaaaggggcctccccttgggcttccctgtccaccttccagcctgattcacttccccaggagggtggacactggaggtcagcaccctgaaaacacagaggtaaatgtggaagaaggcccagttccccagggtcaggacccttgggttggcagccccaggggcccagctttcctggcttgtcactaactcgctgggtgactttggcagggcactgccttctcagagtgtgtttctgtcagtctggatagcctctaaaggtgctctgtttgcacccgagaatccccctgggttctttaaaaaacatttcagcttctgagtcccatgtcagaccaattgtatcaatatttctagggctgggatctgacagttgttgttgttgttgttgttgttttaaactccccagggattttacctgggtggggatccctgatctaagggccctcttcagctgataggctgtgaggaagcctacctgttggatccacctgccccttgctccagagagcccatctcttagccctcttcagacttcagtaagtcattcaacaaacattaactgagcacctactttgtgccagacactgttctaggcactggggaatcaatagtacccaagataattccagcctgtcttagtctataccctgggagaactgggtgaggaggtctggaagggccctttcaaccttaaatctctgagacacatgtaatcccaggggggagggcactgcccctctcatgcagactgcatttctggggcaactttcagacctgcccttggctctcctttaatcgtgatttccctggagatactggaagtccccctgtcctgtgccccagggcagggtcttggcctcagctaggctgattcatgtaacttattttttaaaaatacatattttggggggtacctgggtagttgaattggttgagcatcctactcttgatttcagctcaggtcttaatcttagggtcctgagttcaagccccatgttgggctctatgcttggcatggagcctacttaaaacacaaaaacaaaaacacacacttaaaagaaatatgttttcttttttgttcaagaataatgtatgtcccatggaaaaactggaaaaactcaaataaaaaattatgtgtgatactactgtgacttacatgaacattctgtatgtggatcttttagtcttctttttttttttaactttcgatctacacaaacgtttacaaaacgatgtcaaactgcacaggtagattcgtattctgtcattttgggaggatacattaagctgtattttctaatgccgacaggccattgttatggctgcacagcatcgcacggtatgatttatcctaattaattcaagcaactctagtcttaggcgttcaggttgtttctaaatttttgcactataaacaatctgcacagaacatcctagtccatacatgcccgaacacttgtccagttatcctctcgggctaaattcccagcagtggaattctgagatcaaaaggaaggtccatctttccctcataggctctaactctgtctatgtggtggtagaggtgctgcaaaggtggccctgtgccccaggggggttctgactccacttcatggcctaaatttgagagtgtggtactaggaggtatggggagaaagatcagcctccgcccttgaagttggatgtggtggctgtgatggagaggggtgaagtgaggagaggagcttgtgtggggtttgctcgaggacagaataggccccggggttcggccgtgggacgccagggacccaggctgcatccaattccctggccctaaagaatcttgctgtagccacttttcacactctgccctgccccacattcctgaccctacatccccttcccttcccagtggggttgtggggtgggtggggcagtggcttgggttgggggtggggtgatgtgctggattttaaggtgaggccacaccagccttctgctcacagctcagggggcggtttctgagttttgattgcttctgagactgggtccggagtctctgtagtcgactccaggcctgttgtccatgctccccccacccccatgtggagataggggctccgccctagaagtgggggctgtgagagaggaggagaggaggtctgggagaggggagtagggcagagcccagatctcaaataagtttcatcattggcctctgagtgtgagctctgagctgccctgagtgtgtcacattggtcacgctggcactggtacccagcatttgcccccgacagtcacagttccctgcagtgaagacccctggggtagaaaggctaaaggacttgccccgggtcacatagcacgggtctgtagagaggaggccgcagggcctttcacaccagtgactgtgggccacagagatgagtctacgtctggacaactcagcgagcccagggtgtgggtgggggctggggctgggtagggacactttgcagaggggtttccacttggggagataggcagggagggaatctgcagggagcagagtacaatgatcccggtggtgtgtaaatatgggcatttgggggttggcaggtgggtagagccagaagaggcagtgaacataaatctcaggctccccccctccaccggggggtgggggtgggcagctgcaggtgttggtgcagacacctgtgtgtatttggttcacaaatccctcccattactcagccagccagctagcacccccttcctccagcctgcaggagtgctgtcctctcaggccgtgagtctagaaatgggtgaccagagtgatttaggtcatgggaggcagaatcaagtctgcatctccgagatgctgctgctgctggtagtgggtagactttattgagctcttatgcggtggctctggcctttacctgtcactttggcccctcaccactggcctgaggcatacatataattcaagacactcaaatgcccactacttagacttaataattgtccacattttgccatatatgatgaatccattttttttgcccaagtattttatggtaaattacataattgcgtgttttcacctctaaatacttcattacacagctgcaagaaataaggatatgttcctgtgtgaccatagtactggcatcacaccctttaataatttatccgatgcccagcctgaactcagatgtgccccattgtcctagtgtgtctttgaccactggtttctttagttcaggatccagtcaaggtccacgcattattggggcagcctgggtggctcagcggtttagcgacgccttcagcccagggcctgatcctggagacacgggatcgagtcccatgtcgggctccctgcgtggagcttgcttttccctctgtctgtgtctccgactgtgtctctgcctcttgcgagctctgtgtgtgtgtgtgtgtgtgtgtgtgtgtgtgtctctcatgaataaataaataaaatctttattaaaaaaaaaagtccatgtgttacatttgattcttagtcccccacctcttgttacatttgattcttaggcccccacctctttctttgccatgatgatcctgagttcctgacaagacagagctggttatgccatagactgtctcactctctggatctgtcagggctgtttttgctgccctgtttcccagagagctctgtggcagtccagagcggggtggcggggccttggggcctgcctggctgagccctgaggcttcagttactttggcgagcaggacaggctgagtccagagagcaggagaaaggcctggtcctggcaagcccagtggatgaggtgagtgccggccaggggtatggctcctgcttgcacctcctctgtcccttttcagcttcccctcatgtctctctagttccctgtccctcttcttagcctaagaggcatatcttcctgtgtccccagcagcactgttgagaccccagcccttgccagagcccaccagtcctgagagccagaaacccaggcctgtgggtagaaggtttgtacatttagccttgtacatttagccagggatctttctttctcttgggccaaatttgtcatttttgccacctccatgcatcactggagagattctcggggttccctgagcatgtggcttacctgtcctttctagatgtaagctctctgaagagaaagcctacctgcctgcctattggtccagagtctatatctcagccttcgtcggacttcatgaagtcattcaacaaacatttattgatccatgctcatttaagttccatatactggcccctctggtggcatatggtggatccttggtacagaaagatagggagaggttaagtaaatggatatttttgcagggatgcagaaatgaatttcttttccctgatgagccagggatcccagccagtgaacctaggttcctctcccaaccttcttccccacccccatctagtgggtgtgactttgggtatttggagaaagggactccaaggcctgtgtctaccacaagccaatcccagtagtctaacagtggcttcattgggagtggccttccttgagtctggcctagatttgtggggcagtggccagtgtcctgggctggagtcagagatctggggtctggaactggctattcctttgacttgttgtgtgaccttggcagtttcccctctgtgcctcagtttccaagctagattggggggggctgtctagagtctctgattccctgtcctgtggctgctctgagggtggccatgctggtgggtgcaggctttgattcagactcgtctgatcgtcacttgctccacctctagctcaattcttccttcttatctaatctttccagacagcattgacccgcctcactgcctttcctgtggctcccacctggatctcaaagtgcagccagggcaaaatggggccactcaggtcactggatgcatctaccttcctctttttcccccaaacaagctcttggggtgcagaccccatgggcatttcaaggacggcaccctcctccacaactttgtagtgcagacttgtcaaccatctcctttcaaagggttcagggcagggccccctgggtggctcagtggttgaatacctgccttcagcccagggcatgatcccgggatcctggaatcgagtcccgcatcgggctccctgcctggagcctgcttctccctctgcctgtgtctctgcctctctctctctgtgtctctcatgaataaataaataaaatctttaaacaaaaaaacccccaaacaacaaagggtccagggcagccctgaacacaggcctcctgtcaggccctccccacttaccctcatcccactgcccactttgctgatggcctcttgggccctgtgtagtccaggctcaaactggctttgtgcctcccagtgggtagaaggctcctagcaggctctgtcctcaaagctccctagtgtcctctggacaggccctgaggtgggtagatgcaggggtctaggacatagtggcccctgtcctcagggcaatcagcatggtggttatgagcttcttgactccacctcgcccgtaatggcttcgttgtaaggttttgttgaatgcatggagatctagcttgtacatgtgccatcaactgaccagagcggggtgagtgcccgccaggggcatggggtggtgggtggggctggggatggtggtgtggtgttgagttttactcagtgaacctcacactaaactgtggtgagaatagaattaggtattggatataaaaacagcttataaattaaaacaggttcagcacattggaaggttggattttctactgtggtcgaggctggggtgccacctgcttttagatgaggggcggcgtcggtggtaggaccaggcggggaactctgcaggagcctaggcacggccttgaagacggcaggacttggcaggactcggacagggctctggtgtgcgaacgcctggacgtgggacgatgagatcagcgggcggcggggggtgggagcaggcctttgccgggaccttgggcggagaccggggctctcgggagggctggggagggtgaggcgccgccgccgctttcgccggagagctcggctctggtcaccgcgccaggtgcggaccgaggccgggcacctgtgacccgggtccggccagtttaataaatacagatgccccggtgagggagagtggggggtgcggccctggccgtgggtgccgccggcgcggggtgcggggggagaggtcgggaacgcggccgcggcgctcgtcaccctcccgcccccgcgcacttgcagtcgagacaggcggggcgaggcggggcgaggcggggcgaggcggggcgacgctgcgcgtggggcggcgggtttcgctggggcgcgggcagagagcacccagcggaccccgcccggccccccagcgcgctcccttccgaggcgctgcgcccgcggaactcggcctccccccgcccggtctccccgcagcccgtcggataggcgcggcctgctctcccctcgccggcgcccgggctcccacggggctgcctcggcccggcccggcccatgagaacacacaggaatggagggaggctttcgcggggcgcttggggacatttgggactccacacatcctgccgatggcttctctgcttgccggccacgtggggagctgccctaggcaccaggtgggaaataaagcgatgagtagggcaaggggccgcggtcagacgctcctgggggcggggaggggacggggtcggggtgaagcccagcgtccccaggccgcatggactgtgcactacccccaccgcacatggaggccgcaggctgtgcaacgttagaaccaggaggaacccctgaagtccccatctactgcccttgttttcctgataccttcggggaacacccctgcctcttgtatcctcccactttgcttctttcctctggtccctcctacacaaggtccctcagctgcggtgggtccaggatggtttccttcctgaccttgtttgaagtcctcctgaggccatgtccccctcctgatcaatccctgccttcccctatgtggtttcagctcacgctcccaaaatataccatgctttgtagacctcagtgcactgcgaggggctgcgtggagccctgccagagtgggaggggacaaacggacagccccggatcgcggggtagatttgtgccaggggggttaggaaaagcatgccaggcatctgaattttcgtgtgtttttcctgcacgtgtggcccagacgaggagtttccagggctgctgtggaggggtcaggctgaggatggatttctcctcgatcagagaagctctgaggaggtggcctccccaaggcttgagcgctggacaagataggggctgttacgggctaccccagcctgccctcaaccacactcacttccatgatgccctgtggctgtccagcacccttggcagtgccaggtcctaggccagggcctcctcccctcccccatccaatcatagccattcgggttccctcccttcagggctttgctaagagacaagcagctaatctgattcactaatgtcttacaggaaactctatgaattattcaaggctctgtatagctcctgcctcttctttcgcaccttctctgattggccaagctctgacctgttctttccctgaatttggacaaaatccacagctggtaccaccagttggcactaatacatattcttcataacattaactcttctgagaatgtgacttgtcttcccaaggagatttttaaactcctcgagtcagggacctaccttaccttttgcttctcaaatactttcctcagcagctagtcaaatgaattaattcattccatgtatgccctctctgtgccaggcagtggtctagattctggggatacagcaggaagcaaaacagacacatccctgtcctcatggatcttccatcccaagtgtaggggggttgtaaccaaaatagataagtaaaatatacaacaggtcaggtgatgagaaatattatgggcacagtgaggcggcggcgaagaatgaggagtgtgagaaagagcagttctgagttttaaaacagatagggaaggcagcccggtggctcagcggtttagtgccgccttcagcccaggacctgatcctggagacctgggatcaagtcccacgtcgggctccctgcatggaacctgcttctccctctccctgtgtctctgcctctctctctctctctctctgtgtgtctctcatgaattaaaaacaaacaaacaaacaaaacaaaacaacaacaacaaaaacagatagggagatgggtgcctgggtggctcagcggtttagcgtctgccttccactcaggttgtgatcccaaggtcccgggatcgagtcctatatcgggctccctgcagggagcctgcttttccctctgtctgtgtctttgcctctctgtgtgtctctcatgaataaataaataaaatcctaaaaaaaaaatgaaaatgaaatggttaggaagggagggcgttcaggggaatggccatttgagtggggatctgaaggaggtgagggagggagccagaagggtgtctgagggcagacaaaagaactagtgccgaatctcctggaaggtttgaggaacctaggggagggttgtgggctggagtgaagtgggcagggggtagagggaggggatgaggtcagagaggtgagggctgggtcatgtaggttcaggccattgtgaattcttggcttttactcagataggtagttctggagggttctgagcagaggatgttcttgatttgactcaccttttaacgtaaaggtgtgaggcgtgtgtgtgtgtgctgtgtggagaacaggtcttagggagatgaggggggcacatcaggaggtcagtaaggaggcagttactcacatccaggtgatagctggtgggggcttgggtcaggtggtggtggcaaagatgaaaagtggtcagactccacacagatctggaagatagaacctgcagggtttcctcacatattgggtgtgagaggtgaatggaagaggagccaaagattggctcaaggttttttggccccagcagtgagaaggatggattgccaccaactgagattgggaggactttaagaggagcccatttaggtggcagatgaggagctcagttttgaacctgttgagtctgagatccccgtggtcagccaagcagaggtgttagatgtaggatctggcctttgcgggggagatggatatgggagtcattgatgagtgtctgagtggtcctttgaacctgtgagtgtggctgagatgtgcaaggaagggtatgcgagcagatagcagagggaagagggccaagctctgagccagtgctgcgggccagagagagggaaggagaccaaagggtcctcctcacagagcaagctgcctctctgctccccatcattgtgaggtcctgcacaacatctgctctgacgcttctcagccggcttcaaaaccaatccttctgcttgctggctgtgtgtccctggccagattgtttacctctctgtactctggcttccctgctcaccaaatggaaataataacaaagtggatttagaaaattaaataatgatatatgaaaatattagaaacaaaatcctgcttgctttcattattcttattgatgacataagtgctgttgatgccaaagagaaaaacagggtcctgtcctcaagaagcccatagtgtagacatggcaactagttgcagtaggaagagacatggcaacaggagaggccaggaccggggcgcctgggtggctcagtggttgagcgtctgccttcagctcaggtcatgatcccggggtcctgggatcgagtcccgcatcgggctcccaacagggagcctgcttctccctctgcctgtgtctctgcctctctctgtgtctctcatgaataagtgaataaaatctttaaaaaaagagaggggggggggcaggaccaggtgcttcgggaacatggaggaaggaggcccagtgggaaggagggcactggcactggccaaggaaggtttcacagagtagagggagggtctgagtgtggaagaattaagtgaggtctgctaggcctgggtcttggtgggaagccaggatgggttgggcatgaacggcattgtaggctgccactgcagaggtggtcacctctgtagagatgagagctccagggaccttgggatcaactggagatttagcatggttggagcaagaagttgtgaggctagctagggaatggatagaggtcagaccacaaaagaccttgttagccaacccaaggaggggaggagaaggaggttttggaatcagctctttgacttcaggcaaattatctcaccttcaaagtcagtttcctcttctgttaaatggtgttaatgactagaccctgggaggaagttggtgagaattcatagggaacagttgtgaagtgctgaaatagacctggcctctgaaatggtggatcgttatcatcactgtatcctagaggctgggatggcattgaagacttttaaatgcaggaatggaaggaagggtagatgggtgggtgagtgagtgggtggatggatggattggtggctggctggatagatagatgggtgggtgggtagatgtcctccagagattcaggattaagcccagttgcagtttaaggggggaggggatttggggccctagggtaggcctatagggagggaatggaatgcagcctgactgaggttgagaaagtgcaaggttcattgtcctgtcttggagaccaaaggactgtccccctagtttgaggtctcataaacttctgtttgtctatctctagtgtctctctgcctctgtatcctacttatttttctgattctattgatcttttctgttctctttctctgtctctcccttctgatctgtctgacttcatctccgtctctcttagcgcctttccctctccttcctccattacccactgcccttaggtcggggcggcagggtctcagggctttcacgggagttgcatctacagcatgtggcagcccaggctggaggagacccccctcacaagacagctctagctctgtcaggcagagggggtggcctgggtgtgtctctgtgcttttcctggggtcccccagccccagcccccaaagaccttgccttctaacctccgtgccaggaaagggaaagccttgatgcgttgaggggggagcgtgacagtgatggagagggattttttggaggcttccctggtgccctggcatcccctgccctggggagatggcgtcttccctcccactgaccgagctgccttgtccctcaggttggtggatgaccgctgtgtggtggagccggccgcgggggacctggacaacccccctaagaagttccgaggtgagactcccgcccccataccagcctcccctccgaggctgtaggtcctggacctgggacgagcccgttcaaccccagccagcgctcccacggcccggcagccctcatgctgctctctgtggaagccccccatggttgtctggggccgcccccaacttctcaagggcatacccacttctggcagagggccgtcctcccccaaaccccccatcagccacaaggccacctttgtctgcctgactgggcattttcttagctggcaggggtgtgggagaatttcctcaggcttcaggaggcccagggtgagagctcttcctgggggcttctggtctcctcatctgcctggcgaggttgttgggcccttctcctgccccctgctgtgtccccagccccatgtggatgacgccagccctgggggaactcatggatcccgggcagggccctgctgcctgacactgggcaggggcctccgtgtcctccgtggtcagtgggctcctcagccgccccgcaggcccaagggcgctgagagaattaaatgatatcctgctgtcaccgtgcccagccggggtgaggtattgttgtgattgcctatgaggctgagacagacaatcagacggatcctgggcgtggtgggcagggtgggagcaagcagggacatgccgggctgctgccaccttgcctgcccacgtggctgctcctctggggagagattagctgggattgtcctccagggggatgctgggagggaagcggggtttaagataatcctgtggcatccttggccgtctgtctgctggggccttgcccatccaccggagggtggaggagagggagggggaccttcctcgcccgcaggggggccctgtacctgctgttctgcttctgcttttctcccaggcctctgagtggggctgtgtgggggtctcaggtcaggctgtgcccaggtgtgtgggaaccgcctctggcactggacgtgcctcaccactgaacacgcctcggccctgcgccatctggccccgctgcccctctcacctcctcccctaccccttgccctgtctcattccctccagccacactgcctccctgctgttttcatgtatctacctctgcacctttttactcgttccctccgcctggaaggttcttgctccaaatactcacctggcttgcacggcagtctcctgtcctcagtgggcccgtccctgatcacctcatataaaattgcacccctgtctctcttccctgctttccctctcttcacggcatgagtctgacacactccgcgtattttagttatttgttttccatccgtggagctagaatgtcagctccaccagggcaggtattctggttgttttgttcactgtttcagtgggtggtacacatctgaggaataaatgcaggcagcagcccctcctcaggcttcctcccacccctgccacctctctcaggcctggctgctctagttcccactgctgtgatgacccgtccggaatctctcagctgaacccagccttgaaggcactgggcccgggctttggggatttcagggtgctcgtgcggggtgccctgcttggaggcacagctctgaccatgcctgcttctgggtcctgatgattgagacggggcctgtgtctctcctggaggcagaagtagtagagctttggggatgcctgcgtggctcagaggttgagcatctgccctcagctcagggtatgatcccagggtctggagatcgagtcctgtatcaggcttctcgcacacagcctgctacaggcttctccctctgcctgtgtctctgcttctctctctctctctgtctcatgaataaataaataaagtcttaaaaaaaaaaaagtaggagagctttgaagccactgacagaggggcagatttccactctagttgggggatttaggtaaattcttgggaagaagttagtaagggtgagggtccctagggtgggctgtgccagggcagagaggggcctgggactggaaagggaaggtgtgtgcatgtgtcaaggtgtatgtagccagctgtgtggtgtgacagtggtgacagggaggtgggtgtgacagagaaagatttgccctagagttccagtggacagagtttggggccaatttctgacacaaaaaagccgctcagcagaacaaatactcttttgacttctcatcctcctctcccattggtccttcctagtctcttctttctcttcctctccatcatcccaaagcctgtgagtggggccctccccaaggtcggggtggggggagagggaaatgccccatggtccctgtggcctcaccgtgcccagccagctcagagaggtgggagagaggactcagcctccagcctcctccctgccctctctgccccaggtgtcctgaagcagaggcccatctgaactccctgtggccctatttggacctgagaaaaactgattttctgagacagaacccaggctctgtgcagcccagtggctggtgtgtacagttgaagtgttagaacttgggacaagagacatggcctccaacgtgttcattttgactgaagcccggaggagagaaaagcagagcttggcctcacgcctgggagtcctggttctcattgttctgcatctctccctaaataccctggactggaaggaggtcctggcagagccatggggaccatggcaggtgtgttggaagttggctagatgttgttagagatggctgtgtcctgaggccccgtaagtactgtcctgccatcctgggctggaccccgccattgcgaggaactctggtttcaccctttctcctgctacagcttggttgtcctcacatgctgaccctggaggcccccaggctgagtgggcaaagcccagtgaagctcccagcctgcctccatcagcccctgattggcttcttggttgtggtttcagctctaaccatcatctgaggccattccaagccctcacatgttctgggaattctttccagagtctgcaggctgtggggaggcccaggctactggtgctccaatgtgtagggcacctcactccagcccaccatccctgacctttgctttgctgtaggagtcttggggagatggctgctctgagttgtgtgctgctgactgggtccagagcctgggcatgttccctcccatgtgggggcatggggaggggcagctctcgcctcccagtctaccttagggaggctcagagcccatacaccaagctacagggaccccaggaatgtatgtaggggccacttaccccctgagactgttgcagtggggagttggtgttggggaggaggctgatgaaccggccttcctgtgtttatatggctgggtgccccccaactcccccaagctgtgcttctgctctacatgtcctgccttccaagcccagtttattgtttttttattatatatatgggggggctgggggagcgcagctaggaggaggagctgaggggaagggagagggaaacagtctccagcagactccaccctgagcgcagagcctgatgtggggctccatccacatccgtgagccctgacaagggttggactcaatcgaccgacttacctaggtaccccagaccttgtcattttttttttaagattttatttattcattcatagagacagagagagggagagagagaggcagagacacaggcagagggagaagcaggctccacgcagggagcccgacgtgggactcgatccagggtctccaggatcaagccctgggctgcaggcagcgctaaaccgctgcgccaccggggctgcccagaccttgtcatttttattttttatttattttatttatttttttaaatgaccctttaaaaaaaatttatttattatttatgatagtcacacacacacagagagaggcagagacacaggcagagggagaagcaggctccatgcaccgggagcccgacatgggattcgatcgtgggtctccaggatcgcgccctgggccaaaggcaggcgccaaaccgctgcgccacccagggatcccgaccttgtcatttttaaagcatcttatgcctgtcactgaggccctcggtcctctccctgacccctcttccctccctccctctccagaggcaaatactcatcagaaattgatgtgtatcggggcgcctggggggctcagtcaggttggtgtctgcctttggctcaggtcatgatcctggggtcccgggatggggccccatgttgggctccttgctcaggggggactctgcttctccctcaccctctgcccctccccccatcccctgctcatgctttctctcaagtaaatgagtaaaatcttaaaaaaaaaaaaaaaaagaaattgttgtgtatcattccagagcctgattttatactttcgctattaatacatagggctattataactaacacagagtatttcccatttttataaccctgtatattaaattttttctgcacatttttcattctgcactttaaaaaaatattttctttatttgacatgaagagagagagagagcacaagcaggggaagtggcaggcagagggaaagggagaagcagacccctcctccactactgagtggagatccagatgtgggactcgatcccaggactctaagatcatgacctgagccaaaggcagacgctcaactgactgagccacccaggcgtccctattccgcattgtttttgagatttctccatgttgatgcatgtggctctagttcatctggttaattgctgtgtaatattccactgggtgaataaactgcaagccatttatcctttctcctgtggatggacatttagctcatctccagctgttggcagctggcagccatgctgcagtgagcattcccatacatgtctccttgggcccgtgtgcccgagagtttcttgggtgtgttccgaggtagggggagccctggtgtgaggaggcccttttgagccttcctctggggctgtgtgtgctcatccccctacagattgtgggcacgcccccccccccactcccaccagcgatcttgccacatctggttctgtcccacttaaatttcttccagcctgctgggtgtgaaatggcatctcactgtggttttaatttgcattcctctgatgactagtgaaatggagcatcttttcatgtttattggccacttaaaattctgtacttacctgcccaccctctcccgcacccccagtttataaaagtaatgcaaacactttccaggggcaaccatatagaaaaacagacttagtaatttattcatatggttaaaacatcaaaaccttgtacaaagaagtatagagggtctgctcccacctgcgtggtctcctcacttccctcctctaccatgatccctgccagtgaccactttcctgagttacttatgcttcttccaggtttcttcaaatataaacatatattcaggatcccaccccctacttttcttacacaaaggtaggattctgtatacgccattctttttttgttgttctttataaagcttactatggatcctactggagaccttttcatattagcatatagagatttctctgttttttccttcatttaaacactcatttttgttctgtatcccagacaactgtgtgaaaatagtgtttctacgacttgcctggtttgaaacatttagaaaatatttattttaaaattgtggtaaagatccataacaaaacgtttccatccttggacacctgggtagctcagtgattgagcatctgcctctggctcaggtcgtgatcttggggtcctgggatcgagtcctggatcaggctccccacagagagcctgcttctccctctgcctatgtctctgcctctctctgtgtctctcatgaataaataaatttaaaaagaaaaagtttcccatctttaaccatttttaggtgtatggttcagtggcattaagcacattctcactgttttacagccaccaccaccatccaggaacttttgtcttcctataaaactgaatctctaaactgttaaataattaccaccgcatccctcctccttagccaccatgctactttccatctctatcaatttgactatttcagtacccacatgagtggaatcatccaatatttgtcctttggtgactgggttcttttgcttagtaagacagcctcaaggtttactcacgtgtagtgtgtgtcagaatttctgacctctctctctcttttgcagctgcagagcattccattatgtggctctgttggaatgtatttagccagtcccctttgtttttttttttttttttttttttaatttttatttatttatgatagtcacagagagagagagagagagagagagagaggcagagggagaagcaggctccatgcactgggagcccgacgtgggattcgatcccgggtctccaggatcgcgccctgggccaaaggcaggcgccaaaccgctgcgccacccagggatcccagccagtcccctttgatgggcacttgggctcttcctaatctccatcttctccaatagtgctgtgggtgaagacccttgtcttttgtcatgttgtacaaacggaggtgcgctcttggaaggtggaccagcagtgagatggctgagtcgaggggcaggggcagctggaatcagtgtcgtaggagaaggcagccccttccaactctccattgttccttctgttccctcccagatctctcagtgttttagctcattccaggagaatttagctcccttggccactcctccacttcctctgccccatcctccctaggcagcctggtggcgattccccattgtcacctccaggaacccagggatcatcagttccaccttcatttctctgcagccagcaaccccggatgctgccccacaccccctccctctgctatcaggtgcactttcagttttacatagagactgaacaaccttgcctttctcttctgtaaccacaatgaagtcttccgtgttttgttcaataggtcgagtctctaactgtcgaaaataattagaagcagatgtttacatgatttacactgagcttatatgtgactatgactgtagaactttattccctgtgctctgttctcatctcgagtcctcagcactggtacttttgaatcgtatcggagcagcagaactatttggggtcaggggtgcctttactaatgcatacccctcaggctcatgaatctatgcaggacctgggagtttgtattttttttttaagatttaattaatttatttcattttacttattttatttttaagattttatttatttactcatgagagacacaggcagagggaggagcaggctccatgcagggagcctgatgtgggactccatcccggcactttgggatcatgcctaagctgaaggccacccagatgtccctaattaatttattttaaagagagcatgaactaggggagggttagggggagagggagagagagaatctcaagtagactccatgctgagtgcagagctcgacccaggactcgatctcatgacctgggattatgaactgagctgaaaccaagagtcagatactcacctggctgagccacccaggtgccccaggagtttgttttctaaagcttccccactggcagtagcttttggagtattacaaacttgagtttaagggaaggtcactcgacttcatttactatgtgaatatcctcttgtctgcagcctcacaggccctgtgccccctcaactgcaagttcatgtcccccaacacacacagtccttactgttggagtcctccctggacccagacttttctcttggccttcgatgctgctgctccggtgtgagcccagtctcctggccaccctcccatctttcttcttctctgcctttctgccctgtggtttggtgagaagaaaggttccagccccttctggggtcctggcagggctgcctttgggccgaaagcaccgtgaaagcatggaggtgtgtgtagagatgggccacagacgttttaggggactcaagtcattcgttcatccaacaagcatttcctgacaggtattatgggcaaggctctaagggagatctgtgtgtgagagaaagagacaggttagacaagtgctagggagtctgtttccaagacaggagagtcgggagtagggagggctcatttctggcttccttcccactcccaggatgctcctgggcggggtgtttcattcaaactcaggctctgaccctttagtggccgtgtgaggtccctctaatggggctccaccatcctttaaagacctgcatagaatagaattcgagtgcatcaccataggaggggtcgttcatatttcattaattcttccttcagctccttccttcctgttaaatatgttcaaggagttttaaatgtggttattgaagctttcttatttctagagattccatggcgttctttttcagcctttgatgttacttatgttactttttatagtttcctcctctctgcagggatcttcaaagttttgtggatttaagcagagtaggctatctgttctgcagatgttgtctgtgcctgaagtctcttcgcgtctgtttctactctctgtttggtgggttggttctctctcatgacagctagttcctgagagttcctggttagctttgactgcacactggagtgcagtcagtgtttgaaaaaattggtgtgactggttgtggactaggaggaaggtacctttctccagagaggacgggtgtgtgtgtatcctattacgagactcctggcactccacttgtccaagactgcctgaagctgggctcaggtttggggtttctgtagcatccaggagattctagcaaggctctggtttctagaaggagctgttctgcctcgggttcagccttcacttgggggtgtagcccagcgcagttccagcttattgaacggagggtatcctcttagattctcaccttctgtgggcctgggtttggatttctgcaccaccaccctccatcacctgatgaagccatccaaataaaagcctatttctggaatcagtgaatatcctcagggtgaaagtagcttgggtgtttctatatctttctgacttccctttgatcctctgcttgggcccaataattcttcgctattttgtcagttctttaagaagtcttaaaataatatccatttgaaaaatccagttgtgttagttgctttctggttggattgatccaaaagatatcataaccacggtttttagccctgtcagagactgccccccttaccagggacagacgctcctgccatgttgtttcatgaaatggtgatccaaaaatatatttcctgggtgagccagttcagaaagcttgagaacctctgctctagggcgacctggggcagcatctctctttccttctgttcgcctttctggactgggagtggtgggggtgtggaggagtaggggtgcagggagaccagggatctcatgatcaccaagacctgcgggctccaggctcattcagacccagggccctggcctgcctccgcccatcccagttggccagaccccaagtgtgactggctgctgacacttcactgccccttccaccactctcttgcccgtccctccatttgcagtgcctcatccctttcctcccttctcggctataaattcagccccatctcatccacatgagagagtcatttctagattcatgcattcatctggcagatactcgctgagcccaggctagaggctggggacatggtgatgagctccacatggccctgcccacctgcagatgagcctgtcagaatcagagtattatgaagtagaattcaaaaataacacaatcgatgcatgtctatatttatgcaatataaaatgggcgtccaggggcagggtctgagtgaccctggagctgggaggagggagcgaggtcaatgcaatgtcctaagtgtgataaaaaagaataaaggggagcaatttataatgaaataatacacattttagaagtagatgttggacacaactagaagacccaaggaagcagtcagagcttgcctgtgaatcatgaatagggcagccacaaacgcaagcatgtggtccagccacgagtgatacattctctgaaacagcaaaacaaatgaaaagaaaaacaaaaaaactcctggtaaaattggaacaatacaaagaacacaaattccctcagtttatatctgagttgcattcccaaacaattcagcatttgctaaaaccatgcagaaaatgctttgtgtttctgtgtgcccctctgggctcacagccctgcccgcggctatctacctgccagtgtgtggcaggatgctctcggcaggagtcatgccggacaatatttatggtgcaggtggtcagcatccctgtcctgaccactgaacgcccactgttacctctactgggacaaccacttttccctaccccttcgcaaaacaatccctggcatggtccccttctccgacttctgctgggaactggtggcctccatgtggtaactgggggacctggggagcccttgggagctccaacccagcctgaagaagcagtaggacttcctggagggggtgacacctgagctgcttcttgagggctaagcaggtccttgtaaagacatactctccccagcaaactgagtgcttatttccagaagtgatggccgttcgtgctggtggtgccaaggtgggccaggcatggcaggccttggtgactctatccacttatggaattgtgtttcccccctcccttcttggaaattctgtctttgaattttgactcattcagtctttctgcctgttcatgggctagatagaaaacccagttttgcttttagttcctgggggctggatgaccagctctgacccgagcaggcatctggccttctttcggagggcagaaggagagggcctgaaggaggggctccccagcagctcccttccaggtgctccagcacagccatccccgtcctgggcacatgcccctggagcctgagcagtcatgcagaggtctcacgggccatgaacccagctccctgtccaggctgtgattccctcctgtgacagggaacttgctgcctcgtagcacagcccatggcattgtcaacgcggcccagccactgtgctagcacttccccatgacccagaaccttccatctcctcctgccacactttttatttatttcagagagagaaagcaagagacagagcacgaacagaggaggaggggcagagacagagggagccgcagactcccccctgagcagggagcctgctgtggggctcgatcccagaaccccaggatcatggcctgagccgaaggcagatgcttagtccactgagccaccctggtgcccctgccgtgctttagaataggattttccaactcatgcctcctttggataagtagaaacatcggacgccctatctggagtttgggcttacataaaatcataggtgttttgtctactttgcaaaataaaaataagaatggtgaagctgcttctgaaattttgatgggcttgatctcaggtcgagatccctggaagcagaactgattaaggaggggtcttgagaggacggagtgagggagccttgcccattcagggcaggggaagagccaagcaaggatgtggtttcagggcgaataggaacctcagcctggtcctgcggggatttggggagtgaccagcagtgcagacaggtcacctccagaggccagatggttctgtgcctgtgtcagccacttggagcgagctgctcctgagccatgtgggggataggctataacttcccagatatctgtgggcgacaaggcagtgggtcagagaaggatggcaggtattagctggcagccaccaatgtccacaagagctggcacagatgggacaaggggtggggccccaggagcctctgatgaatctgccatgggggagagggcccgtgtctgccttccatgtgggatcttgctctcacgccttctccaagttcttcggggttattccaaccactagctctccaccctggtggggcagagaggctgaggagggatggggagagtggaggtgcgattgggggccgggtcacgggccgagccccgcgtgaactgatcgccctcccacagactgcctcttcaaggtgtgtcccatgaaccgctactcggcccagaagcagtactggaaggccaaacagaccaagcaggacaaggagaagatcgccgatgtggtccttctccagaagttgcaggtgggtgtgctcaggtgtgcagctgcatgtgtactgcgggaactgggcacacactggggtccgctgctcatcgaagccaaagggggccgtggcctagtcaaaaaccccagtatgagagcaatgggtatgctgggctgtgaatgaggtgaaagaggggaagtagagtgctttcccggtgatccgctcatctctatgaccttctgtgccagttaggagaaggtgctccttcctccaggctggcatagccctctgctctgggcacatggctcagtgagtggaatgtagactagatttcagctcccctacaacccttcagctgaacattgtggtgcagtgaacagcctgaacatggagttaccagtagttcctggtgaccgtggctccagggaacctgatttgagaaccattttttttttttaaagattttatttattgggacagccagggtggctgagcggtttagcgctgccttcagcccagggcgtgatcctggagtcctgcaattgagtcccacgtcagactccctgcatggagcctgcttctccctctgcctgtgtctctgtctctctctctctctgtgtctctcatgatttaataaataaaatttttttaaaaaaattatttatttatttgagagagagaatgaatgagcaagagagagagcagagcacaagctggaggaggggccgagggagaaggagtagctgactccccactgagcagggtgcccatgtgggacttgattccaggaccctgggatcatgatctgagtgaagatagatgcttaatcaactgagccccccaggcaccccgagaaccaatctttacctcctccctcatgttatggagttggatcttggggcccttagagggggccggggtgtccatgctcatcctgtgagtttgtggtagggcctgaatggccccaggtctctgacccaccttgggctcattgaacacacggacagtgcacaatggaagtgcctggtggttggtcatgggcctcctgggggcagtggctcagctgacatcctagatagccctctctagacagaccccagggccccggcccagtccccgggaagagaggaggagggtttggatggtcagcagctttgcagcctgttttctgaggccctccctcaggcctggtgccccaccccctgtcctgtagaccttgcttccctgtgtccccttctgtgatgaggtgggtgggaaatgggagagggtgggcctccccctagagctgtgagctgggctgaagagacggggcggtgggggggggctgcctgaggtctgttgtaaataccccgtctttcttcccgggctgggggctgtcacaggcttccttcctgctgccaacatgggccaagactgaactggggacctggcctgggtgtaagggcgcttacatgtgtgcacacacatggtcatatcgtcacacactgtaggttggtgggaagtcatgtggtatgtggctagtttccctaacagccaccctcatcccagtctcagccgtgaggcctggataatggggctgaggagaagatggggcagaggggccggtgctttcagggagtgccggtctgttggaggagacggagccctgtctccaggaaccccagtctgacagaggagatggagtcagtctatccttaggcagcttccagtcagatgtgacagaagtgcttagaaaaaggtccttaatgggaagccacccaaatcctcaaggccactagagttggatctgccagagtgggatatggcccaccagtgagggcttcctggaggcagtggccaggagcacatagagttttgggagggagtgtcttagaggagaggggtggaggaggaggaggaagtagcaccaggcacatctgtcagggtttggactgtggcaggggttctgtgttgggagcatcaggagtctgctaagatgggggtagtgaggcacagcttaggttgtctgctggcggtatcagagggcatagggagcccaagggcctgctggcatgccccctccagagaaggtgaggaggaaggggcaggggattgggattcagttccctgggcctcatgctatccgacctccgactgaccctccataccctgactatcagaccctatcaacagagggagggaataggctaggtagcccctgggtgggtgggagggtcactctgagtccagcgccaggagctctatgtgtttgtgagcatgcccatgtgtacatgtgtgggggtaggggatgtcaccctgcaggagcaggcttctgagcctgccttccacttctgtgcatgtctatgcagcatgcagcccagatggagcagaaacagaatgacacagagaacaagaaggtgcatggggatgttgtgaagtatggcagtgtaatccaggtgagacccagttgcatctccccctgaagagactgggctggtgttgggtgggggtgccagcagcatgccctctgggggttgcatccccagtgggtggccctgggactgtctctgtgactgcatatctgctctgtgtgcacctcttgctgtgtggcccaagtagctgtgcccatgggcatgtttctggcacactggttaccagcacagattctggagtctgagttcaaatcttggctctgtgaccttggttgggcaaattgcttaacttcctagtgcctctgtttccccatctgtaaaatcaggccagtggtagtacttcccttttgattgttgtaagattatacgaattaatacagagaaaggattagaaanccttcacctgtcccgcctgtccccctatgtggttgtgggggacaaggtgatcctgaatcctgtcaacgccgggcagcctctgcatgccagcaattatgagctcagtgacaacgtgggctgcaaggaggtgagtgggttagtggggtccctgagggcctagacagcccctcctcactgcagtctcatcccccagccccccagcccccatcccccactgcctgctgcatgaactgcttctctccattcctctgcctgtttctccacctctgccctattctgcaccctccgggctggcagccccagggcagccgggtggggcctggggggccctggctgagagcagacacctcttcctggtgccctcatgggaaatgggctgctcttcccctcacctggggcctttcacttgccccagtctccaaccgctgggggtcagccttgcatctaggttcactctgcccttccccaggtcaactccgtgaactgtaacaccagttggaagatcaacctgttcatgcagttccgagaccacctggaggaggtgttgaaaggggtaaggactgggggcccccactgctgtcacctgcctgctggctgcccagcccctcccctgcaggtcccccttctcaccttccctccgcctccccatacccagctctgctcctcctctggccctcccctccatgcgcctctgtctctggctctgcaccctcttcagccaccgtccacccccatggcaccccagacccccctccataagttggacaaccccttctcttgtctctaaccttgcttcctccctctccatcccttcggggtcctggctagcctcagttttgtctcttgctaagggtgtgccagtggactaggggtccccatccattcaccatgggggcctgcatcctttgacctctccagctcccccacccccatgcctgttccatggatccaggcccggcgccctgccctttgccctgtgccctcttaggcaagggtctgaggctggtgagtcagggcctgtgccctggttccagacctgctagcttgcgtgctgggacataggggttggcagatacagaggggttcagcctgtgaggcagggtactgctgggtagtgtggtaatgacttatggagggagcagagtgatggggaaggagggctggagaggccagtagaaaagccctgaaaacccgatgtggtgatgtggcgatgtggtggagagaggggggctcagaggtttaggtgggctttagggcatcgaactagcctactggagtggaggtcctatgcagaggggcagatgggaggggcagatctgggggtagcagagggtgaggctcctcagctaggggaattggcaggcacctggccgtgaaagggacacatagtgacaggtgacaggcctgagagcagccacccgaggaggctggctgctctgtgttcattgcatcctctcctgcttagaagcctgccctggctccctttaccctctgctcccagccaggctgttgtgtcagactttactgcccccatcaggctactgtgtcctatcacccgcccccctccatctcctgtccaccatgctctgtccaagtacctttctttccctcccttaagcctgcataccatccacataccaatcaagcctcagtctgtgtgctacctcctcccagaagccttctctgattacacattcccgtcccaaatctgtgtggcacttagataataaagcagggtgctgcctggactggtttcggtgaatctaactagtgcccctagctatgtgacctagacaggacacttacctgctctgcctgagtttctccgcccgtaaagtggggataatgatatatgcagccggggagtttgtgtgagggtcaagtgagaaagtccatgtaaggtactcacaccgcagctggcacgtgggcagcatacagtgtcacttcattaaaccatgaattctggggagcctgggtggctcagcagtttagtgaagcctttagcccagggcctggtcctggaaacctggaatcgagtcccacgtcgggctccctgcatggagcctgcttttccctctgcctgtctctctctctgtctctcatgaataaataaataaaatcttaaaaaaaaaaagtacacagaagtgatggtcgcaccgcatcttgagtgtaccactaaaaaaaacccaaccaaccaaccaaacaaaaaaactgtgaattctaatttctaatcctcgcagtgtctgcaaggaggccatagtatccccattttacacaagaggaaactgaggctcacagatgttaaggggcttatccaaggttacacagcttgtgaagcagaaccaggatccatgcttggtctctgtgtccaaagccctggagatgaataggccacagtttttgccctccagttgtcccagtcctgtgggagcagaagaaatgggcaagaactacctatattcaggcagaaggggccccagggaggtacagccatgggcctggggggacccccgcggggtgatatctctcctgccttcatagagtgggtttctagaggtacccttcagggaagaagatgatcaagggtgggtttgaccgaggaagccgaggaaggctttggataagaccatgtgatctggaggttctggatgtgggatctgggcagagtgcctctggccctggccaccctccagtggggcttagcatgcatctcaccccctgcatctgaggtgggggtgctgggcctggcccccgggaaggtcctggccccttctgagcccgtgacccacacctgcagggtgatgtggtgcgcctgttccacgcggagcaggagaagttcctgacgtgtgatgagtacaagggcaagctgcaggtgtttctgcgcaccacactgcgccagtctgccacctcggccaccagctccaatgccctctgggaggtggaggtcagaacttgtgccttaccccagacccaaccctcctctccagccctgggcccgccccttcttctcccatcaccctataggggagagggtgtgaagccagggagggatctgggtgccgctgacccagagctctccaggcctccctagagtgtgagccacccctccctggccagtgtctcctcccagcctcacccctgcaccccccaggtggtccaccacgacccctgccgcggaggagctggccattggaatggcctgtaccgcttcaagcacctggccacgggcaactacctggctgctgaggtgagtggggaggtagagggccccctgggagctcaggctgtatgcatgtgggcatgcatgagcatgcgggcctggtacacgtctgcacacgtagtcacacgtgtctctgtgacttatttgcactcttgcatttaacaaatactatcagataattgtgtgactgcaaataagcctaatcaatgttactgggcctctactacgtgccaggagctgttctcggcactgggggtaccacagtgagccagattcccagtgctcgtataacttacattccatatgtatgtctgtccaccacacaggcttgtgtatactggggcattcgtgcgtattggggcgtgtgtgtgtgtgtgtgtgtgtgtgtgtactcatctgtggaaccatgaacagaggcatgaagggcagggtctgggggctcttattggtggcttcttcaggagtgacttgggttttagtgctggggtgggcacccctgggacggtggaggctctctgccccagcgtagggctctgtgtggaccttgttttgggatgggggtcatgtgagcatagctcagtgtccaatagctgccccaccttgtgtctccatccaggagaaccccagctacaagggggatgtctgtgaacccaaggcagcaggaatggtgaggaccagggcctgggaagagggaccatgggggctggccatgaaaccctgggaggtgagctggagggggaaggactctcaggtgggaccccaggtggtttcgtggggcccaagagcaaggaggggcttctgagctgggatgctcatgccagggtgctcagggtcgtataggtcgccggaatgctggggagaagatcaagtaccgcctggtggctgtgccccatggcaacgacattgcctccctctttgagctggaccccaccacattgcagaaaactgattcctttgtgccccggtgagtaagtgccatgtgccccaagggctgacgggggtgcccaggctgtgctgtcctgtcccttgtctccctgcatcctacctcctctgtgctcctgacgtcctctggcctcaggacctgcgtgtcctgtccctctggggtccgagctttcagagctggggacagctgaccaccacgaacactcactgtgtgcctgaccctgggttcagtgcatgctgggtgctgccttgtgccagctgctttgtcaaaatgccttctctccagagttcttatcagccacctgcccccattggtctgcatattcaagcataggctgcaccagtttgtccacggtgcactgttgaggggtgcaggctccctgatctttcaggcccttcccaaccctgaaacgctaggacatagcatcaacaaacttcctggctgtcactcaagctttagcatttaccagctgtctgacctcgggcagcttacccaatcactttgccctgacttcccgctctgtcaagtgagcatatggagtccaccctagacagggctgctgggagaagtgacagagtcaccgttaggcccacccacccttacctgaaaatcctggggccaggtgcatgttgagattcagattcagattgttttctatttcagaaaggtaattacatttcataataagagacaagagtgtttctgctctgagatgtgtggatctcaacactaagtgggataaatagtctaaatagtctcatttgtctaaatgaatcttggtttcaagtttacaaacaagctcaggcttttgggatgctctgggtttgggagtggaggtgagacgcttgcctgggggctgtttgctggcccctctgctctggcctgggctcctcccgcccatggctgtgaagtcaggggggatgtggggccgtccttgggtagagcagaccctggctgggatatgatccaagacatgccccctgtgtcctgccccggccccgcctgcaggaactcctatgtccggctgcggcatctctgcaccaacacatggatccagagcaccaacgtgcccatcgacattgaggaggagcggcccattcggctcatggtgcgggccgcccagggctgggggggccggggctgggcccttggtttgttcctgggtgccctgctgacctctgtccccgcagctgggcacctgcccgaccaaggaggacaaggaggcctttgccatcgtgtctgttcctgtatccgagatccgagacctggactttgccaacgatgccagctccatgctggccagtgccgtggagaagctcaacgagggcttcatcagccagaatgatcgcaggtgggccgctgggcggggtcctcgaagggtctgtgtttcatgaacaaagaagatgctgggcaggcttggttggctgggatgggggagatagatgtgggccccaggcccttgccttattgcttatgtactcccagaactcaccctgatgttgtgttgatgctcagagagattaagagatttgtccatggtcacatagctagtaagtggcagggtcaggatggaaatgcagagtcacaccaaaccccacccggtgccctgttgctcctttctagaatggagtatactgagattcattgtcttgggcactttggaatccagcgggtgggggctgggggggcggtgcgagggatgtattgagagccttttggggtgaagccaggaagagaagttgaaggctgatgatgggctctgtgctttggatagccgggtgggcgggtgactcaatgagagcatgtttggggaagggctggttgcccatgattggcacttgacaggtgggtccccggggggtgtttcccagaatcagtgcctcacgcttgtcatctctggtgtcccttcatgaaggtttgtcatccaactgctggaggacctggtgttctttgtcagcgacgtccccaacaatgggcagaacgtgctggacatcatggttaccaagcccaaccgagagcggcagaagctgatgagggagcagaacatcctcaaacaggtgcctgtgtgcacgtgtgggggatggggtgggctgcatctgggccctgcagctccaggtcttgggggggggttgtccagaacaggagccttgtcccatctgccgtggacctgcagtctcactgcagcttctcttcacccctttgtagaaaattagtatctgttgcacactgatcacatgccaggcactgccctaagtgccctatgtgtcctggctcagttgatcctctccacttgggggaggtacagtaattatctccatgttacctgtaaggaggtgaaggcacagagattggagtaacttggccaagagtatgaggctaggaagcagcaggatcaggatttgaactcaggatgtttcgtccagaacttgtgcttttttcttttttttttaaagtaagctctatgcccaatgtggggtttgaactcaccacctggagatcaagagtcacatgctcaacagactgatccagccaggtgtcctcagaacttgtgcttttaaaaaaaataggggccccctaggtggttcagttggttaagtgtctacttttagctcaggtcatgatctcagggtcctggggttgagtcccacattgggcttcctgctcaggggggagcctacctctccctctttctctgcccctcccctctgtttgtgcacttacttttaaataaaattaaaaacatttttttttctggggtgcctggctggctgagcccgttggtggcatgtgactcttgatcttggggtcatgggttcaagccccatgctgggtgtggagattacttaaaaaaatattttttctgggcagcccgggtgctcagtggtttagcgccgccttcagcccagggcctgatcctggaggcctgggatccagtcccatgtcaggctccctgcagggagcctgctcctccctctgcctatgtctctgcctctctctctctctctcatgaataaataaataaaatctttatttttttatttttattatttttttaaataaataaaatcttaaaaaatttttttctaagttttgattgtgaaacttttcaaatattgagaaagtagtgaaagaatagtatagggaacactgtacaaccgctgcctggatccacctgttatcattttgccattttggctttatgtaactgtacatgtgtacatctgcccttccaccctggcatttccaaatggggtgtacctctcccctgagtttttcagtgtgcatctcctggaataagagcactgtcctccataaacgtaatactgttatcaaatgtaaaaaattagtaataatactgatctgatgatctgtaccatatttctctcctttacccaaaatgtctttttaaagcttgttttctttttttttttttttttttttttttttttgggtgcctgggtggctcactcagttgagcatctgccatgggctcgggtcatgatcctatggtcctgggatctggccccgtgttgggctccttgctcagcgggagcctgcttctccctgtcttccccacttgtgctctctgtagctatctctgtctctcactctcaaataaataaaatcttaaaaaaaaaaaaaaagaaaaaaagcctgttttttgagccaggatctcattaaggttttctcattccatttggttgcatttctttggtttctgttttagaacagtttttcatgctcacccaatccatgcttttaaaatttattaactacatcaacattttttttttgatgaggcaggcttgtgtctgggctctttggtgctggccacactgacctggcctgccttttctcttagcctcagacccctgagctgtggtagccccagatgctgagccaggcccaggatctgagtggagattagtcatgtggggatgagtgggctgaggccagcgttgggatatcggccaggagaagggagtgggggctggaagtggggccgatggtgggtgggctggggtctcactccagattagaatcagcttggtcattcatgtccgtatggccttggggcagggtgagtttggggccgaggattcctgggaaaatgaggggtgtaggggatccctccttattctctctgctcccccagatctttggcattctgaaggcccctttccgcgacaagggtggtgagggccccctggtgcgactggaggagctgtcagaccagaagaacgctccctaccagcacatgttccgcctctgctaccgtgtgctgcggcattcccaggaggattaccgcaagaaccaggtgcgctggggcgccaggtggctcagttggttgagggtctggctcttgatttcgactcaggccgtgaatgtcaggctccacttaaagttctccctctccctctgctcctcccccgccacaccatttctctctttaaaaaaaaaaagaagaagaagaagaagaagaagaagaaccaggtgctaggctcaccctggcctgaccctccctggcctgggcagccccactcccttgctcactgccttgctcactccctccctcctgcttttgttcattcagcaaacattttctgaggcatacacctgctgtgtgccaggcactgtttcaggaccccagggatgcagcagggaaccagacaggagcatcagcttcatgggtgtgcaatccagctccgtgctcagaagggcctcaagatgggtttgccatcttgaaagtctcagtttttgaagaagggtctggctgtttaattttgcacagggacgcacaaatcatgtagccagtcctgccagccaatttcctccctcatggaggcctccctctggtcaggagacaggctgtgagctgaagaactatgttatgtgaacccactcttctgcccagtgcttgtttcttctcccagacctccacctgactagggttggggttccctgcctggggtagtgggctagagcagagccgccccccctccactcagctcgtctggtctccaggagcacattgccaagcagtttgggatgatgcagtcccagatcggctatgacatcctggccgaagacaccatcactgctctcctgcacaacaaccgcaagctcctagagaagcacatcaccaagacggaggtggagaccttcgtcagcctcgtgcggaagaaccgggagcccaggtgagcccacctgttccctgactgcgcccactcccttcttcccggtcctcccagggcacagaggcagttggtgctggtcgttaaaatagtgaaaaaccatggcctccatgggtaaattgtccacgtgtctgagatcctggcctctgcagccccttccttggacccctcccaaatttgacccaatcttggaacaagagagttgacacccgatacaggagaagacctaagacccttctctggtgacgaaattggtgtctgtatttagccagttgttaaatattttgaatatccctcctgtccttgtgccccctttaccctggcccccgggatccccagctggcttccccctgcccagggtgatcagggtgatgcccatgacttgtccctccccaggcagcttggagtccatcacgcccatctcccaagctttggggcaggaacagaagcaagtaaattagctccagggagcctgtgctgcccgtggggacaggaggaggagggtgggcttcatccccactggggacaggctcctgagtcccctcgcacccctgctgtcaccacgccaggttcctggactacctctctgacctatgtgtgtccaaccacatcgccatcgccgtcacccaggagctcatctgcaagtgtgtgctggaccctaagaacagcgacattctcatccagaccgagtgagccgctgccttgccctgcttgggccctgtgcatgtctgggctagaactggccctgggctctctggatgtgtacccttgcctgctgcgtgcccagctctgtgcccaaccccctgtgaagcctgccttctggcctctgctggaccagagggggcccctgtgaggaaggggccttggggaatgagccaaatcctctgtcctggagaagctcactgtctaagaagtgtgtttgagctggcacttggccgagctccaggcagggtctttgtggctgggcatgctcggggagggctctgggcagggggtcctcctgtgatgggtggccctggtttgcaggttgcggccagtgaaggagatggcccagtcccacgagtatttgagcatcgagtactcagaggaggaggtgtggctcacttggacggacaagaataacgagcaccacgagaagagtgtgaggcagttggctcaggaggcgcgggctggcaatgcccacgacgaaaacgtgctcagctactacaggtgcctgtgggcccagctattgcctgtccttcagcgctccccatgcccttgggccttctcagaaggctgtcagccaacccctgctgagggatgagctcaagcagctttgtggccttcaccgtggagactgagggaaggatgactgtgtaaccctgagagctcagcccagtgacagggcctgaaagcaccccagacctgtccccaaacatatttatttaaaaaataatattagggcagcttgggtggcgcagcggtttagcgccgccttcagcccagggtgtgatcctggagaccagggatcgaatcccacgtcgggctccctgcatggagcctgcttctccctctgcctgtgtctctgcctctctctctctctctgtgtgtgtgtgtctcatgaataaatatataaaatattaaaaaaataataataaaaaaaattagtggataacacttagcaaatgctggccatatcccaggccactcagggaaggctcactgtagccctgtgactattagcaccctcaaagttagggagacaggcacagagaggtgaaagagcttgccagagctcacacttccttagtggtgggccacagtacaaatctggcgtcagggccgcagtgagtgaggcagggctctgagccagaagctgagggcaggccagcacccagtgcagagcagcaccacctgagagcctaccttcagcccctcttctgctcggagctcacccctgtacctgctgccctgccgaggcccgtccccctgctgcacttccctcccctgcagctcccagcctctctgctcagccagctctcctcccatgatgacctgttctggttgagccagaaagtgccctcctccttctcgaggaggggaaagctgcaaatcctcactcagaattgtgtctttcctgttgtgttggcgggtgcccggtttgccctaaatcccttggtcaccttcccaaggcctcaggtagtactggtagccctcctaggccctcacctgtcgtgtgctcaccctgtgccccctccccccaccgcaggtaccagctgaagctctttgcccgcatgtgcctggaccgccagtacctggccatcgatgagatctcccagcagctgggtgttgacctgatcttcctgtgcatggcagacgagatgctgccctttgacctacgcgcctccttctgccacctgatgctgcacgtgcatgtggacagggacccccaagaactggtcacgccggtcaagttcgcccgcctctggactgagatccccacagccatcaccatcaaggagtgagatggggaggggagggcgggccaggcgaggccagggttggggggcgtctctgtgaccctcatgcctcactgcctcacccccagctatgattccaacctaaatgcctctcgcgatgacaagaagaacaagtttgccagcaccatggacttcgtggaggactacctcaacaacgtggtcagcgaagccgtgccctttgccaatgaggagaagaacaagctcaccttcgaggtttctggccaaggggggtgcaagggggcctctggtttgccccctcactaggagtcagctgtccccaggggtgtccccggggttccatgacctccattccctctatgccccagccacttcagggagacggcacagactgctggggctccccgggtaaccttccttgtggtcctcggtccttgctgcctcatcagcccaccgtgggtggctgcatccttgcagccctgtgctcccccggaggtcctgccttttcggaggaacttcatcacctcctgacacctgctgggccccactttccggtccagtcccgccctgcccctcacttcggccccgccccctcccgcaggtggtcagcctagcgcacaatctcatctacttcggcttctacagcttcagtgagctgctgcggctcacccgcacgctgctgggcatcatcgactgtgtgcagggccccccggccatgctgcaggcctacgatgactcgggcggtgaggctttgtggccagggtcacccccagccctggccttcctccatcttctcctagtgccaaagtcccttctgatcagccccctgagcagcctgccttctggcctctcctggaccagatgggcccctctctaggctctgtggagaccccgaggtctgggggagtcgccttccaacgcggcttggtcttgaggggagatgatgggggaagatgggagacacaggccctgcctgaggggctcccagtcatacaggggaggtgggggaaatagccctgccacggaggaatcaccgtctgacagcagccacggccctgccctcagggacatccctagggggcataaaccctaatcaaaatgtgcacagagtctgacacctggtgtgtcatgctctgcacatggtgtcccctgggctgtgcatgctctgtagcagcccttagggtgccctgcatgagggttctcactggtttccccacacaatgtacctttgccctggccagtccttctttactcagatttggcttgaagctcacctcccccaggaagcctttctgggttagccctgcagctgacagagacagagtaaggccgcagggccctgctgtgcaccccctgtgatcccctcatgcttctccacaggcaagaacgtgcggcggtccatccagggcgtgggccacatgatgtccaccatggtgctgagccgaaagcaatctgtctttggtgcccccagcctgtctgggggcactggtgccacggagccactggacagaagcaagttcgagaacaatgaagatattgtggtgatggagaccaagctgaagatcctggagatcttgcaggtagctgggcaaggacagtagttggaggtgttgggaacagggcaggagactgggtcccgggacaaggaggttgtggggagctgaaccccagctcagatcacagtatcaagtactgtagggctccatagtgattggttgtgtagcccaatggttttcaaagtatggtccttggggtgcctgggtggctcagtgggttgggtgtccaccttcagctcaggtcatgggtcatgatcccagaagcccaggattgagccctaagttgggctccctgctcagtcgggagcctgctcctccctccacctctcaccttgctcatgctcggtctctctctctctctctcaaataaataaataaaatctttaaacaaaacaaaacaaattgtggtccttggaccaacagcagcagcagcctcaccagggaactcagaaatgcatattcttgggtcctgccccagacctacatgcagaacagaagcacctgaggaggcccacagttgtgctgtgacaagcctcccaggtgatggctggtgcgctctagagcctagctccgtccctccactgtacacctgaggaaaggaaaagcagggactttactgccagtggccagagattttgaagcaaagctagagctttgagagcccgtttcctggtgaggcagacagtttttcctgttctgggtcttgtttgagaacccccccaacacttggggaaggggcttgtagggtccccaggactggtaaggatgcttgcgtttgccttgctgccaccagaggacgggaagggtagtgcagtgatctccttggggacccaggctggccaggggcctgggcaggggagtcagaggatgtgattcattctaggagctaagggcttccagatctgcatcctggggtgtggtcagaagctctgtggcccataaggatagaggccagtcaagggtgtctgcaaaccatctgtccccaaccccctgccccacactggcatctcctgcaaccccctccccgggtcttcagttccaagccccctgccgtccagccccaggcagagcagggtaggaggatgaggttggcctctgggtccggggagcttcattctcattcccgtcactgtcctccctgcgcaggagggacagagtggtctctgcctcatttggagaggcgctgtcatcgtccctcagcactgaggcaggagcgggggagagggtgctctggacctccccagggagaagagtctggattttcttagcttctgatgctctgcagtatctggaacatcagtgccgagatccctgtgcttgagctcattctgggtccccctcccccgtcctggggcacaattggcctccccacctcagccccgtcctcactcccatcctcctcacgtctccagttcatcctcaacgtccgcctggactaccgcatctcctacctgctgtccgtcttcaagaaggagtttgtggaagtgtttcccatgcaggacagcggggctgatggcacggccccggccttcgactccaccagtgagcaccccccgcctccccccaccttccaccttcaggctgaggcttcatgactcacccaggggtgcacattagtggggtggaggctgggagatgcctcgaggccagctccccagccctgcctgtttcccagatcatccaactgtcgcggcaaggggcaagggcagacatcattctctccatctcctaaatggagaaacagaggcccagagaggggcggggacttgcccagggtcacagcctgtcagaggctgaaccaggccaggacccaggtctcctggggcccagcttgaaactatgctcaggcccctgccctggctggctcacccccaccgaggagcatgcaagtggggtacagggattggggtggtttggggtcctccctgttccctcagctgtgtgctccccatctttcctgggcacggacctgccacctgccctcatctacccacttgctccccgcagctgccaacatgaacctggaccgcatcggggagcaggcggaggccatgttcggagtggggtgaggccgggggggtggtggggctggtgggtggtgccagcacgggtgtgagaaccccctcttgggtctccaaggctggggctggccgctcctcccaccccctgcagccccttggctgtgtgcttttgctctctcgtgcctacttggccccagggacgtgggggccactggggccctaatgtcatcttggtcattccactgccctcaccaggcccgtcatggctgtgtgggcattgggcccagggccaggagccggagggggcggggggggggcggggacgaagggaggaagatagggcctgtaggcagggctgcgatggggaggggtcgccccggggggttgggcgctcttaaccacttctctgctgcccttggaacctagtgaagctcttggaccctgctcggaatggcatttataaattcacaaaataaagtgcatgaattacaaaggaaaccaagagctttgagatgcagttatcaaaatattgaagaaaacaaatttgaagtgacagatatttggctctttattaacacattaagcaacgagctgtgccgggggtataattaggagcatgatttcgaagtagtgatgaatgtaaacggtattcacaattcctgtaacaactgtaaggtggtgtgagaacatctatgatttttctcggtgacaaaatcatacgtactgctaatttcctctcgctggaggcaacactgccttttggaggcaggtcaacccagagatgtgactttccccaccccgttcctggccctcagcccatccccacgaacctctgttgggggtgagtgtgggtctccccacagggagcagctgcttgagctgcttcatccaggggagccctgcggggtctcagcggatgtggggatccctcggggctggtggctctgcacacactgggcagaaatcactgtcctgagcgagtgtgacactgggcgctgcatgtgcaaaggggtgtggggagctcgtgtgcccaccgtgcccctcgtccggcatcacaggaagaccagcagcatgctggaggtggacgacgagggcggccgcacgttcctgcgtgtgctcatccacctcaccatgcacgactatgcgccgctcgtctcgggggccctgcagctgctcttcaaacacttcagccagcgccaggaggccatgcacactttcaagcaggtgccgctcccatctgagcccctgggcctggggggcttgcgagtggtggtggggtgccccagccctgctctggctggtgctgggcgctcaggcttgaccaccgcagaggagctcacaggtcaggggagctcaagatatttctttcgtgttctcggtcttgctgaggtccttaaagagaaaggcccgcggttggccacctttatgacctcttggcctgacgtaaggcctgtcactttttttatgaggtggacagcactttagagtttacaaaccgtaccacatgcgcctttgttgggtgcttcaagtcattcctggcacgcagtcagctctcgctaaggtggttggctctgtgactgctgtgtcgtgtggtcttgacagcttccccccacccccccccccggaaattccaccagcaggtgccaggcaccatgcagcagcccctggcaacgtggttacgactctcattcctgttttatggagggggcgtggaggcccaggaagctttcctccctcaccctgaccagggcgagtgaagtgggagccgaggttcacgtacctcctgtagccggcattcagtgatgccagtgtgcttgattctgccctgttcggggtcgaagtgaccaagtgacaggccttagtggcacaagtcagtgagtaactgaagccagggggcggggcggcttgagatgaggaatacagggaagcctccagccatcagggaaggcttcttggaggcagtggaccatggcggagccatcagccctgggtaggagcagaagtggaatggagatgccgggagtggaggcctggaacagggcaggtccccgagtatggggggtggtctctacaaggtggtggagccggggtgcccgtccaacctggcacgccctccatcaaccttcaggtccagctgctgatctcggctcaggatgtggagaactacaaggtgatcaaatcggagctggaccggctgcggaccatggtggaaaagtcggagctgtgggtggacaagaagggcagcggcaagggcgaggaggtggacacaggtgcagccaaagacaagaaggaggtgagcggggcgacagggagctggaagtccagggctcccggcgaggctgggcctggctaactgcccctgccccctccccggccccattccctgtgtccccagcggcccacggacgaggagggctttctgcacccacctggggagaagagcagcgagaactaccagatcgtcaagggcgtgagtattctggggccctgaggtcccccggaggccccagagccgggcctttcctgcctccctactccgccggccgctggccctcaaagtacacatcttctggctttgcatgtgccttaaagacaaccctgccaaggtccagatggaagtattttaaagctaaaggaatttaatgaaattccatttcacagtcatattgttctatttacttttatgggcagaattgggtttttagtgctcccctgccttgttgcggtgatctgactcagtgaccgtggcctccttcccccttcctgtccctgatgtggcctggggcttggctgggccggcagggggctctgaccagcctgagcaggggggccagggcggagggaaggcgctccaggctcaccgccccacccttgccagatcctggagcggctgaacaagatgtgcggcgtcggggagcagatgaggaagaagcagcagaggctgctcaagaacatggatgcccacaaggtcatgctggacctgctgcagatcccctatgacaaggtgacctctgacctctggctccctggggcagctccccgccaggccctgaccacacagtaaccccgaatgttgacctagccccgcctcaccccaatccttgaccctgaccccagtaagtttccctctctggctacatcctgaccatctctgcttccctgtgacctctgactgttgtctctgcatcttgagccatgttgatcctaatccgatcccagcctgtctgtgactcatgaggtcagctcctcataatgactgctgctgatgatttcataccctagcctcgctctgatctctcaccctgacctgtctcccacacaccctggccccagactccaaattcagcatcatttcaccttttgactttccatgcctcaccttgactgaccttgatcctgatgtgtgccaagcctctcactggctcttgagccctacacccagggttcacctgaccctgaccctgacccctcagccttgctcccccatgccagcctcacctcagcctctgacccttagcccctcacacatttccttatcctgacctggaggcccagctttcaccttaagcccggcctccctgtggtcccagtcccaagccctgacctgctgccacacttgttggaccttaggcccaaggcccggcctcactccccctcctctcccggtacccagggagatgccaagatgatggagatcctgcgctacacacaccagtttctgcagaagttctgtgcggggaaccccggcaaccaggccctgctgcataagcacctgcacctcttcctcacgccgggagtaagggcacaaggtgggaggagctgcggggggaggcaggacctggatccccctttctcatgactgcccacctgcccacagctcctggaggcggagaccatgcagcacatcttccttaacaactatcagctgtgctcggaaatcagcgagcccgtgttgcagcactttgtgcatctgctggccacccacgggcggcacgttcagtacctggacttcctgcacactgtcatcaaggccgagggcaagtacgtcaagaagtgccaggacatgatcatgaccgaggtgaggacgaggccaaggggcgcaggggagctccactggtggctgcagacagggaactcaggaggcaggatccaaagttaagacaagtcagatagcgagtcacagaagggacactgaaggcattagccccaggggagggagaacttaggtcacaggggcaggtctaggaggactcagacggcaggcctgaaggcacccaaacactcctctctttatccttttattatcacgtatttaaaaattgttaaagcagctgctgtatgccaagggccatgtgtacctgggggatgtcaggggggcaccatccttcatgctctctgtatgggcccagcatctggaggagggggcacttcatctgggtccaggttcagccctgatggtagagggcctgaggcatcagcccacagccctgggggccatgcaggggaaggtgttcctgagtagtcaggtgagggccggggtcagagtcccaatctctccctggagcctggggcctgcctgctggactggggaggcgggggggtctgacggggcacccttcctgcctgcagctgaccaacgcaggtgacgacgtggtcgtgttctacaatgacaaggcctcactggcccacctgctggacatgatgaaggctgcccgggacggcgtggaggaccacagcccactcatgtaccacatctccctggtggacctgctggccgcctgcgctgagggcaagaacgtctacactgagatcaagtgcacctctctgctgcccctggaggatgtggtgtctgtggtgacgcatgaggactgcatcacggaggtcttctggggactgggagaggtggtccgtgggggagtggaggagggccagggtagaggcggcggagggcagtggtagagccaggcgggggcagcctctcagtcctgggatgtaaggagcatggggtgatgggaggggcatggccagaggaccaagcggggaggtcaggggagaattgatagggtgcagaggagagcctgggcaggtgccccccctagcgcccctgacctggctcctggctgctcaggtgaaaatggcctacgtgaactttgtgaatcattgctacgtggacacagaggtggagatgaaggagatctacaccagcaatcacatctggacactctttgagaacttcaccctggacatggctcgggtctgtccccggggggcggcgtgggcttgtgggcgcgccgtgctaggcagggtcatgggtgggagtccaggcagccttccagggggagtgagtggaggggcctgtctcctaccccaggtctgcagtaagcgggagaagcgcctggctgaccccaccctggagaagtacgtgctgacagtcgtgctggacaccatcaatgccttcttcagctctccattctctgagaacagcacctccctgcaggtgagcttctcccacccgcacaacttgtgtgcagggaaggggaaaaggagagtaaatactcatgtttgcttgtggcgcataaagacgtagcacaaggacacacatgtgtgtgttagttgtgtatgtgtaacaaattgcccccaaaattagcagctaaaaacaacatttattctcctataacttctgtaggtcaggaattacagtggggacagtaccctggaacaggaattcctaaattgacttcgcatgacgggccccagggtggcaggggagagctggcagcaccgcctcaccaaagagagggcggtcatgtctactgtgatggatagcagagcccgagcagtaatccagagggcccgatgcagagatctttggtgttggcttagttgatcgggtgccccaggcccgaaaagacagccttctgcagtctcacctgcatcagcagaaaggctcgaggctagggagcagaagtttgcctttggtcactgaagagtcatgtcccctcaattattctcggatccccagacttcatagcccagagccccttgaaggcaagagaggcaggttccctggaggagggagcctgcaaaacaaatcataaatcataacaccagaagtccccgcatggacacaagagacccacagaggggttaactacacacagagggcctgagggtggaatgggtcctcgtctgtccacaagggcgggttgtcttgacacacacgtctttggaccctgggacctcttcgggactatgaacgatttgtgtcagcttttcccacctctccgtcccgggcagaagtgggagaatgggctgatgggatcaaggccggggtgaggcttttcaaagtcatgcttttgtgttgcatactttcggttttgaaccatgggattatatcacctttttgcaatattgatttattttataaaaattttttaaaggaagtaaaggctcagcaataggtctataagccctaggtctggacctcagggagttctcacagggctgcacgtacggttgggcaggttgtgcacttccaagaggaaaaggggtgccttcttccaaccggcacagagacgtatggtagctattagaagccttcttcctccgtcatgcccactcccagtgggccctggtcacgggcctagggctgcccagggaagagggtgggcaggctgtagcagtggttgtgttgcctcttgcagacacaccagaccattgtggtgcagctgctgcagtccaccacacggctgctcgagtgtccgtggctgcagcagcagcacaagggctccgtggaggcctgcatccggaccctcgccatggtgggtgagtgtgccctggggactggctaagtccaacccctgcccctcccttcaccacagggacacctgccctccaaataaaactcggtactcctcagctcccccatcatctgctcccaggtagttctcagtaagtccttcttggcatcttagcaattgacagaagctttatctcctttgagctttgagtcagttccctggaggacaatgctgtgtgacatcccccagccaaggtctcttgcatgcttgtggatggtttcaggcagaagggaggccggcagattgctggggaacactggggaaggggactgagaggtgggagacaggagggatgggtcagggtggagcagggtagaatcaaagaggcagacactccctccttttgcctggaaaggggaagagggcacttcaggccaagtgggggccagcatgtccccgagtctcagttagttctccctgcccccagcacggcagccctggcccctctggctggccaagcctgcaccccgagtgccctccagcgcccccgtctctctccccagccaaaggccgggccatctccctgcctatggacctggacgcacacatcagctcgctgctcagcagcagtgccagctgtgtagccgctgcccagcgcaacgcgtccaactacaaggcggccactcgggccttcccccgcgtcacacccactgccaaccagtgggactacaagaatatcatcgagaagctgcaggtggctgtggggcttggccctgggcacgggaccgtggggcatcgttaaggggaagccaggagaacccaggcatcccctagtagggtgggtgctcgtaaagggggtcaggacacctctcagtcctgagaacacttcgtgtttatgcaacacattccagtccacggtctacacacttcttactatccacagcaggaggccgagactcagagaggacgaggggtttgccccaggtcacacagccagaggaggggttgggagaaaagcctgggtgggtggctcccagtcaggggctctgagcccgcagacaacctgcactgttcagggtggttctgtgggtgagggcccctcacacaggctgggagcaatcgcagggctgtttggcgtgggggcaggagcaatgatatggagaaatggcctcactcctctcttgggcctgggtggcctgcacctggcccagtagtgacagagccgtgccttgcccaggacatcatcacggccctggaggagcggctgcggcccctggtccaggctgagctgtctgtgctggtggacgtcctgcactggcctgagctgctcttcctggagggcagtgaggcctaccagcgctgcgagagtgggggcttcctgtccaagtgagcgagatgccgagccgggcacgggggtgggagcggcaggtgcaaggcagcctgggaaagggcaggaaggggcccgtggggaccgacagcccccgggcggagggccgtgtgcgctcctgccggggacggggcagggggagtggctgcagggaggcggctggggatgccccgagcgtgccccccttcctcacccgctaggctgatccagcataccaaggacctcatggagtcggaggagaagctgtgtgtcaaggtgctgcggaccctgcagcaaatgctgctcaagaaggccaagtacggggaccgggtgagtgccccggtgagctggacgtcatgagagcccggccagaagggccaaggactcagggccagctccggggctggtggttaaagggtgaaatgtgccagtgtggggcctcactcccttccccacagggcaatcagctgcgcaagatgctgctacagaactatctccagaaccgcaagtccagctctaggggggacctcccggaccccatgggcaccggtcagtactgcctccttgccactgggcctctgggtggccctcccttctgttcccctgcccctcgccccctcacgtgggttccccaactgcaggcctggaccaagactggtcggcgattgcggccacccagtgccggctggacaaggagggggccaccaagctggtatgtgacctgatcaccagcaccaagaatgagaagatcttccaggagagcattggcctggccatccgcctcctggatggtggcaacaccgagatccaggtgtggagcggctgggggtgctggggggctcaccccctgctcaggaggaggtacggtgtgccatgttgctgggaccgccggggcctggctgcagggccaggcgctgggggcctgcacggtctggctgtgcgtgggcgggtccacacacatcccccccgtgactgtccccgtgtcacgtggcctctttctacccacgcataccatcctgctgaagccaggcctgcgcctgtctccctagcacactgcccacatcacatccatcatccctgcctctcagcctctgctcaggcttccttgcctccccctctacatcctccttggcctctggtgcctaactgaaggactgcctcctctgaaaagtcccctaggattgctctagccccattcgttcattcaggccttggattttttgttttgttttgtttttaaagatttatttatttgagagtgagcaagggaggaggggcagagggagagggagagagaatcttaagcagattctgccaggcgtggagcccaacacggccctgagatcactatgtgagccgaaaccaagagtcggatgcttaactgactaagccacccgggcaccctccatgtgatgtttttttttttttttttaaattttatctatcatctatctatctaatctatctatctatctatctatctatctatcatctattttttattcatgagagacacacagagagagagagagagagaggcagagacacaggcagagggagaagcaggccccatgcagggagcccgaagtgggactcgatcctgggtctccaggatggtaccccgggctgaaggcagcgctaaaccactgagccacccaggctgcccccacgtgttgttttaataaggctatactcatgccttccaagtgcctgtcagtgttcaaggcactaaggattcagcagtgaacaagaaagacaaaatccatacatcctgtggattggtcctatatcctgggggggacactagccaataactacaatccctacacgatgcagagagtgtgttagacagtggtgaagggccaagggggtgctgggacaacaatcagggtggagcaggcagctggggccaagtttgaaggggaagtggctgatgtggcaggagaagggagagaaggggagagtggtgggccctggggtcagagaggtagcaggccttcagatggcctgtgggctgctgtgaggtgcggcttttcctgtgggtgagatggggcactgcagggtttcgggcaggggaaggacaagactcagacttccgaggggcacctgctgtgtggggagctgatggagggccaagggtacatgcagatggtgtgaggaggctggtgcaggcctccagcatcgctgtgatagcagtttgggacccttcccctccgcctctgccaatcccggccaccccagccccagcagtagtcctagagcctgtctggggacccatctgtggccccacctcatccctgcagcaagggatagagccctccagggactcaccaggggctgctcagagccaggcccagtgctgagagccaccctttccccagaaatccttctacaacctgatgatgactgacaagaagtcagagcgcttcttcaaagtgctgcacgaccgcatgaagcgggcccagcaggagaccaagtccacggtggctgtcaacatgaacgacctgggcagccagccgcgtgaagaccgggaaccggcaggccccaccaccaaaggtcagaggtcatggcggtacaggatgggggtgcccggccggggtcagagggtatagggtgcggtggtcacagggcaagaggtgcaggcaggcgcctgagggtgggaacatagggtgaacatagggtgagagtgaggtcctttccagcagcccagcctcaccaggctttgccctgcaggtcgcgtggcttccttctcaatgccaggctccccatcccgctattcactgggccccagcctgcgccggggccacgaggtgggtgagcgcgtacagagcaacgagatgggcatgtccgtgctcatcatgcagcccatcctgcgctttctgcagctgctttgtgagaatcacaaccgggacctgcaggtgagcacctgccccttccaccaccacgcctgccatctgccgcacacagggccgccatcccaggcctctccctccctgtgacggctgtgcccacccttttgtgccctgcagaacttcctgcgctctcagaacaacaagaccaactacaacctggtgtgtgagacactccagttcttagacatcatgtgcggcagcaccaccggcggcctggggctgctgggcctttacatcaatgaggacaatgtgggcctcgtcatccagaccctggagaccctcactgagtactgccagggcccctgccacgagaaccaggtgagccatcatggcagcgtggacgtgtgggtggatggagcaggcagggctggggagagactgagggctccggagctgccacagttctgagggtcccgggccccatgtacccccactgcctcctgccagacctgcatcgtgacacacgagtccaatggcatagacatcatcactgcgctgattctcaatgacatcagtcccctgtgcaagtaccgcatggatctggtgctgcagctcaaggtggggctcctggcagctcacacgagtgtgcatgtgacgtgggtgcatgtgttgagtgtgcatttggggtgtggtgatgtgtttaatgtgtacgtgttcataagcatacacgaatgagagtgtgagcaaacgtgttctgggtttatctgagggcctcctgtgtaggtgtctgctatctgggggactgtgtgcacccgcttcagggtgggggtgaaggcagccagcgggtgggctggcgttgcagggcacttctcagcaagtcctggggaacagtggggaatgcaaaggtggtgacacatcttgcgggccgggggaggctgttgtgaagtagacagaggaagggtttgtgggggtcactatgggggccctcagactgtggcctgccctcctccccacctgtccacaggacaatgcctccaagctgctcctggctctgatggagagccggcacgacagtgaaaacgcggagcgaatcctcatcagcctgcggccccaggagctggtgaggctgggccaggggtcaggtgggaaggcgggagttgggggaggtgcgggtgggctggggtgggtgggtgttaggtagttccctagccccaggaagacggcgttcaaccaggccctgtcccaccaggtggacgtcatcaagaaagcctacctgcaggaggacgagcgtgagaactcggaggtgagcccacgggaagtgggccacaacatctacatcctggcgctgcaggtaccggccccgccccgccccgccccgtgactcggccccgccccgtgactcggccccgccccgtgactcggccccgccctctcgcagctctctaggcacaacaagcagctgcagcacctgctgaagccggtgaagcgcatccaagaggaggaggccgagggcatctcttccatggtgggggcccgaggatgaggcaggatgtggggcagggcttagatctaggggcggggctgggcgagagattggagcggccggtatctgggggtgaggctagggattgagggcggcgatgggcgcccgtgggaatccgggatgaggcgggtcggcgccaggggctccgggcggagtgcggcggggacgtggcctgaagctgagtaaagagctagaattgggggggagagggcagggctgagggcgggaggagccggcccggtggcccttggtggccccgggtgaaacctggacggagtggaagcccagagcaggacagcggagggcgctgactgtcctgtggggttgtttggacatggctctccccctcccccctcttaatttggggcttcatcctcgttgggctgggctgggctgggtctggctgggctccggggccaggcctagcagtagggagttgccgcctgactcagcggcccctctacccccagctcagcctcaacaacaagcagctgtcccagatgctcaagtcctcggcgccagcacaggaggaggaggaggaccccctggcctattacgagaaccacacctcccagatagaggtgtgcctgagggcagcagggggctgtgagtgatggcggtgaacctggccctcggtggctgcggcctaggtgtgaccacgtgcctgtgtgcacccagattgtgcggcaggaccgcagcatggagcagatcgtgtttccggtgcctggcatctgtcagttcctgaccgaggagaccaagcaccggctcttcaccaccacggagcaggatgagcagggcagcaaagtgagcgacttcttcgaccagtcctcgttcctgcacaatgagatggaatggcagcgcaagctccgcagtgaggaccccagcagggcgggagggcaaggctgggcctggagctgctcagtgatgccccctgcagaacccccccctcacgtacccgtggttgtctcaccgcatgccacccctaggagggctccagccacgttttcctcctgcagtggggcctggaactcgtgcaggcaccaggggcctgcgtgcggtgggtggacagtgttgatcagagacccccactcacgccagcctgccaccaccctcctccctcaggcatgccactgatctactggttctcccgccgcatgaccctgtggggcagtatctccttcaacctggcagtttttatcaacatcatcattgccttcttctacccctacatggagggcgcgtccacaggtggggatgcaaggctggcagcccaccacgccccctccctgggtttgggcagagccatggggccgccaggctctgaggggaccagatgctgagtggggaagagcacccctgcactgctctttgggctctgcactccattgtggggagagagatgtggtctgtggcacaggcagggtccttgacctctggagacagtacatatctctctgtctctctctcacacaaacatgaggcagagctcagatatggtagcagcagctgggtagggcctcctgccttaaacctagacaggcaggtgtgatggtgggggccctattaccaggtgaccaagaacatactatgagggaaggtttccaggagggggtggcttcttggagtctgtgggggctggggctgtggtgggcttagctgaccagcgctcacccctgcccccttgccccaggtgtgctgggctccccactcatctcactgctgttctggattctcatctgcttctccattgtggccctgttcaccaagcgctacagcatccgccccctcatcgtggcactcatcctgcgctccatctactacctgggcattgggcccacactcaacatcctgggtgccctcaacgtgagtgcctgatgcctcccccatgctcatggtgctgttggccctcacgcaggccggccgcctcccagcagccactgctctgcccagccccccttgtccttgtgttgggatcaggcttgttaaaaatccaggggcaggactgatctgtgcctcctccatctccttagacaacctggggcaactggcacttggagccagtcagctaggggtcactttggggcaccagcttcagggctgccgtgtacatggtgtctgctgggcactattcacactgtagacatcaaagatgtgtatgttctgacaattcctgacagctggaaataaaaagtacctggagcaagggtgggcggtggggcaggcgccttttcctaacttaccaagtcaccataaaggccaaggttgatttatccgattctatcctccttcacctatatctcactttcttcctggagccaggggccccaggggcttctcccctattctatcccaggagcccagatacatttccagaagcagtctcattaatgccaggcctgccagtgtgagcaggaccagctcagatctgctccacagaaggggcaccgctgcagagagtggacatctggggtgggtggtgggacactgatccccatgccttatacttgccctcagctgaccaacaagatcgtctttgtggtgagctttgtgggcaaccgcggcacgttcatccgaggctataaggccatggtcatggacgtggagttcctctaccacgtgggctacatcctgacgagtgtcctgggcctctttgtccatgagctcttctacagcatcctggtgagtctgctgggggtggggctggcaggggcgtgtgcccctcagcttgctagcggttcccccacactggtctttctgtccagtcctcttgctgcggggctggaaggcatggacttccagagtcctcctctgcctgaccccagcctggccttcagagccctgatggccactcctgactcccatctggcccagctcccgaggagctggactgcccaggtttgtttcccagctcggccactctcagctctgtaattttgggcaagtttcttaattgccctacacctccttttctgtctctgtaaatcacagataattaacagcacctattttctagaatggtcatgaggctgaaatgagctaatgcattaaaactctacagagtatgtcctggcagatggcaggcacactttaggagctgtccatctccccagcgctgtgcgggtttgtctgcccattcaccctttacgccttctccggggccattcccttcccttgggcttagaagtccaggttcctctgagtggcctccccctccaggtcctccaggctggttccacctgcctgagcgcagctccttcgggtagagcctgtgggaagccaccgggagctggtggctgctgcaggccctcaaggccgtatccccaccttgcagctctttgacctcatctatcgtgaggagacgctattcaatgtcatcaagagcgtgacccgcaatggccgctctatcctgctgaccgccctgctggccctcatcctcgtctacctcttctccatcgttggcttcctcttcctcaaggatgacttcatcctcgaggttgaccggctgcccggcaatcactcaggaggtctggtgctcctctctgtgatgggtggggggaggggggctgcacaaatgatcaggccctgggagtgcttatccaaccaggctccctgcctcagtttctcctcctgggtcctgtggagggctagctcgtaccagtcgccctggcacaggctgagggggtgggagagccttggttttcggctccctaaggagcttcttgcttgcagaccctggcattcatgttaaactcagtatttgcagggactgcctgtgtgccaggctcaagggtgtggacccccttcctgccctcagtacacagcccggagctgggcaggggggacagggcatgaagacccttcattcgtagcctgacagtggggagcttgcaggatgggggaaggcttcgtggaggatgtgatgctggggacacgacgaggggaatggtacatcaggccagccatgtccttatcctgctgacctcagccctgtcctctctagccagccccctggggatgccacatggagctgccacgtttgtgggcacgtgcagtggggaccagctgaactgtgactccggggtctcggtacccgaggtcctggaaggtgagcgcagtgtgtctcagggagcctgggggaggggcgtggaggcaggtggtttgatgtgggtgtgcgcccacactctgcttgtagggaacgaagagctggagagcacggagcgggcctgtgacactctgctgatgtgcatcgtcaccgtcatgaaccacgggctgcgcaacggaggtggcgtgggcgacattctccgcaagccctccaaagacgtgagcatccctggccccactcccagatccatgctgcccaaggcctggcctagccagccatggtggggtcctgccctcaggtcacaggccggcagagcaagcagcttggccctcccaccatctgcagtgttgctggtccccaccatgcatccccttctgctctcccaccgagccaaagtcaagcagcgctcccaagcttgttgggtttccccgccccactccacttgtaccccccaccagctcaccgtagctgctctaaaaccttggcaaccaggctttgcccaggctagggaaggcatgagtcagacatcgggcggatccccggcaacactggcttcctctgtgaggcagggccccagcccacatttggggtgggcagggtggggaagctgagttggctccacaaggaggcctcaggatttgacttaggcagccaggcatcaccggtagtcagtctgtccccggtcgcatgggagcgagaagccacttccctgggccagacagtttccagaatgtgtgaggccaggcatccccagggtggggcagaggagttcagaactggctctgcccccaaccaagagtcaggggcagagacaagcctcgacctccagccttactgccctgtgctggactccttccatggggctcagcccagctgggatccggcatctgctctttcctgacctgcactcagggcttgcggttgcagtgctcgctgtcctgctgctcagagtgagcctggctgggtgggcttggcctccctcagggtcctgggagccagaggccttcattcccctctgctgagggcctggcctcctctgtcactgccctgccccctgcctgagtctggcctgctctggtgaactgggcccagcctccctgcctcacccctgcaggagtctctcttcccagcccgagtggtctatgatctcctgttcttcttcattgtcatcatcatcgtgctgaacctcatctttggggtgatcatcgataccttcgctgacctgcgcagcgagaagcagaagaaggaagaaattctcaagaccacgtgcttcatctgtggtgaggcctggttcctgcctcccgggctgactgggcgtgtgggggggggcatggcagcctcagtctggcccttcccaggttcgtgtggccaccagagggccctgccctggggctggtggctccgggactttttgctcaggccagtcctgaggtgaacaggaccctgcctgaacttgaggtcatagaaggggtgggaaagggcctcagaaaggccctgagaagggccttctcagtttatggaggaaacccaggctctctgacccccgttccagggcttttcccgctcctgctgtgaagtgctagtggctcaccacaggctaaggagcaggtgtcacctgtgggacagacccttctcggccattcctgcctgcccagctgctgggagcgctggctgccctgggcctccgcccccaggtggagggctgcgactgtgggggccgggggggccgtcactcaccttcattggcctgttaggccgaggacacacacccgctacacaccgagaggcggtgtctactccaccaggtggccccacctcggctctctgtcctcctcactccccctctgcacccccacaggtctggagagagacaaattcgataacaagacagtgtcatttgaggagcacatcaagtttgaacataacatgtggaactacctgtacttcattgtgctggtccgagtgaaaaacaagacggactacacagggcccgagagctacgtggcccagatgatcaaggtgtgaccccgggggtgggcgggacagttgggcacgctcgtggggatgccatcctcaccagggccccgccagctgcctatgctgccggaggggactctgagctcttctgcttgggcgctgttgtctggaaaaagcccacagctgacctgccagccccgaaaaatgtacatggtgtccccagggcctgtgggtgcccgaacctgaggaatccggggagcaggggccaccgctctgtggaccatcctcagggagccagctcagcaggaggaagggcagcttccctgagctttgtatggtcaggctgagacagagcttttggaaaaactttgaaactatcagacctaggaggaatcaaagttaatctgtgcaatttctgtagtgatgaagggagggaaggcagtaaattaaaaaaaaaaatcttgcagtgttttggggaaatgaagcccatccattccatcaaatgtagtacatcttcaaattcttgcacaatggataaattgcaggctaagagaaaagacgtatttagcagcatggcaggggcaggggacggggggagggttctatttgtttcttaagtttgtaatttgaacagatctttagtataggtttatctgtcggtctgagaactcatggcttgtgacaaggggccaggaaactggtggtcttctcctgtgtctcctctgtcctgggaaacgtggccttgcctctcagacacgtgtcagatgccagctgtcctcggcagagcctcctgtccctcagcgtgccatctgtctggctcgcagcttcctggggtgtggggcgtgtagggtggggtggggcggaagggaggaagggagggaggaaggaaggagcttcagggcctgatgcagaggcccccctccacctctcgtggggtgtgaagagagtaaacagatggtgtcaataccagtgggacttgaggctgtctaatggaaactggcctgtcaccacgctctggcctcaacaccccattgagggttcacggccagctctctggctccagggaggaccccgtcggtccagattttcccgtgacatatccctggggagcagtttgtccaggatgtgacagcaggctccccctacattactgcttctataaacaaggccttccgaggccaggcccaagcttgctcatcctgcccgggatctttttcagaacaagaacctggattggttcccccggatgagggccatgtcactggtgagcaatgagggggaaggggagcagaatgagatccggattcttcaggacaagctcaattccaccatgaagctggtgtcacacctcactgcccagctcaacgagctcaaggagcaggtgtgtacccaggcctatgctggccccaccctagggtcccatactctgcagctccagaccctcactgggaggttgcagcccagcctgccacggcggggaggggagggtgctgggaccttcacattctttcctttccttcttgggtttggggtggaagacaggttcggtacgcttttccccccgtggaaagctagactggggttcgcagcccctgtaagcaccctgaaggacatggccgagtggagccttggtgctgtgtgaggggtcctcccccttgcccaccccttaccctagaagctgctagggaggctctctgaggggtttaccagtgactggggaagtcaaggcatccttccacttgtcaagacctcctcttgcctagaacacccttctttccagctggcagtggctaagtggccttaggcagtgcctcgtttaggtggggggctggtttcccagttgcgcatcaggggtttgcgatgcaccaattaaggacaagggtttggggttgacatcctccgtgtaccctgggggcggggggaggggggcttggcctgctgccagtgctgaacagcagctgggcccagtgggcaagaggctgggcggtgaggtggagggcgggtgctgggcagcccgatccgacccgcaggcctccatctaatcctagatgacggagcagcgcaaacgcaggcaacgcctgggctttgtggatgtccagaactgcatgagccgctgagagccacccgaggccccgacaggggatggtcatcccggacagtgtgactggaatactgcccttccccatgggtcgggtggcaccagcccaccagcctcgcaaggcccagtgcccactcggcccctggcttccaccctgccggatacccccaggccatcccaggctcggccagcacggagtggggagccacagagccggcagtcctgcctagagctggagagacaactagacagtcactgggactcagcttaccctaatgccttagaggaagtctccggaaggactgctttgtcccttagaacagtacctgacattcctgtgttcctcctcgggggtcattaggagtgaggtcacctctttattctaagcactacatttgctctctgcctgccccccccccgcccccggggggaggtgcagtaatgctgttgttgctagtgatcttagagcttcgttatttaacttattcgagggtgccgtgttcaaccctggccgcggctgcaaggctccccgggcctcagatctgctgtagactgcacagagaccttactgtccaggccatccctctggcccgggcccaggtacactggtgacctgaggacaaagagccttgctcctgggacctgcctcttcctagtaggcagctgagaagagttgttggcctagaggacagggcaggggtgtgttcgagtggctggtttttgactgcttgtttgatctcttggtgtaacattttacaaatcctttggcctgagaactaatatggcaattgccttaaataaattaatagaactctagtccattagaaagggatgtggtttccgacactccccaggggctgaggggcttcatgtggcacccaggcagaggacaggttctgagcccttgccccctggcctcacctcaccttgggctcctggtagatgccctgggtgcatcctgtctcgcagcaattcctggacagagctgtactgcactgtaactggtttgtattttattgtatgtatttcaaagcatactgaggggtacagatgaggctaagaactcccctgcccttgttcccgaggggtgctgtcagcccctgccctacaccttctctcagctctgtccttaacagaagaaagcgcaggtgggggaccaaacactgaatacagagctaaggttccatagtaaggtgatcccatgtgtggccctggctcgggggctcttgtcctgtggcctcccacagaagctgctcagagtgctgaagctgactgcaacccaaggccccgcttggccaaggcccatccgaagccctgccccagcctttaagccaacctgaaacaacctggttttcctacaaggtcaggggcaggggactgagctgcatcttcctgaatcagtgagaatgagggccaagtgggctcttctcatctctgccatctttccctttgcagcaggatgccttcttcaatatttactgctatttttggctctcccccaggagctcctacaacaaaagggagcctgagaatcttgccagaagccagccagaccccccagctggcaggtggggctcccgtggctgctcaggaagcaccttgcccagaggtcccttcaccttcccttctcaggcccagacagaggccctcatttcctctcctctgaagacttccctacctgaccagtgggcggggtggatgctcaatggcctcccttctaaagaaggcagaagttaaaaagaaaaaaaaaaaaaaaaaaaaagaaggcagaagcttcctttagaggcgcaggggcttcctttttgtgaaggctggataagattcccaaactgcgaggatggggaaatcaggacagttttatttatgatggcaagatacaagactccacacttaggtgtgcgggcgagacaaggaccgagcccaggccttctgcttctcctcggtattcctgggggcaaacttctcctgcagtttcttccacattcctttattcatttccttaaactcttccaaagtgtctgtaataggggaagacaataaatacataaatagactgcgttttacaattcggtgatgtcaattggccccagaggcttttgccatccagatataccttgattttcacactgtgtgttcccgagagagggagtgcggccccaagttctgataagcaaatcagatgggctaagagaaaaatcactgctcgtatgaatcacttgcatagcaggcaccatgcgaagcactctgtacctctcgatggccagtctctgcccccatctaagctggggcccctgctgcctggttctgcaggagcagcaaagaaatggcactgccatgtcagtgacacatcctgcaggcccaggggcccagaggctttcactcaaaacttggcctgtgtcacatagacctaaccgtctccactttgcagatgtgcaaatggaggcagagggaggtgaggtaatttgctcaggtcgcacagctcagaagtggtggagcagggtggggatgggtgtgggggaacagacctgggatgggatccccaccaatcaattcctcactgggaaacaaatgatttaaccctgctagcctcaggttcctcatctggtggagattgaaactcctgcctcaaaagtcgtggacggaaggaaataatagaagaatgtgttggcacccggcctgcactcaagaagaggtggccagcttcatagctacgaaggtggcagtacgctggcccgcaagaccccacaaacgcaaacacactcacaatccataggcaccacaaccagctctctcagtctcagcattacttaccttttgggccagacaatcctttcttgtggggctgacatgatcatcgcaggatgtttagcagcaacgtggcctctacccactagatgtcagtagcagccccctacccggcccctagctgtgacatctaaaaatgtctccagacactgtcacatggcaatgtggcagttttgtcataccccccaccccccaaccagtggagaaccagcagtctaaagtctctccagggctaaagttctacactacctaattttatctgtattttaaatttagattttcacacagtattgtttaaatttcagcctggattttcacgggttaaccgaacttctagagaaaaaagaatagcttttaggaacaaaaaggcaacttagattatcatcagtggcctcttgactaaattaggacatacactactgcagccaggagcccaacatcccaccctgaaaccttcccagaagtccaggtttcctcaggggcacaaagtgggatgctgaggggccccatccatgtgtaagccctgaggcctctttcagaggcgcccatgaccccaagcccaggtgaacacacttgggccccagactcaccaggccctcaaacactgtacggtgtgtaatcttgccttgtcagggaaataatcagtaagcctatgccacatagtcacaacaaaatatgaggcttatcgtgaaaacaaattatcagcaaatttcctggagctgaactcctggccaaaataagctgcagcacagggtgatagtggggagtctgttgccccccccaactcacagaggggtccaggccctgacaaaggggatggaggccgggattctggaacttatttccattctagtttcaagcccaaactttgttcaaaccctttgggaccctcaagagtgacacagggcatcaatgcaggtggttatgtgggcccagagatgggaataaatttatgtatgtgttttagaaaattgttgataaagtaattctgcttggccaaaatatctttaccccagttttccagagtactgtaacaaaaagaggatcagagttgacaccaccaggttttacctgttcagagggtaagcgttttctggaaggccaaatccccaaaatttagttgctaaaaagctgccaaaggaataggaaagagaaatttccagagtaccggaaggcaaatgtttcagggctatgccctcccagaaaaggttagcctatttttgtatatgctagccttggcaatacaaatcgtaattttccagaacttgcctactttaacccaggctccaactgtcactacccccatctcttcctttggtgacaatggagatggggaagtaaggaggggatgtctaggcagggtatttcctttcctgttaattgaggtctgtcaacaactcccaaatgtacctagttaaacccatatctaacccacaaaccatgtcccctgggtcaaaaaactctttgacgatatccctgtacaagtttattgaatacctttttgttttaattaaaaccctcattgtttataaagctcccttaggaccataaaaataaaattattttccttccatcctgatttaaactacttccattttgcaaatatgtattcccctgttccttgctgcccagccttgaatttaaaagctctaaagatggattttctttttttaaataaatgtctttgaccttctccatattctatggccaaaaagcatgccctgaagcttcagaatttcctctgggctattccacaagactttccatcaagcagagcagtcttaatagacaattccccttggctgctcaaactcaaagaatcatttgcaaaccaaccagaaaggggcagcagggcttcagtacctgtggacaggatcagcttgtactcttccacagacaggccactgaagctcgtgtctctggggcgagggtactggtcacatggggagagagaacagaggagggattacttctgcacacaacctgagacctgacgaaccgggagaagccttgctctcctggcacggttcaccagtgggcctctacaaaccagagactggctagaagagcagcgccacctagaggtcaaagacttggccttgcttgaatggacccaagaatcctgcctgtgtgattcgtgtctgggtgtggcccacgattctgcacttctaaccagctccccagggatgcccacactgctgctcacagaccccactttgagttgtgaggatttagaagaaatcccttttccctgcaggctaggcatttggctgtgtatatctctggagttactcaacatactccagctcggggaaaaccacattaaatggaatttgacagtaatcatgtcagggctgaggaaaagcccagctttgtctgacaggactttcccgaagcatccctctttatcaccagtgtggggaaatgccagctccatcagagtagatgggaaaatatgggtatggtccaacagttgtcagatacaccctgagcatacaatggtctataaaacacatggctttagttcaaaactataaatagcttttatttaggtgacctaaaagcctctaccaggtgcctctgttagtttggttgaaattactggttacatttgaaagtagcaaaaccccaattctttacaaagcaccgcagaatcagattttcacttactctcactggtcctttccagtaggagggctggggttataaaaaagaccggcccactcaccttgtgtttgtaatagtttgaatggagtcttgctaagctctcatacatctgatcacaggcctcaggttctgcaatctgaaaaacaaagaaacccccccatgtgagcaaacaagccctgcctcccacaaggagggtctgtacttccaggatggaccccacttacataaaggcattcaaatgaagcaggcctgcagcttagcactagcttctccactctgtggggagcaaacttggcctacagctccagttattagaaagctattagaaatcaccttttcataatggctccaccagatcaactctccaaccttcagaaaaactccatcaatcaactggcaaacaaacatcagttgagcacctgcatcaggtactcacagttgagcagctgtgacctgtggactactacaatggctgcagtggaagccaccacaatgaaaatatagtatcaggagggtgaaccttttggcggtgtgggctgcaagaaaccggagggggcattcgtgtgctcagtgtaggacacaaatgacactaagctgggttctgaaggatgtacaggagttggggagcagaagggagagtgcagaccctcctggtggagggagggtatgagcaagcggaggcatggatactatctcagctttagaccagtctggctgagggcctgatgtgtaggtaagagcctgggtgggagaaagagcaagagctttttgagttaaaccttcaatacaaaatgtattaaatatttttttatgaaaggcaaaataaattgagctttcatctgtggtgagccattgcaattttacaaggaaagaaacatgacgaaggccgtggtttaagatcagataggtgaactgaggagaatccagaggagagtccaattaggtcctgctagaaaggagaggccctgaacactgatgccgtgagagtagaggaggagaaaaccaagagataacctggtgcccctgctggaaattgcaggaaaggtggacacacacagatgtgaggtggtttttccctgttcatctctctttttagttatcccttccttctgcccttgctattatttacctactattccttacatgattctgccaagaattctgaaagctccccagaaaaaaacaaaacaaaaccctttctcttttatgtttttccccagaattcaaatgatggattttccaacttaaatcctttcttgaagaaggcaaagcataaataagtcagcagttaagtgttttaataaggcagttctgcttctgcctctgtgcatgtgtcaaatgaggttccccacttcagagccaacaaaaaaagacaatctgtcatgtagtttcacttgatccatccctgggttcaggccactcatcacgagattgttcaggtagccacatcagaaaagagaggattctgggctgaggaggtagccagtgttcgctgaataacaaaggcattacttgggtggactggtgctgtggactaaacagaaagaatggatggaaaaatatgagaccaggactgggttctgacccctgcaggacagcttttctggagagtggggtgtgggtggggtgggatgtgtggggggatgtccagttggaacagaattctgcagctggcactttggaggaaagcattttgaacattatggtttcagcagagcatgcaaaactgcgagctaacacggaagctaggagaacagggtacgagacacaaaaggaaaaagagaagaatgccagcatcaaggtttaaatatcacgtcggttatcaaaagaaaatcaagcatttttatcttctgcttgtggcttttattcttgtgtaaacgagttcacttacaaatttaaaaatcacgggcacctgggtggcgcagttggttaagcatctgccttcagctcaggtcatgatctatctcagggtcctaggattgagccctgcatcaggttccctgctcggcagggagtctgctctccccttccatctgtcccttccccccacttgtacacatccttcctctctcaaataaataaataaataaataaataaataaataatcttaaaaaaaaaattttttttttttaaatcatgcatccagaacctgcagcgtgctcggcctgcaggtatgtgcaggtctccatggctatgaagagcagtggagttgcactgcctggcctggaatcttgactctttcacctatcagatactggatgctgggcaaatcacactctccccctatcccccacactttagaaaaaaactgccacatttgctttatcacactccatctctatatacatattttcccttctgatccatttgaaagttgaagcgtgatgctccttcatgccataatatttcaggatgtttcctaagaacaagggcattctcttatataacgatggttcagtgatcaaattcaggacacctgacattgatgcaacacttttatctggttcatcatccatattccaattctgtcaattgtctcagtaataatccttataggaaaaaaaatattctgttggcctggcatcacccatggcatttatctatcgtacatctttctcctttcagctgggacaattcgccagcctttctttgtctttcaggcaccgatatttttgaagcacacctgccaacttaacctttcttttaaaagaatagataataatagtccctatttctgagggcagtgcgaggaaaaaatgaggtaatgcctggactgctctgaagttggggcccagaacactataaatatgagtgattcgcttttcttagtattattggtagtcaacagttgtagcaggcctccacctcacagactatgaggggaaagagtagaaccattcaggacaaccctggagacaggtgattctggggcaggcgaatgaggggtgctgtggccactggccagagtagacctgccagccagagggtcatggctgaggatgagcagcagctaccagagggaagtgggggctctccaggcacagggccagttaaagcacacgcccagggaagaggcaatgagataattctgggtggatcagtgttgctggtgtgaccaccgggctgtggctaggcatagaagtaacaaaggtgtggataactgccccatctgatcatgccaccggctctgacccagttgggtctgaccctgttggtggtccctgcggccaccaggcaccccagtcagctcggtggggatgaaactctgatccttgggtctctgccaaataagcagtcaactgtggcacctttcttactcaatgggttgtttgtctggaccttccccctctaccaccatctgaccaccttcccaaccgaggtcttaggaaaggcattcacacctgggatttgccctcctcacagctctgctgggctcccatcactgctgtcaggccagcaaaacaacgtttcttgatcaaacccccaatctgaccagttcctcgcccttagaaatcttgcccatgcaaattcccctcctgcttctcctttgacttctctaacagtgagaatttaccatgggtctactcagctcagctacctactataccctcaaaagggtgagcaggtgtcctcttccttccttttagtattaacgacacagcctcctagatatcttacatgatgcctgatgctccattgacaatccaagaaggaaccaaatgcctaacaataaccaatcaccaaaaaatcacccaacttcttatttgaggtcagaaggtgtctgtatgaggctgtaagcacagcttgatggaggtgatgagaaccacgcatgccaacttctagccacttgttactgccaaagggcagaacagccatggccaattctgggtcctgggcacatccaaccccaagttcagcaatgaaaacagtctcgtttaccacttaaaaaggtatcaatagaaatatctatctaattccagaaaccttgccacactcctacatcctacactttattcagactctggcacaaacgtttctgaattttgaaatatacagttttcctgatgaaatgtactgtgcacttttagaagtattcttatatacaagctttaaattacctgattttgcattcacacctaatgagattatggacattttaggactaatagcagctctgggtttgaaaaaaggcagcagtgggacattatgaaaaattcagctctgctccttaaatgtgaataaaatagatgttcaactgacatagtgtcctttatggctctatttttgctccttttgcatttcccctactcagttgtcagaaaatttctctttaccatattaaacttttatacatacaaatctacatcagggccgcaggcaatgatttccattttcaaaattgaattttgggtggtgactgcaattggtacacacagcggccctgattctagtcacacaaagggacgcataagcacttttggaaaagggtgttgcaaattgctttgctaattaaggtagagctggattcgggccaggaggatctatgaaaaaaggttttcacggctgggtaatgaacttctggagcctcttcccttcaattcaattgcaaatctatttcttgagcacctactatgcagactgctctgctaggggctgtgagaggacgtaaagactgggcctcggccttggagaaactggcaatcaagctgaagagacaaggaatgcacgcattaaaaaccgaacatggccctggggcagcgtgtgattgagtgctagagacacagaaaatcaggggtgggagtcaccaggcttgactaacagggcaggtatggcaggggtctggttccactgccgtgacagttcacagagtgagggggagccagagtaccacaccgaggagaggagtacagtggcaaggctggagctggatgtggctgggagaacccatgaaaaagcagaggacaaaggtgttttaggtaaagcagggtcttaagcgagccaaggagtgcttcgagggcatgggaaggcagcaagtcttggcaagccttgtgtgtttggggggatggtgtcttcagagcactatattctcaagggttaagaaccacttctatgctggccaatctgggaggcaaggagaggccagggcacatgctggggtgtggtgaggggcaaaacacaggctggcaccaaagatcagaggacagtgaaggcctcacaaacctgcctgccacttgtccaggaggcagaggcagacccagagagctctgtgcaaagtgcacacccactgaaagtgatcaataatttatccctctaggaggaagagcacgtacatctctaaacaagcacagaaactcacatcccttggtctaaacactaccttaactctctctggctccacctggaactcggggaagagaaaagatggagtcgtctgcattccctctcagaagactctcctcacaactcctgttttgcagtgggttcaatattatagctaaaaatagcatgatctatccttaggccatccttaggcccacatgtgggggtgggcactgctgagatggtatcaccgccgctggcacaggccaggcagttgtggggctagctccttgccacactgaggaaggccaaggaccagggctctgctggatgaccgagacaacaggattatatacaatcttcacatactcccccagagaactggaaacatcatttacatcactgcaaacccaagatacagttcaacttttttccaatgagattggtatgatttaaccctggctataatgcaagaattctctggctggtgcgcagtcaagaatctttcaggcggttgcttgtgcacctagggaactcattagaaggactagcccctttccctgtacttaagctaacaattagagttgttttgccaccttcccccacgttgtgattctatttattaaagctcctggtgctgcaggggacctgttttcttgaagaaactgtattcaaaggggggcaaaacccataaccattaactttcaaaataccgcacaaaaggacagagggtgtaagaggtgttaagtgtgttcctgcttcccaccatcacttccctcttggtgggttctgggtggaccgtgagactccccaaagggcaatctcaagtggaataaatgggaggcggtggtttttgtattctgctttcaagtctgaaagactgatttgctttctagggagtctggcccttctgcactggtgtcctacctgagagtcatctttcttcctatttgtactacgggaggtcgcggctggggcaaagaaaagcgggtgggtaaacacagggtgatatttgctttcagcaaaactgtcattggttcagaaaggtttgtacaggagggaaaaggagtagcttggggttcatggatcaagaggactttctagcaagaaaccacttggagaaatggcagctgaggaaagatctggcaccaaggaggcaacgccaaatcaggaccaggtgttgcttacttggcttgccacttactcccagcggaccctgagtaagctggtttcggtttctgattttgtttccttgtctgtaaaatgggagtaagtgatggccaacttactcagctgcactaaggattaatttaaatgagaatatgcatgcaaaagcatacggaacacgtgtgcagtgttactgttcagatgcaggaagccaagaggcggagagaactgcctgtccctctcctctacgggaacaaggaggctccccctctggtctggtctttctggcaactggcacaaccaagggcgagttccctaaccatcagccaactggtctaatgcctgctgcttgctgccagcttaatgaggagtccaccagaaccacctttctttctcaaggtttataaatgatccgggggtgtcagtgggagtgactcacagtgatgttctcaattctggcaagagggctgctccctctaaaaaatatcaccaagatttactaagcccagaagtattctcaggtgacattaggatgaggtaccatgacagtggtcctgagtaatgtgcttgctgccatcatgatatgttggtttgctctactagggatacattcatcagtggctccagaaccatcaacagagccaggacttgcatctaaaaccatgactcaaatctgtgtgggccttcaactgattagaactatttccccagctgatgacaaaggatgacaactccaaaagagaaagctctaccctcctttcctggatccccttacactaagtcaagtcacactctctcacctccccaagggcccaaccactgtcagcttttctgctggctgctttcaccacttgaatttcagtaaattaaattgcatgtctacctgactataaaatttcttgacggtaaggagcagactgtccctcttctagagttcctgaggttccccacacactcaagctctcaaattaattctcaccatcaggacacagaaatattccttctcactcttcactgcttctctccatctaatgctaccacacctgcaactacattcaaatgatttttgtctcatgagccataacagatcatttatttaatctattcatctagggacgcctgggtggctcagcggttgagcatctgcctttggctcagggcgtgattccagatctggggatcatgtccacatcaggctccctacagagggcctgcttctccctctatgtctctgcctctctgtgtctctcatgaatagataaatttaaaaatccttaaaaatctatccagatatttacggattgtcttttatgcaccaagaactatgctagactgggcaggggcgggggggtgggagataaacagcaccttctctactctcaggaggctcacactaaaaatatgtagggagcagtgccctacgaagtctagggtgtttgcagagctgggatgagatagaattcttgccttcaagatctttatatgttgggccagtgaagacccttgtaaaagatgtgttggccgagtgcccccaccaagctctaagccagacccttcatccatgccctccacccaatctggaatctggtttcactgatgccactgggcatgttctaactccttgagatgggctggcttggctctttgttgggctaagttgcaaaaccaaaccaaaccaaaccaaaccaaaccatgttcctgctttgttgtggccaagtctggcaaaaagtcctttcttcaggtcctgtgtttatcacatttcctatctctgacctcttgcctgagccccaggctcaaatatcccactgtctacttgacatttccacttgggaggtaagtccacttggcatcttgaatttaatgtctcacactgaattcaagatgttcttcccataccctacctgctcctcatctagtctttcccatctcagtaaacggcacctcctcccacctggttgctcaggccaaaaaaacatctggtgttattctttcttgccagaatagccttttctctagcctccttgtttctctccttgcccccataatccattcaccacccgcaaccaagatgatttttttaaaacaaataaattaggtcgcgttagtcttcacaaccccttcccggtggcttcttgctggccttatgataaaatccaactcctaaccagagcctagaagaccgcactgcgcctggctcttgtcctatgatttcaactcttagtaaacgaaaaaaccttcctttttgttccttatcaggccagtgtgcttcctacctaggacctctgggtggaatgcccttccgaccaagtatacagtcagctcgtcctcttccctcgcgtctcatctctgtgtcacctcctgagcgaggccttctctacctcaattagtactaccctttgatcatgctattctgctttgccagcacggtattgatctggactgacctatgtccacttgcttactgtgtcccagaggagaatgtaaacttcaacttcaggcgaacaggcgcttgtctgtctcccagcacctagcacagttcccagcactcggtgggtgctcagtgagtatgtgctgtgtatgaatgaggcccagagccgctgtagcaccaacctggaggagagcaagaacgcaggtcggctacgcacacagggacaggggctgaggtcccgaacctgccgcaccgggctcaccggggcgcagggagcacacacgggcttagctggggccctgcagaggtccttgaggtttagctcggtcactgcacaacactgccaggaaagcaccgtgtcggggaagctagaggcctgtgaccgtcgccacctgcgaccgctgtgcgtctcgacccaggctgcaccctgaatcatctggtgaaagttaaaaaatagagaccaaagccccgcccccaggggctctgattcccgaaggctgaatggttccggacatctagatttttaaagagcttcttcaggaattccaagggcagccagacgagagcgctgagtaacaaagctgggtcgccgccctccgcagttccggggcggggggtccgcgcgcacgtgcggccagggaggaaggcgcgcgcatgcgccgaccccgccgctctccgctcgtaggccccgcccgcgcctcgtccttcccgcccctcgccccaaccgccgccccgctgcgggcggaccccacagtccggtcacctgggtgttctctccctcccgaaaggcctgtgctacccgctgccgcaggtaagtgcccaagtcccggccccgtttgctctcgtccactggccattcctcacagagcttaaggaaacgccggtagcggctggccgccatcttgggccccgcctgcctccgcccctgagggaggagcccgcgcaataggtggcgcttgcgcgcttaggctctccggcttcctgaggaggcggggcgggagggaggaacgagcatgcgcgacttcgcgggcgctccggggctctccggatggcggcgctgttctcctgtctctgcggtggagctggttcagtgctcgtcctcgaactggccccgctcccaggggcgggtgagacgcggagcacccccagggacaggtttgcttctcttttcagtgactgcacagtctaaaaaaaacttcctccgagacctctgctgatttgcataaacgaatatatttgcatgtaaatgcagattgttattcgatgaagatgtgtgtggacttcatcccgtagcatgctcgagttgttgttcgcctccgctgctcccctctgcagctcctgtgcttgtcactacgacttggcactgctccgcagctctcgttcctctttccccagcccctgttggtacccctttcggagtcccccccccaaccccccatcgggcacgtgtccctgggaggcgcagatttgccagcttgagcaaagtcagctgggttgattcagcctgggaaacttgtttcacgaagtcttttcttatacatctccagctgcagcatcatgtggaatgtcatcatttttcttttcaagctacccccaccagttcccttaagaaatccgcagcccagctttgctgagccaggctcttgttttcactgtctgcatttagccaggaccatcccctgcatgcaacactcgcctcccccaggcctcttccttctcaccctccttctatataaaggtaaattcaggagactcttgccttcaaggggtagactgttgagtagtgaacacacaacccaaacacaggttcaaagtgacaggggctttgattgaagtgttaggcaatgctgcggagtttggaggaagaaatgctacttctggctgtcaggggagtaaggggagaaagatcagaggtggcttctggaggagatggcatttgggctgaaccttgaaggacggttagggtttgaataagtgggaacaagaggttgctgagcagcaagagccaggcctggggcaggaatgagagggaggggtttaatttgaggaaagatcagtgggtagttttaacaggaatgagtcagctttgaactgttctgaaggtcttaagagtaaagacctattgaatgagaacctctggggacctggggtgtgcactgcccacttgaggtaagtgagttcagggagggcctacctgaggctaggagagctcaggagtggaaaatgaagctttcacgggcacccccacctcattcccagtccagcagtacctcccagccctatcctcctcatcagctgtatttatagccacatagttttgatggctgccatgaggcctaaaggtcaaggattatatctgtttactgtcaagttctgggtgcctagggctgtgctgggtacctagaggtcttgtcattctgcctgaggcctgaccacagctgtgaagaccacctggctggctgacagagtccctaggaggcagggcctgaggtccctctgtcttcagtgagtggaagagtagcattaggtggcaacaaatagttttcactccgcttgaggcacaagtggattgagaggttgagaacaactagacagttgagttccagaacaactggaactccttctcaggctctcctttccctagcacaatgtcttctagaagggttgtggttgtccctggttcagactgccctgcccacctctctcacccgctggaggcttgtttgttttggtgattcagtagtgaggccttggcgtcttatagacccgagttggaatgtgggcttgctcattgattcattcattcattcattcattcattcagaactatctatgtaatctgtggaggcccaggatgaggtgaaaatataaaattccttgttaaaatattattaagaatttcaagacagggcgtctgggtggctcagtgggttaagtgtctgcctgggctcagatcatgatctcagggtcctgggattgcaccccacatcgggctccctgatcagtggggagcctgcttctccccccggcttgtgctcatgccctttctctctttctcaagtaaataaataaaatcttacaaaaaaaaaaaaagaaagaaagaaagaaagaatttcaagacagtaacagccaagcgttaaaccagtatggggcttttgggcactcagggctctgtgtgaccacacaggtcacacacccatgaagcagccctgggctcctcccccatggtagacgagacaggcgagggcctgatcctgtgagttttatatttaagtaggtggagatggacaacaactgaacagaactatgataacaataataatagtactttttttttaaagattttatttattgattcatgaaagacaccgagagagagagaggcagagacacaggcagaaggagaagcaggctccatgcagggagcccaacgcgggactcgatcccaggtctccaggatcataacctgggctgaaggcagcgccaaactgctgggccatcggggctgcccagaactatgataacaatactaatagtactttgtatgtgttaagtcgtttagcaagtgaacaagataagatttgaggcagggtgctgggtgcacagtgattggggccagggtgggtctgagtggtctaggggagggctgtgtatgagagagacctgagtggcttcctagcatgggggcagcagaagccttcagggcagccagctttgagtgggctatttaatctctctgagctttattttattttattttattttatttttttaaagattttatttatttattcatgagacacacacacacacacacacacacagaggcagagacacaggcagagggagaagcaggctccatgcagggagtctgatgtgggacttgatcctgggtctcaaggatcaggccctgggctgaaggcggcgctaaaccgctgggctatccaggcggccctaatctctctgaactttagttcttcatcttaaaatgggaattataatgataaagtaacccttctctgggtatttgctctgtgtttggcactgtcctaatgcctcatacagtagtggctcatttagtgttcatgatggctctcagagacaagtactgttattgttccaattgtacagaggtggagacagtacagagaggatgagaacttgccaaggtcaccagctggtaagtggcagaacctggacttgaaccctggctgactgagtccagagcctacacactcaccccctgtcaggaggccccttcggtgttatcatgaactgcatacatggtgtcttttgggacacgtgacaggttcccagggggctctagggccctccagccttgttttacctgtgacccccaccttctgatgcctgtgggtggtcagagccagagtctgggcccattggcttgtcagtcacccagcgccattctggacacattaataagccttgcctggaatgggacttggcagttccagtcctcagggagttatgaccattttaacacccacctgctgactgtcactcattccacagtgaatgcccctggctccttgaaaactccctcccagagctgtacctcccgacccatttggaatgggtatttgggctctatggaatcctggttgctttttatagaaacagacaccatgggaggggaggggaggggaggggaggggagaaagtaagcactgcttcagtttttcaaattataatgatcctggtaattgagacaccaaattgcacatttaaatcgcttgaaagtaaaaatatcgttttgtaatgctggtgttaataatgtaaacattaaaaacgaattaaacacttagctgtattgtggagcatagttgcctgatttttcttctttcaactctttcaactggaggaaacaattggctacaatacctagatatgttaccataaaaagtggtctggacttgcatggaagaggttagtcagttaatgcccctgcataaaggtgagccagaaggggcaggctggtggtatattgctgcctttctctggaggtgagctgctttttaagattcacaggtgttggggctcctgggtggctccagggtatgatcctggggtcccacatcgggctccctgcatggagcctgcttctccctctgcctgtgtctctgcctctctctctctctctctgtgtctctcatgaataaataaataaataaaatcttaaaaagaagactcacaggtatttaaggtgtgctggggtaggctagtggtgtcctaaagcacagcccagtgaatgtacccacagttccttggctctgtgggaaatctgtcatctgccctgggccctgcctcccttcactctgctctagttgaggtcacctcagagagaggccttccctggcccccatttcagggaataggcctgctactcttggtccctgcaaaacgctagtcactattggacagcaggccctggcagagagtcacctctcactaaatgaatctgaagagaaccggcaacatcagagtctggagctgggatatccccgcctacctgttcccacccagacacctgcccccatgagacactcctctctagaggtctgagggagaaaggtaggaggacacatcaggagcaagtggatctctagatttcttgcttggattagccgtttcagggcagcctagtcacagtagggagaagttctgaaatgaaattacattataatgaaaaggacctaacctggctgcaggtcagcctgcccagctggtgctcgacttggtactgtcccagagctgctttccctccctcccaccctccgtccctctagttcttggcacccatgccttcattttagttctttcctcatcttctgttttatgtttttggccactgtggatgcagatgtaaatcaaaagtcagaagcttagatcattttgcagagctgctgatgagtggtcttgccttgccatttgttttaggagactgcttcctgccctttccagcatgggctacaagactccatgcggcggggaagaatgatgggactgccagcgtgctgcccagaggcccagggcttcctgatgacatcgcgtcatggaaaagctataataacattctgctctttagcttcctcttcaatcacaccaggaacgccagagggaggagacaggtctgggtgactgtctcccaggccgtcctagtcctccctggtggggaggtcaggagcagattgctcctctatgtcacctgtctggaggaccaagtgaaagttcctggggggcagctggggtcgggagacgtgaagcaagtctaccagctccctgggctcatactcactgtgtgaggatgcagccgggcgaaggatctgcatcaggccactgctgacaggaggattatggaggttataacagatttgctggggtctcctcgaacctatttccttttctaggctcatagttaaagtacatctcagcctgctggcatctgagcccagggctagttcttgtgtctggaatgtgggtgtgccttttctgtgtctgacttttagaccttttggttgattgaggaaggtccctggatgactgtgtggagcagagaggctctctctctgctgactaaacctgattgtaatgttaagctactgttgtttggggattgtttgttataatggcccaccctgactaataattgtgcatttctcagtttagaaaagaagagactccccagtccagggaaggggaggccagccaggaggcgcttccagacaagagaagaggcgggaggtttggaggtccttgatggtcctcaagtgctgagttttcttcacttccatcttattctctcttggtgcctcttcacatcaacccctgtggccaacacctaccctgctatttcctgagcaaaatgcttgcttcctatccctgtgcttgttcataatacctgctttctttataacctctgagacttgcctccctttcagggcacagctcagacaccacctccatgaactccccacatggctgtgagttctccctgcctctcctctcctgataatagtctgcatggctgagcaaatggtccccaggccttgtttgaagcacccctgatattttcacatgatggtattcaccttttcattacgttataaggttcttaaggataacgacatgatcttcacacacttccttgtttctggcacaggtctcagcactgtgccgtatataccaggcactggggaaatatttattggttggatgaatggaaggaaaggacagaataatgtaatcataaatgaatgagctactcagccagatttttaagtgtctccactatctgggctcactccatttctttcctcttcattctactactcccaactacaaaatccccattctggatgggttggtctgttcagactcatgagcatgctggacttttccttctctccactcagctccttccccattcttatcaccattcagggcctaaatgaagtcccaccctctccaacagtttctgtgatttgtgtttctgtgttagctgtgagctgacctctgtgaactttaggattgatcatctgcaccacacagatgaatcctctgtatcactgggtaccttctttgtgcggtttgttgttagttcacacgtgttattcttgcctcctagaatactagaatctatgctcccaagagctggatcttcttcagtgcttagcaaaaacagggaagagctccttagttcagtgtactcttaatggttactggatactccgggccccctcacctcttttgccattttaaagtaaactgccattggatatcaaatgcattcatgctgacgatcttctcttcttcccgtatctctctgatcttctccttatgcctggattttcagtgctcaagtggactctttcagctgggttagcaaagccttgtacacatttctagacagtggtgactcctctgagcccagactcctctgagtctgggaagcacagtctaaaactggtagccagctttgccccttgcaacaaactccacctttgttggtgacatcttcaggggtatgtgggatttggtctgggcctcgagggcttggcagagggggaaggcctcctgtgaagggcactgttggataaaggactggctgagggaaaaagggtcacgtggacaggagccaggagagtgacatgcatggccagccctgaaagactaatattctagctaaccgcccccactccccatcttcaggcaggtcccacaatacccagggctgagaacagggacaggaatcagaagctaaggcagggagctccagatttgattgaaccagatttttaagcaaggaatcgccctagaaaaggcagtatttagggctccattttgtctttaacaaatatttagtttttggttgacttctttttgccacccaacatactttgtctcagttctcccatcatgagtgcagagcatgcaaattaatcacaatgttacctcagccacacatacttaaggaagttaataacttgctttgaaatccatataatatatcctaaaattaaacaaacaaaattttttaatccaagccactctttccttaagtgtggattttggaaggttgatggtaattagccacgagaatacaaaaattatttaactctatgttatagaaagttcagataaaaggaccacttatgaggtctggtacctgccttgtagatacatggaaatacttgattagctaccgttttccacccaggatccccaaaggattgtaggaaatcagtgaactgttctttctttcttttttttttttttccagggaactgttcttgctgtacacactagtcgcccataaattggaactgccatacagtgtggtgatcagaataaacaaacagaaagggtaataaggcacaccaaataattactggtgacctcagcaattttattaacaaatttatttccctaattgggtaacgtatcttcatgctcgactcaagggcattgtaatgggtttccacactgcagaagaactaattaattaggactgtttgctcttccgtatttacacttgtccaccagtcttgtaaacattacacctggtttcctcggccctccagccttctctctcctgattcccccaccctacccccaaaataaataaatagaaagcaaatagtataatttaacatcagtagctcatcctttcgtgcagtccacccccactggaagctgcatttcatggttagagccattttgtggccaggatctagtcaagttatcgctcccaataggtacttggaagtctagaaagagacccttgtctccatgggcaaaaatggagaacctggggtctcgatttgccagggctgtgtctggattgcccttgcccattcagaccctgggtaggaagctggtgagatgggcagatctgccccactccttcctgccccacccaaatgcctcttgggaaggtaggagacagtcattcgtgagctccagaaaaatcatacacttgtgaactcactgttcaggtcttcttcaagtagagttttttgcctcatagcttgccaagacttcagtgtgacaacaaaaaagcatttttggggcagccctggtggctcagcagtttagcactgccttcagtctggggcctgatcctgggggcccaggatcgagtcccatattgggctccctgcatggagcctgcttctccctctgcctgtgtctctgcctctctctctctcattgtgtctctcatgaataaataaataaaattaaaaaaaaatttttcaacgcaaattctccagaatcttactgtaatgctggcttctctctcatgccgcagccctccaatgtactgcaaaatggtgccatttcacactgactgtccagtctccaatgaccagcattagtataagatgccagcatacgtggaattccctccagagctagtttctttagcagccagtaatatacctgccatgtatggcttttgaatgtggatataattattacaaagacatctaacagtttctagagtaccctggctggcagtaggtcccttttgagatctagactccaaaaaaatgtggataggcccaacaagcctcattctccctcttgaatatcctgtaggatctggatgaggttttctaggccaaaaatatagcccggatctggtccgtcataagtggtgtgttcgttccaggagcctttgtatgttgtgtgagcaaagtcgatcatccggatgtcaactttggtgagacctccggcagagatgccatgggtcgtctgcggagcctcctgagaatgcagacctcctggggtcctttctggcagctcctgcccatcatagatgatgaggagagagctggagtagaaccgatatgaactctggctcctaatgaccgagaggagggcccggagctggtgctggatgggctccaggagctctgtccggaggcgggttccgtcatgcaggaactgatggagtgcttgtcggaacccctcaacggagagttttcttccgtaatacttgtctttgcagagaaagtgcttcttatcaacttgataaaccttataataaaaaaaaatgtgaagaattgccaacttaagaacagacttggaactgctatggttgcagtgtcagaaactaataggatatataaacagttttctgggagatgcagggcaagcatggctgaaatgaatggaaggatgatctttcatcaagcaccaggggatctttcacatttcaaaatgctttctgtgcaagcttttaataggaatccagggtctaaatattcttcaccccacaaaggtgatcctccacccaggaggaaaagctttggatcacctttcttgtgaatttccagtgtcatcctccaaatcatgatttaaaccctggcttctggccctcttcaattcaaatattagcaaacccaagctagaaagcttcagtaggaatctgaaatcacagccaatggccttggaaagccaactagattcaaatttccctaattaagtttataaagtcctttctctgcagattctaaggaaacaatcatggctcctgaggtaaagcagggttgactgaagataaaaagatcaaaagacgggctggatcaggtatgggtggggttttcaggcagccagctcagctgaggggagcctcacagcagccctgggaactggtggctcctccttggcaccagcacctcctctcccctgtcatgtcttggccaccagaaaggaacagatggaggagatgctgatggggggtggggggacagtggcacccgctcccatttcattcagatggcagaggcagaggctgtaccaaggccagtggctagcatggccgtgacttggcacacctctacctggcacacctgggaagggcagcccacacctggccaagatagtttctcaggtctttcctaccttcagattatgtggtatgtttatgggaagccagtgctgaaaaaatcagaaagatatgatagacttgctttggagggctgaagatgggctgctaaattagctgtcataaatacatgacaggtgtcattgtctaaataaatcagatcattttcagaagattggaggtccagagagagattccatttacaccccaaatcatcacactccattctcttgaggactgcattccaaaccttccaagggacatctgtgcaacaaatttatagactccacttccagcttcaagggtggcagtttcaattaaggaaagctttaacgtgtaccgtcaaattggtgtctggttttgctttggggagatagactgcaaaatcaaacgagtggggaaagtttatttcttccctttcctatagcccctgccacaggccacatcagagctgcaaaactggggtagagtctgggcagtaaaaaattaactttcctttgcctcagcaggctacgatctgcttaattcattaaccagaacaggtagcagacaacaacaacaacaacaacaacaaaaacccagaaaaggtggagtaggaagaaggaatggcttctaagaattcaaaaagcagagtgctgtacagcactggagaaggagagggttcagctttatccttcaagagactgagaaagtcacggagtgcacagggaagctctttttcacgtctctccccagcccctgctcacacactgtcatcagaggtctgctgtcaatatggacaggacccatgtggccactgggaaatttaagctgccagagaccctgagacagagtttaaaaaaaaaaaaaaagtgactttttggcagcactttcctgaaaggggctcttatagaaatcccagtatatcctagggtagatagcgtttcctgcctgggcaggctgtgcccagctgcctcctgtgtggctctgtacacagaggtgtttgggagacacgctcatcgccccacagtggacatgccaggatgcccagccctgcacctacctgcatgccacagatgcgcacgcccaagcaggccgaggtgctctgcgcacacttcctcatgtggcgggccttcttctcctcagacacatcatccccgtgctgccgggtccccatcttcaggtctaggatacaggggtgcttatattgtgacacgacgttttccagcagcagaaaccctggtcatgccaagttcaggaaggctccgccgacatgaaggccactgcccctacggaggcagttagcatgccttggcggatgcctgggaacacaaagctagctattccttctctttcggctccttacagacaagcccatcgtccctcttaagaattccaagtattagctttgcaggctgctttaataagtccatttatttaaaaaaaaaaaaagtccatttatttaggggagtttatgactatgtgagctttctttttcctttttgctctgaggttgaaatctaaatgcaggcgtgaaatccctggcagaccatgcccaatttacattttatggcagaaaatcataaggctaaaaccttgagtcactgaacgggccagtaccttttgggagaagtaggttgatgttagctttggagatgagttgcaggaatattaatttcagcggagtaattatcctgcaaaagcttcttagggattagggctgcagatgtgtcttagtaaatactgtgaaaccagtcacccgtcttgcaggaaggagcccagcgctgacaaagggggcgtttcaagcctgcatgtactcagaacatggcagcctgaggatgagggaggaatgtctccctcacgggcacttccctgatgggggaaccacccccctcactccgtcagatccataggaagacatcttcagggagaatttggagggataaaagggaggctggggtgtggggaaccgacccatccccctgagcctcccactgcccccacccagcatggcagtcatcattcctatctgcacacacagacctcccagcccagccccctctgctcaggtggcagtgacacagccagtggcctgaccatgggcactgtgttcagctcaatttccagtctgacttccccacactctctaatttttcttttggagagatcagatttcttctaggtcctaggtttgagggcttgtgccttgaagtgtccctcacatcagtctccccacacttccccctcccctggccctgtgtataccccgtctgtctgtctccaccacccgccttcaatcctcccaccctttgataggtggtaggagtgtgagcaaggatacggtgccgcttgttctctgggtactcggtgcacaggcgggtcaggtgggcctgatggcactgcaggccccacgggttaaagctcctcctctcagactggttccctttagcatcttccaccagcgaggagacttgggcattgagttggaactcggacctcaggagcgtcgtggccgggctatgggagacagaagcgaatgataggccagcaatggccagaggactggggaagggtgcccatctctgtgactgggctctccagggttgggccctgacacggactgtccctgcctactctccaggatgcctgcagggcctctgtatgcccctcctgccccattcaggccctgggcaccagatcagtccacactgcagccctggcatggcgtctctcagaaccccagaagaactcattaggaaacgtcatctcctccttagagggctgaggtggtttaaattcacttgtaagtgacctggattactattgtgctattgaggcgacacagcgtggagagagcaaccctccctagaatcagaagactgggggtttaggctgtgagtgtgccatgtcattgttcccttgagacctcaaagtgtcctcaggggtgggaatcctggatccttggtccaccctctctcctgtcctctgcatcttggctttcccatctgtgaaatggagataatctgtacccacttcctgacgctgagccaagaggcttaattagatccgctgagctccttggggaagggaggtactttcattgtattagctcccttttgttttccagaaatgttttataagttcccaggggtccttttcatctgagaaaggtcagctaacattatcagaggttttggagacctctctgggatctcgggtgccttgagctgcctgtgtctctaaggtcccaggggggacttcactgacctctccttttcccttcctgattgctagggaaaggtgatttctgactgccattagccacttttcctttgtgtcaagtcttctgggtttctgcgttgcccccaccctcacaccccaccagagacacttcctggtctcggtgaaacaggtatttaattaaacaaatatgtactgaatgcctgctctacataggactctgtacatgcagcagcttctgaggtaaatacatcagtcctccctctaaaaccacaggaaagaaaatccattccttttctgggtcccattgcacttctagacagagacttcatgtgaatctctcactcccttgtccctactggggagccgttagctttggcgcaggtgggagtggtactggtccctgctggatttctgccatcctgccacatggccctcacctctcctcgagcgagtgtgccagctgccactgggtgagggagtgggcgccaccactgccgctggtggtctgctggagagtctgccatagtgccactgccgccgactccgtggagaccttgaagggcccccggttctccttcagcgggttggccaccaggctgagatggcctcggttgtctttttggaggtgcaccgtgatggtgcctgcagagcacacgagggaggaagggagggggaaaccagatggaatttacctggtggatgtgttgcaagaggtgacatccttttgaattgtagtttaatgtaatgtcactgatcaacccccccaccccttccctaactcttctctcaaggaagagttatggggactgttccagaatgagcccagggccatggaacctgcagaaaatagccttgggctgatctgggcacaggctgcgcttcattgcatctctctgccctttcatgctttggacaaagtcagtcccatacattttgttctcactttctggctcctcagtagtggtaccttccccgtcaaaacagagctgtttccacggggcacaacctggcgtcattggagctggtcctctgtagagaggacccctctgcctcagggtggctgtgagggaagttggggcccatcccattcctccccgttgcctccttcatcatcctttctctcccttccctttccctctctcttcttccaggaagcccacctcagacagccttccaggacctgtgtcaccttcatttagacccccacccctacccctggtctctggctttaacacagatgcctgccatctccttcagctagacacacagcatgtgaatattattaatggaacatggttctttgataggaaacaggagacttgtaggatttctccagctacggtaactcctgactgttggtgtttgtaatggagacacaacagcctgcttcattcgctgcttgtgagagtcagagtgcaagggaacccagtggacaaatgtgctaattgggcttctcctccgggacattggccaggtcacgtaattaggtctggcacgaatgccaatgactccgtggccacccactttggatttcttgctctggtggcacagtctaggagttcccttgtggagtaggcttagcatcagagctaagtgggtgcctggcctcacccaagttctggtggagtcggagttatactcttgctggtggcatgggagacagccacacagatggctttgcaaggactggatctctagacttcttcctgcagctgatgccatgactgttctattggctccttctctcaccaagctaccctccacctgtccccacctttctctgtgcctgcgaggctgaccctgtggagtgtaccagtggcttccttgcccctggtttcccaggggtttggccagtgaaggacattggcaggagatggggtgggcaggagaaaggtagaggtatttatcctactggttcccttggtgctgcagcatgatcctttcctctagggcccccctcttgctgggtcagtaataccgttccctctctgtggccttcgggcctaggggtggtcacagcctttcagtgctgctggcccctctgtgcctcatcagcccccccttgtcctcttaatcctgcatgcactcctatgagccgtccctttgaaaattctcctcatttaaacccctttcaatataccactcattttctgctggcactctgactgagagaagggggggctgcacgtgatcatgtcctctcaagtatttatttcctcccccggccacttggtcactttcctggacatgtggtaatttctgctgcaccagcactcagggcatctgattttcctgcttgtgtccctgccctggctggtcagtgcagacgcttgctttcagggctgctctataattcagcaagtcactcctcaggccatctgtgcctagctcagcggtctctccggtctagtcctgtcatctcagattcctggtgccctaaatttgcagcccaagagtgacattcagttctctctagctccttaaaaagaattctgcttttccttagctcatgtcaggcccctgagtcttgtgaattaataatgatactactaataataccatacgtgaacctggcattttgcggtttccctgaacactggcatgcatccccaggtggagcccaccagaggtgttccgctcatgagaacaggggactgatggcaggtcagagaaagaaccatggtggtagtaatcagtgccaggtgtctgcttctgtgcttttcgtttgttactacctagttctagcaggcctgtgatgcccttgtctgtggtcactgggactcagagagatggaataaggtgcctaaggtcacacagtaggggtggagctcttgagaaggccatgctccacgtgggtatggaagaagggagaagctgtaacacagagctgaggtctttagccttttatcgggagagcagtgtcgtcatgctgtgtttacttgtgggtaggtgaggaacactcctgctgtgtccctatcagatttgttttggccagtctgttccgtgagagtgaacagagaaaccatgatcccagtaccttagagggtcatcagtccagagggctgggagtgccaagaggccccaggacatggtgtttatgtttccattcctagttcctcggcttggagggttgctgtgcttattccctggagagggcctgacccggaagccagcaccaggtcccagagccgacccctccacagtggggaaaggagagcgctctggcttctgtgcttgtccttggggagcttggagcctcccagctgcctggggagcccaggatgtgtgccagacaagggcaaggcccttttgggtcttgtaaaggtcagctcaccatctggtcttccccgcggtgggactatggtatcactcttgccagaaaccactgtctcggggagcccccggcctcaggaggcctccctggaaggacaagaaatgtgaccttcacccacttctctaggctccagctcttgtctgatctcatcagatctgagtgtctaaataaatggaggtgagcagagttgcaaaatagccccaataaaatccaagtcatttctactcctcatattgtcagagctacccagccagactccatggccctgcctccttgcttcgcctttctgcacgcctgtggctctgtgtctctgcctgtccatcttccttgcgtttcccacagccatctccatctcagcccagaccttcctctgaagcccgagacctgtagcagatagctgccttgcagacgacttcaagttgccagcaattcaccaaagcagcatatcagtgggatcaagactccttggggcttggattggtttttggtcaggagtcatgtcggtcctggcccggcttctggcttgctttgtatttccatgggggctgggcctgcagggatgtgggctcccggcactgtgcggcccccgcctgttgagccttgtgagccggtcaccagcccccaggctccccaacctgcagtcttgccagctgagcgcacaggaatgcttacaggcaaaagtgtcgcccagagcatctcagcagtttcgggttggccaagcagcttccctagcctccaggaatgttctgtcctgtacgcatgtatgtatgtatgtatatattattttttttaatttatttttttattggagtgcaatttgctaacatatagcataacacccagtgctcatcccatcaagtgcccccctcagtgcccatcacccagtcaccccaaccctccgcccacctccctttccactaccctttgttcatttcccagttttaggtatctctcatgttttgtcaccctcactgatattttcactcattttctctccttcccctttattccctttcactaattcttatattccccaaatgaatgagaccatataatgtttgtccttctccaattgacttacttcactcagcataataccctccagttccacccacgtcaaagcaaatggtgggtatttgtcgttcttaatggctgagtaatattccattgtatacataaaccacatcatctttatccattcatctttcgatgggcaccgaggctccttccacagtttggctattgtggacattgctgctagaaacattgggatgcaggtgttccggcgtttaactgcatctgtatctttggggtaaatccccagaagtgcaattgctgggttgtagggcaggtctgtttttaactctttgaggaacctccacaccgttttccagagtggctgcaccagttcacattcccaccaacagtgcaagagggttcccctttctccgcatcctctccaacatttgtggtttccagctttgttaattttccccattctcactggtgtgaggtgggatctcattgtggttttgatttgtatttccctgatggcaagtgatgcggagcattttctcatgtgcttgttggccatgtctatgtcttctttggtgaaatttctgttcatgtattttgcccatttcatgattggattgtttgtttctttgctgttgagtttaataagttcttttttttttttttgagtttaataagttctttatagatcttagatactagccctttatctgagaggtcatttgcaaataccttatcccattttgtagattgtcttttagttttgttgactgtttcttttgctgtgcagaaactttttatcttgatgaagtcccgataattcatttttgcttttgtttctcttgccttcatgatgtatcttgcaagaagttgctgtggccaagttcaaaaagggtgttgcctgtgttctcctctaggattttgatggaatcttgtgtcacatttagatttttcatccactgtatttatttttaagctcgtgagagcatctgttcgccggtgtctatagtatgagtctggcttatctgttcaccagacagacttaggagtatgtccttgcatgtccaaagctgacaggtacgctgggaggcagagggatgcagccctgagatgccgttgtgccgaggagcccagcaaaaggcccgggcgtgctcttggcatggggaggctaccctttggagtgacgtccatgccctacattcccgggtgccatcagagcagggcagtgagaagggagaggctgtgctccatggcatacagtgccactacagaaactgcccctctctctagggcccttcccatgggggagaaaaagggaggccccctgtggcagtccccctgacctgaggtcaccaattgagtgactgggcaaatcacatcccctccttcattgggctagatgacccctgagccccggcatccgaggagcccgtctcctgggtaacagtggctggtagagcaggccttgatggccacaagcctacccttgggagccagacctcgaagctctgaatcccacctctgcctctcactggctgcatggcctcaggcaagtcctgtcacctctctgggcctccgtctcctcacctgtgaaatggggatcgtagtagtacctgcctcagagtgttgttgtgaggattgagttgatagtggaaaccatttacagtgtgttctgcactgagtgagcaccgacggttagctgatcccacttttcttatctggtgaaacgagaacctgcgcagcctgagagccctgggagggaccttttcccacctaaaacctgacctcagccacctgcttcaggcatctgagagtgtgagggctctggttctgggcctttctctactgtctccctagatgtgtgtttcattacgtggtgcctggccaacggcaccctgcagatcacgttctggctgctgagtgaatccacgtttctgcaccatggaaacctcatgtttgggagtcactcgagtccgtggaccctgcctcaccctcagcagggctatgtggtctcacctgaggggtgtcctgtggttcccgacccagccccctcccggctcgtgtggaaacaccatcccccaggtgaagccccaggacagaagttgaagcatgttctgtgaccgctgatacgtgcagctgtgatgccttggcttcaattaatctatcaaattagcaggaggtaccagagatgagcccgacctggattgggaggcagagtatagagtaggggtctagacaggagaccagtgcctgagggtgcccgagagtggggctgcactacaccccccaccgtggaggaatgggcacgtgtagacaggacacagggaaggcatcaggatggggtcctggagactaagcagcctcttacatttcccttctttgcctgtgactgccctggcggtctgtctcagctccagagctgtgtccaacaagcgtgaaatgctgcgggcaggagccaccccacgcaagatcctgccacccttttactaggttgagttcggttgtgaaaggacagacgttcattccagtgggcgctctgacaggatgggcagtgacccacagctgatgggcaacactggcctgcggctccagagaccccaggggaggtatgcacagactgcacaccagccgtctgcccctccctctctgtgtgtggtgctcatatacatctatcttgcctcagactctcggaaggtcttggcaagccaggactgaagcagtgcctggggctcaaggcatataaatgaatgaatgaatctcactctgggacatgctgaatacagattcctaggccctgatcccaggggttctggtgcacagatctgcaagggagcctgggaatatgcattttaaacccccccctctcccccccaatcagccttggtcaatcccagcacatactctgagaaacactcatagggctaggccgtgtccttcccggttatcttgatcattgaaatgcaagtgagtttttgactgacttatttggatttcctcatcactttttttgcagatacttagatgacgagcacagaagcttatagtcataacagttaaaaacctttgaaagaggtcttttctctgggcactcatcatcctgttgaggggctggtggctggcagagtcatgccctgaaggctgagtgtggacaaaaagcctggcccatggacgctggccagctgcccagagtgcccctgcctggaggtccacaaatggtggccctccccacccagccttcactcccctgaacccaccttggactcagatccagaacagacactgctctctgcctcattgcccccattttacctggaaggcagcccatggccctggcttggccactatatgaggatgttcccatcccagtttcctcaacatcaggaacatcagttcccatcagtttcctcatcaggtcccagctccttcatgccctgacccaggcctgaggttcctgccacccacttgggtccccagagggagctgaaggaggcctcagcctgccatgtctttcccagccctggtcacaggacccagccgtggcacttccgaagcacagggtggggttggggtgtcattttagtccattctcagttcctcaaagcctggtggcttgagctaatttgtagggatgccaagtggcattagactctgggcctggaggcttgaagagttcagagaaactaggacagggaaggccaactggtctgtgggagaggggcatatctccatggcaactcttacacacgccacagtgcctggggaagcagtgggtgcgtgcacacgagcccagcccagtatggcaggcgcagagccacgtctggctgcctggacactcacctttgtactgtggagtgaatcgcttcatggccagaggcagggattcgtagaacctctgctcctggaagatgaggggcttgcataccgtgtgctcatcgtacttcatcacgctcagatgccctccgacctggtgcaggaagggctctagccgcacgcccactctggcatccccagcatccgtgctgtcctgcacaaccatgtatctatccacaggaagaaggtctggggtagaagaggcagttcccggacaggaggcaaggccgtcagtggtcctcagctttctccttcttggcctttgtcactgtcatagcacagctgtccttctgtctgtgggcccctggaaagcagaggaggaaggtggaaatggtgtgagggagatggtgtactgagaggaacagaaggacccacagttcccagccacgacccaccagtagttgaacgagactcgaaagaggcatctgtcacttctagaataatctgtcctaggaaactggtaaccatgattgcctccaggaagccaggatgagaggtagacttctctaaatactgttctctgccctttgaatttaaatattaaaacattttttaaaaaaaatcaagcagtacacataaccgtaggcatccagagtacacaggttgtcttaactcctcatgttgtgtttcctgcctgccttagggagtattggtcacaggcccaagaagagagcagagtccctgctatccaggcactcagcctcttgcaagggcttagggggtacaggaaagcttcatttttgtacagcacagctgtgcacgtcaatctacatcatggcttcacgacagaattgctgtgtaactttgagaagtgaccaaacctctgcgcctctgtttccccatctgtagaatgaaataataaggatacttcatggacttaggacaaaattaagataaagactgtgaaaaggttagctgagggcccagagctaagtactccataaatgtaatttatcattgttatttctagcattattgccatggtagttatatcttcccaacagctctgggttgaaaggaaggcagactttctcactgccgctttgcacacgagagaagcaaggtctgaaatgccttgaccaggccctggtgcgggccaggagcgaggcaggaggaaagtggaggctgcttgtctctgggccttattctctgctacctgccagagctccccctcctccctaagggcaggcttgctggaacttggggctggaaatgcagcgccgaaagacatcctgactttgtctcaggagagtgccaaggagacagtgtgaggggaggctcttctggccacatttgtcctgtcctgtttgagaggacattcctacaggggtgcccatcactgccgagttattaatactctctcctctgttggactcccagccaaggatgcctccaagctaggcagcactggacatgattaatgccctgaatgaccttcagttcagaccgtcggcatggccagctggctccatgcatggagtgcctatcaatttgttcaggaccccagctcagagagcttcctgccacccacctgtacctctggcaccaggtggcgctgaaaacctcagcctggcccatttattaccccctcaccccctaggggtgtctctctctttctctctctctttctcacattagctactgtcttttgggccacagagtgcctgcccctttaggaagggagaggtgttttgcctggtatgtgcatttgctttgctggatgtaggatgaggcttctaagagctgcctgtatggctggagcatgatgggggaggttagggttgctgggccaggtattaggggttcagggagcctgaggcctgatggtaaggggctgtgctgacaccacagcctaggcctaccctgggtctgctctcagactgtaaagaaggagccccactcgagcctgttccatgagctgagaagccagtaggaggcatctcgatgcagatgcaaatcagaaattggctcagggataagttgatatatgacaagatagcacaactgcttggcaaacccagccctacttgcaaatttggtgaaggcaagaaagaagaaagaagagaaaaccaaggtggcccaacaccaaccaaccaggcctggccttgccaaggcagcccagctgtgccgatgtgtccaggtggtatcccaggcgagccctcatgctcccatgccagcagcccaccaccctccctccccacactcctctctccctaaggagcccttaggagatcagtgtcaccttgcagtggtggtgtgggagaggaaatagcaataattggtaataaagtcagagagcttgctgggtgccaggcaatgttctaggtgtgttgtatagatcaactcctttaaccttcacaactaccccatgaggtagtattatcagcctgtttcagagattgggaaaacgagaggttaaataacttgcctactgcctcccgccagtaaggagggagcagggatttgaacccagacacttgtgccccatagcacacttacccaccatgcagcaggggggttgagggctactgtgtattcactttgaaagtcagaaaattgaccccaaggagactggaacttggccaaagtcacctgtaagtcactggctctgctgggacaggacacaggtttcctttcccccaggcctgcctcttctccaacctgatggagtaagtgcatgtcccagtggtgggtgggctccgcacctctatagaaaccatcgtggcaggtcaatgcagggctggggcttggtgttgacttttttgggactctttggctaggggtttcaacaagacccaagaggcactgtcattcccagatgttctcaggagccctgcctgaaccttcttagagagcagagagcaagccaggggcatccaagcagcccatggcacaacagtgcaaacttagggtgagttgatagtgatggggtatctgttgggtagtcagcctatacttctaaaactctagatttggggcacctgcctggctcagtcaatagagcatgtgactcgatcttgggattgtgtgtttgagcctcgtgttagacatagagcttattttttaaaaaatgttaaaaaaaaatctagactcaacaggtagggaaactggggctcttcctctcacgcgtcatctgaaggtataggtgaagcgatatctgagggtcctcctactcctgagctgtatggtttgtggttctgacacaggttggtgggaagggtagaggaggattagggcggtggcctcagcccctgagctaggcaggtgggtttgctgctgctcagggaggcactctgtggcttcccattggcactaatgctgaccttccattcccgaggaagcttgaggttgttctctgtcaccatctttgttgtgcaacctcccattctctggaatgagttagggaagacctccattcttcccagtcctccctcagaagtcccaagtaaataattcaagctgacaggtctttctcaacccagaccttccctttgctacatgcaggtacgtctgttatatgcatgggccgtggcctttgatcagtgctctgtttcctcagagcactgtgcagggagtcaggagcccagatctgttgcaggcattcccactagcctcatgaggcccctaggatgaactcctaatgttcatctgagtcttgatttcccacccactgccatagccttgtcatgatactcagatgacaaaatgcacagaattcctttgtgaagtcctcttcccaagtgtctctgccaccgaggcttgtcactgcgtgggttattctcaggactgactcagctagggtgctgggaggcaggtgaggcacccgcttgagacaggaccttccgctccctctgacacactcactgagtacactgggctcccttcagtgtgtcagagggagacaaatgtcctttctccagcccacacttccccctgtagccccacagccggcccctcacccagcatcccaccctagtgttcttggggagggagaaataggagacagggagggagggtgggcagggagggagatgccccaagccagaagagttcagctgagagccccctccccaggagtagtgaacaaatgacctcaggtccctgtgtcctcttctgtcactgggttgtgtcctgaatgaaaaactctgggctcactccaggagactcaagggctaaaatccctgatgggccccactgtccagctggtgattaaatgagcccctcctcccccgccccgccgtggggctgcctcggtcattgcagccccttgggacctgagtgacagccagcctgccacagggttgcaggacactccctagactgaaaggagggtcatggacagcagggcctgggtttgtatttggcttccagagtggggacagatgacaataccagtgatgccagacacagggacagaggccaccagcaggctgaggggaatgagtgcctcgtggctcatcactaccagttggcacattttatttcctgagagtctgtgtatataatctctgctgcatgctaaacccgggttcattaaaaattacagaagctctgcccctttttaagcctgccgttcccattgtagggaagatggcaggcaagaccacaaatcaaacttgtaccagttcaaacttagacgaaattcgtcatgaactgtatcttatgagagcctgtcagctccttatatctggagacaagctggctgactgtggtcattgtcagcgctgttcacaaatagtctgtttttttcctgtgggaatgtggtatgattgcgcttcccttgccctttgaaggtaagtgcagccacgtgatttgcttctgccgacatgatgtgcatggtagtgacagatgtcatttccagtgggaactttaagggcaagtcattgcccatgtcctctctctctggcccatctcagaagcaccatcactccctgagtgactgactatacatgttggatatgtagcctgacagagaaatacatctctgtgctagtaggcccctgtgatttgggggtggtttgttatgcagcacagcctcatgcttcctgaccagtgcaccagctcacagccagattcctatcatggagccaggaagtggaaagtgacctcacttgaaccaggcagtcagatacttcatgcccaaatatatcctatataatagtagattctcctatgaagcatctcctgtggatcactggctttatagtcactatcaccatttctgaagagaatcactctcaggtggggaacctgagggtctgagacgttgaagaccttgtgcacagttagaggagctactgagcactctagctgggattcaagactgtctactctaaaggcctcagggctgggatcctgtctgaggccctcttcatgctgtgtgcctcagtggcctacatcagacatgagagccttccaggagctcatacccagctgggcagtgcactgctggtggagggtctgatggggtgctcggcactgtggatttgcagggccaggggcaaagggctgctgcctgagggacggtctagagcctcccaaagccacaccgccacaagcatcatctttagaccagaacagttatactcttggagcatgataacctctcaaatgtatatgaacactttggagattaccaaaatacagattcatttaaaggcactatttgagttcctagtagtttttatcatcattttctcaatcagtggatactaaaagtataatgattatcgcaggaggactcgtagggaacaaattatgttgaaatggagtcctagttgaaaaggtttaggagaggtactgctgtcatctgtgacaggcatggtgtcacacttccaggatagggtctgagcagggggagatgccagctgtgcctgtgtctgggggaggctgaaaagggcctgtctcaggagaagaggggacgcaggaagcaatagggaagtggccagggctggccaggagaccagagggagggctgtgagtggcagtaaccctggcttgctttacttgctggcctagaggggtggagagaaggcctggccacccagcccaggggagcgcctgtctggtcctgctcaggccaaggaggagggggttgcctgagaaggtgaggtgaggaagccttcaggattgcattccaataaatctggcggggcaggaagtgttttgggaagagataattaagaaacagcttggggcagccccggtggcggtggcgcagcggtttagcaccgcctgcagcccggggtgtgatcctggagaccggggatggagtcccacaccagactccctgcatggagcctgcttctccctctgcctgtgtctctgcctctctcttcactttctctgaatgaataaataaataaatctttaaaaagaaagaaagaaacagcttgtatcaaaagaagactgcagtataagatgtgtcaggctgcagattcaaaagcagcatggtttatggcctgccctctctactctgaagctctactgtacatttcgtaggcctgctggagccagagatttgatacaagtacctttcaatgtctttgtgatgcccaagggagcattttttaatctattagagaagagaggacctgaaaaccatttaaaactgcttaggttgtaatgggcaagaggattttgagtttctcatgtggcagagggttgtgtatcatctggggccatccaggctgggaaagcacaagattattttctgggggaaaaagccatgttttaaaatccactctaaaaatgactcaagggctgtaggatggcgtgccctccatctgtgtggtcctctacccaatgggatcaataccgaacactgggggacttcacacatcaccttctcagccatggctgaaatatgtggctttgcggagcatctgttccccagggaaggcctgatagccagaaccacagagaaatgcttcatattcctctgtcacacaaacttatttcagggctgattttatcctttgagagaagtttttttcctctccttttcctttaacatgtaaaatctcccaatgttcctccagtttgaggaccaaatgcgattttaatatagcgattattagtttagaagcccttcagccactgacaaatgtccttagcagcagcagcagcaatgttctgagcttgctgtcagggtgggagacgcatggggcaaagatgactcaagaatcccagtgccactggaagggctactccgggggtggctaaggctggaggcttcttcctccctcacccctatggtatcttaacctcgtgacagcatcatgggccctcgggtaccttgggcatggttactgatggctctagcagcattccctaattcccttaggacctgaccccctagaagctgcatctgggatcttggaggctgcttaccacccagacaggcacatttcccaacctccgacacccttccccaggcctctacacctttctctaagtactgtgatcagcagccacctgccttacataagaggcctttgagctagacaggaggttttgtcagtggttagcatggcaactttatggctgcaagaagaaacatccttttaaggttaaaatgtagcaatgggtggagcaagcgtgtgagcgtgcagacgaatgtgtaagtgcatgtgttcgtgagagcgagaggtcctgatgctgcaagaccaccgggtggaaccggcccagtccgccgagccagcctgttcagggagagcgcgagcgggcctttccccagcagagggcagcagcagacatgccagcccaaactccacagccagcccacccgccctggccctctgccaggtcacacattctggacctggacttgctgggcctgtcctcagagagcccagaagggcggctgagaggcccctgcctttcccaggggcagtttttcaagagctcaggagttaccttcaaggtcgatgtccttccacgttccggtctcctctcacttcaccctactttttctcaggggtgtctggttgcaggggagcttcctgcccttgatgaggcgtgttctgaggagtggggtgcctggctccattcagagggtgagggcccccaaagctggtgatatggcttgccaaagaggggtttgcgcgtaggagctagagggcatatcccagctgagaggaacgtggtcctcagcagcaccctgggagggtcccaggggcctcaggccctttgcagtggaggagcttctcagatcctcgataaggagctggctttagggagtacggcacaggaagggactaggagacctggccctgcctcagattccctgtccctttctttctgggcctcagttgcttgttctatactgagaggtgtctgactcagccagattctcactcctgtgggatgactggccctttcatttagcaggtcagtgtggtgatgggtaggcggggcgggggtggggggttggcagggacactttcagattggggacttaaaagacatacagacccacataccttgattgtatcctggtccaaacaaagcaataaaaaacacccagggggccatcggggaaatatgaatatgaactccacgtggacattcttcgggaggtgttcattttgtcagtgggataatggccatcggggttgtgtaagaacctcctgaggtacttcagggggaatgctctgatgtccaaaaattgcttcaagtactttatccttagggtagtcaatgaagcagatatggtaaaggtcacacaaccatgtgaatcctggggtaggatatgcaagaattcattatatatcattccccctgctgtttcctgtaggcttaaagtttttcatggtaaaaaggttaaattataaactggtagctttaaaaatctgtagaagcctgggccctgccccaggggatccgaatctctggagggggaacctgggatggatgtttttagatcccctggaggtcctgaggaccatgacaggctcagacaggttcaggtctcagatttactgaggtcaagaagagtccatggggaggtgctccccaaaactgtgccaccaccccaggcaggggccctcggcagtccccatggtcaacccgcactccacgggggcacccgatacccaggccataggcccactgcccacaggctgaggtcatcctggcttcgtgcacccctcccccgccatggagggtggggctgccgggacaggacacactgtccctggagcccagggggtgctgcctgcttctccccagacagctgcctctgtgaagggttaaacggtgggaatcattggctcccacccctgtacctgccacccagcttcctctgcaggcccagcttgcggaacccaccctgcctacgtgcaggagcccaggttaaagactcctggacagcctaggaaggctgggatgagtgactccaagggcagggcacagagatgagagacaagcaaacaacagaatttctgctgtgagccaacccagcagcacccccacatacacagttgtatagacgcgcataaatgagcaggctggcacctccatggggtagaccccttgttgggggtggggggctgtcctgtcctgggtggaccctcactcccacaccgccaagagctccacgaggccctccccaccctatccactgaggcagcactcaccagggcctccttcctggaagcacagcagggagtgtgtggaagagaaggtccagtggaagagaatctccttcggtggctgccgactgctggccctgagcagaggcctttcccggcgccccagcacagagagctcactgtccactatggcgctggtggagaggtctgcctagacccaggtccgcccagcgggcctgggatgggaggtcacctgacccttgggaagggctggcaggggatgacgcgtccagctgtcagctggtgtatggctgctccgagcaggggagcagggcctgcggcctaggagggcatgtgaatgaggaggaggaagaggaggagaggcctgagagggagaagccttatgctctgctgcctggttggaggtcaggccctgtgcaccagggccaattgcatgaggtccccagtggttttttgattccttgaggtaaggctaggctagggagtcttttttccctcccttcaccctcttccccacaactttactgtcagcttgccccaagctgtcactccggcgagagggaaatcaggcaggaaaacagcaagccagtcagcactccatcagcttgaaaacaatcagtcaaatagtttttgaggcctttgctgggctgccccaggaacctgccagaccagggactgttgtcaggagatcacagagcaggtgttggaaagggtattcagcaggttgaagggcaattccagtgtatttggtatgcgaacatggagcttagggggggccccttgcccagcctggggggagcagggaaggcatcctgggggaagtaaccattggataaataggatcatccgggttggggtggagagggtggtgggaagaacatgctcgctaagggaagagcacatgcaaaagcccagaggcagcagggaacagggtgatctgggagttggaggcttttggagcatgcaggatgtggagagtgacgacagatgaggctggggtgggggaagtgcaccttacaggtctctaaccttggcttctcaggagaaactgaagggcattacatcaggaagggccaggcccaggttggcgttttgagcagagtggatgctttgaggagagtaggtgagggaggcatgatcaaaaatgggcaggcaggttacgaggctgccaggttctgctctccagctgagttcagcctggtggggagaggaggcagtgaggtggaagggagtgggtgagttcctgagatgttcaggaggcaggcttgacaaggtctagtgatgtggagatggggagagatggagtgtgggaaaaggacagagacttgtcagggacaggcttcaggtctcagcgactctgggccaagtattaggtctgaagttggcccttcaggcaactcaagctaccctgggcttctggctgtagttccctcgggcactgtgtgccccacttgcctggggtgctagcctaccccttcccgggcttccctggctgtggacactcagcccctgcggctcagcagcagccagggggctcagcctcctctctggccagaggctcctccgaggccccctcaggccaacttgcctcttggtctggtccagcctctctctgactctgggtcacagcccccaggtttttgcttccctcaggatgccctcacctgtctcctggctctaacagggctcccctagatttgtcgctgcagcagagccgtgatggcttttccatcccctcaacccccgtctccacatgtccacggagggctccttcctacggtctagccaccctcactgttcatgcgcagaacagatgagccctgggcttggataaaggccgaaatgggagaccaggcaggactggaacgcaggcctcctggcccttgtcccagaggtccctccgtcactgtgctgtgtgctttgcactcttctgggacctcgcatatcaccagctgcccagcagacatgttagcagcaaagaacagtgtcacgggaaggccacagcaagtttgggggctgcccgcagctgcccttcctgtggccagcctcctttccagtcctctccacacccagccagggcagagccctgctggcatgacagggattcctgggcaccatgaggctgggtgtaatgggctgagcatccatggccctgctcgctccccagggcagtggatcacatttcactggggaaggcagatggtcaggctgccttgcgagcctgctgagtacttggttgctcagctgcccagctatgtgctgcgctccagttacctggccctggaagagacggtgtgacctcctttccccccaccactcccccatgtcccctttcccacctgctggactcctatccctgttctgggaaactctgaattaacatgggttgagctgtaggctcttaagggtagataggaagggacctcccacctgagccatttggccattgcaggactgaacccagggcctcaggagggtgggaccacattccagtacttgctttctggtttcgttttgttgctgttgcaaagagcaaagttccacactgacttcctatccctccctttatttaacatcatttttgagcccctaccatgtgatccaagacacacagcaatagacaaaatgcacagggccctgtggtcacagagccagtgatctggtgctttccatcatgcaatcaaatgagccactttatttctgtttcccgactatggccaagttctcttcatcgttgtttttccaaagctcagctttacctgcaacataacctgcagctaagcctcctccggccatgtctgggaccagctctgccccatgacaactccccggctcaccctctgggcctgatcctgcctctcctctacaaagtcagtcctgacccatgaggctcatccctggacatgacattcccagccagctcatggatgccatttgaaggcagaagatgcctgggcttataagcacacagccacctgtttgggagccgccctgctcactcaaggcaaaggggtactcccctttcaccaccccacccacccaactgaccttttataggaccaccccccttgccacattccctggcagtttatccatcactacatcctgtgaatttcaagtcccaaactggactcccttctctccatctctatggctactaccctggcccatcacggtgtcatggcttcagtggtagggctcctcacagtgtccccccttctcatcacacccttgctcctacaatccatcctccccagagtgatgctttgagacaactcaggttatgttgcttacctgctgaataatcttcagtggctccccatccttagaataaagtccagagccctccctgaggcccagccctgcccaccttcctagccctatctccaggggcacccccttgccttctgtggtctagccatactatgtgtggatcctttgcacctgctgtcccttctacctagaatgcccttccctcacctctctgcctggttaactcctctacacactttaaaagctagctcaaatgtcacctcctccaagaagccctccctgacctctctgacatggtctgctacccaagaccttgctttagaagcacttatcccagatatagtcatgcttttacttgtgtgattatttgctccctgtgtgttttcctcccatgagggcagcaacctggattgttttgcttaacattgtgtccccagcatgtagcatagtgctggcttcctggtgcccgtttggtgaatgaatgaacaaacatatgaactcattctgggtctgcgacttcccattctggcctcctgatgccctggccttcacagctgggggtgcatgggtcaggagctggtatcagggagttctttttctcttcctggcctcgggtgtggaggccccgcctggtgactgtggcctgtgacaccctccctctcccccctctactgcccccatgacccagttttcccgctctagagacaacaacaacatgttccaggacatgtcatcaccccctgctcatggcataaacatcgtggctgtggtgactgctgctaacccacccagcctccagcagaagcccctgctgccctgcgctgggcctctcctgctgcaccccagcgtggcacgccaccctcccctgcctgctcctcttccgctctgtgcgaggagccccatttcataggccaggatgctgaggctcagagaggggaagcaccttgatcttgtggttccctccacaatctcttttcttcctctttttcctgcctgtggattatttcctgtgctgccctggctttttctctcacattctcttgtcaccttgtctgtttctgcgggtactgctgttctcactctgctgtgctcaggccacatgtgggtgtgtgagcaccacgaggagatagagcacattgggctgaacaaataagttctcattagggggcttctgggggtgtgtgctctggggagaacaggggtatgagattctgcccagagactcgggtgctgggggacctcacgcaggccctgggtacctctaagggaatcctagagcaaggctgcaggggtggagcccctcggcttccttcatggttgacgcagtgatttcacctgccctccagctgtccagagcctccctggaaggcggttacctgtgccctgtgggggtcagctgcctcctacatcagctgtcaccccattccctggaaagcccaggacagagcgacctcactgtgcagccccccgtagtctgtccgaggaggcgtgaagactggtgtctggctacttgcagaagacggagtacatgctggcctgacccagtgcccagctcctggccccacccgcgaacttctagcctgggcattgggctcccatcccagagcctgcttggacttgtattgggctcccaagtggctggtgagctaagacccctcagggcagagtggcgcaggccacggcaatgccagccaggcgctagagggttagggcgctggctcagagttgttgggggctctgagggagtcagaacagccaccttcagggttatcattccgcaggggcagcaaacattcacatatttggtggccccgtttttctcttctgacagacacatgtgcacgcacgcgcgcgtgcacacacacacacacacacacacacacacacaacctcgtttaattctcataagagccccatgagggagggccttttattacttttgttttccagctgagaaatgcagcctcagagaggccgtaggtcacacagctgtaacagtggcacatagtggcagagctaggatttgaacccagagcccccactcctaacgactattttatttcccgggcagccccataggtgcacttggttgcaaggacacagcccaacaccaaggggagaagcacaaggtgatccctccactcccccagtcaagcccatgggccagctatagggaggggaggcctctggagggaggtgtcagcttgtctgtgagtgtggacacagctggggaactgggcccaggcctggtgtgccctgcagcacggggttactggctgtgtccccctgcccacatctggctgaggcacaaagggttccttccccacacagctcttgggagaggcagctggtgtgtggcacagattgcccagctacaggcgattggttctgctgggtgtggttcctctgccctgaacagtcgtggtcccatttagcagccgccatcaaaggccatcagagaaaggacctgccctgcctgagaatgcccagagcactttgccaccattgctagattcaggagctgccctccttgagaggatgggctgccacctgccttcctggcccatgggaggagccctggcagtgccctgccccagagcaaaccccaggggatgagcctaccatcccagctgtgttggttcaccagtgtggccgcagcaggtgctttccagaaagaaatagaatcccagaagatcagggctggaaggtccccccaaggccacccattacaatcttttcattttactgcaggagagggacaaggagaggccgcagagagatgcccgggtcgcacagaggccagtgaagagctacacctgaacccgagtcctgagactgctggttctgtgggcctcctggggagagggccggcaaagagcctggcctgtggtgtggacgcacccaggtctgagtcccagccccaccatttcccggggatgtgagcttgggccagcatcctaaactcactgagtctctgtttcctcatctgtaaagccaggatagttttcttagggtggttgtgatggtgtaatgacataatgcaggtgagaaccatttagcacagtgtgacaccaggcctccaaggtcctggctaattgtatgaatggctataattatagatggctggcaagtcctcatgcggacggcactcagggaggcggactgtgtacctacccttcccaaccctgaattgagattcgtgccctgacatggttatggggacatcggcccagaatatttgatcctgggactggctcccaaatcagaacccgtatgtaccacagaggcacacagggtgctgtgggagcctgaggagggagacgttaatacacttgccatgggggcagatgtcaggcctcccaggggagctggcatccaagctgggccttatggggtgctagaggccccaggctgagaagtgactgaagggaacaggaaggggaacagcatccacaaaggcatgcaggctggaagagcagggcatttctggaagcctggagcagaggtgcctggaatggaggtgggggtacaggcaggtagagaggacaccttgtcttgcctttgactgtgcctacattctgactgtgaagccaggcccatagcctcttagaagggcaacacttaacgactcacacagactgttcagtcatctcacagattggagggaccagaggcctgcaggatgaagcggccccccagagatacacgatggggcaactagagccaggaagggcccccatcagccagctctcaggcgagggcttgacattctgaggtgggccgtgggagctggggtggattgatttggggcaggggacacacgtggcgatggtcctgcacttgcaggagagtctggcctgggccagtgagagatgcacccggatgacagactggggggacagtggctgatgcgggttatttatggctgtttttctgtgagtccttcagggccgcagaggtaattgaataagtgagcatgagcaaactcgagcaatcatttaattgtgacagaaaatgaagttggttgcagctggggggcaccagcccattaccgctggccctggtttctgctgagttgggcaggcagggctggagtggccatccgtccttggtctgccctcaccctgtcgccccgcagccgtccccacgcaggcagggcctgggggcgttggcggtcagggagtttattttcccggtaggcctctccccgagtccccttctctgccccaggctgccgtagacagtggggggctgggaggtcctcagagctctgggggaggcttttggcttgggggtgagagaaggggctcaaatcttgaggtttggaacggcaatgtcagcagatgcacaggaagctgagatggaagcaccattaacatccccatttcacggatgagggaactgaggcactgactcctcacaagatgcgcttctcctagagaagcccctgggaggcactgagatcctggggggacagcaatgatgcaggtgagatgcagtgaggtcatatggatcccacaagtcctgcaagctttctctctcacctctttttcagcccagctggccacccactgcctgttcccccaggaaagatgaggttggaagcctggcccccaggttctggggctgaaggaaactgttggagccctggacgggcttagcccccaaagctctggcctctggccttgcatcctctggcatccagtccagcccttctgaagaagcagataaaattaggcctgcaacgtgagaagccagttcaccttcccaggctggagcagccacagtggccgtcgggcagtgctgggatgacaggcagccccccgctccctggcagtggagcaggggtggggttaggcctagacccaaactgcagctgacctcgggcaagttcctgggatgctgcattttatctaataacactaactgcagctctgagcctgttttcttcccagtgaagcaagtgaatgctccctgccactctcactgggtgatactgttgtaaggagctggagagacatcaagaagggctcctctttctttctttctctttctttctttctttctttctttctttctttctttctttctttctttcattcattcattcattcattcagctatgggacacctgctatgtaccacccatgaaatctatttgatttttaaaatgatgaccctgtgttatttttgtaaaacttaaacttactttaaaaagaaggggagggggatccctgggtggcgcagcggtttagcgcctgcctttggcccagggcgcgatcctagagacccgggatcgaatcccacatcgggctcccggtgcatggggcctgcttctccctctgcctatgtctctgcctctctctctctctctctctgtgactatcataaataaataaaaattaaaaaaaaaaggggagggtattttaccactattagaaaaaagaaggaaaggaagaggagttcagtatagtggcccagtgcaccaaagtggacccccccaccttgcctggctgaagcccacaaagaaatacctgtggtgcagagggtctgtgcaggtggacagcactgagcactccgagaggtcaggaggcgtgtcgtgggaggtccgaggcacctgattattatgagaaactcacactcgataatgggttaatctgatgggtcaatcgctgtgcttctcggatgtcacagaggactttagcagcttcctgcaaactcgggctgcaagctttgaccctaaaccagaaagcaactcctggcgtggtgcagtgggaagcaaccaccctggagaggtgttgggaggggacggaggtgtctttagagctggcccttggccaaggctgagcagcaggcagagtaaatcctgggaaacccacccccactgcttcactctccattggcctccctaccagtgtttcttcacgaggatgctatgtattctctctttcctttcctttgacaaagctatttgtaggtggggctctgataggtttgcatttttaaaaaggacaaagtgttcagctaaaagaatgaatctttaatggtggaatttcagacctcttcctcttaggagaggttttatttgttttggttttgtcagggactcttccctgtgtctctggagccacgctgccatcccaggctccctcctagacactgttggtcaagtccctttctccatcacttgccagagcattttggggggtgggggtggggaacaacagcatcctctggttccaaaatgagcccccagccagggcaaatgcactctctgctcttgcattcagccgtgctctgccctggcacaccttccccagagagaggtgggggggcctctgggagccaggagtgacctgcacccccccgccccaccatggggctgggcagaggaccccagccacatctgagtccagctggcagcattatgcaatgtcagctcctacctggactagctcctctgacctcagcacaagtgaaggaatgaacccctcacacaccctctgtcccaggtgggggaggcgttaggcaccagctgcagggacctatcaggctcttcccctcttgcccgccccttgcctcactctaccccttttctcccagagcagccttatcacagaccctgctcttcagttctggaggggaaagagggacaagcgcagtctttttcttattattatcattaaaagattgattgatttggtgggaggaggggcagagggagaggaagagaaaatcccaagcagactctccactgagcatgagccagggcttgatctcacaacctggagatcatgacctgagccaaaatccagaattcggtcgtagaattcggtcatgatcctcccaggcaccccgagaagcgccctctttagggatctggctgtagcagccagttcaggatctggggagatagttgaggccctggcctgccctgccctgcctcagcctcagtgtccgggctctgagaagcccccagtggagccgagggagggctctgccctggcgtgggggtgccatggaccttgccagcccccactgcggagatcaggagggaagaaggccttgtccctcggaccgagtgctaaggagcctggggtgcagacagcttggtgagcaagtcccagctctggccccaagtgacccttctgaagaccttacctagggcttcgatcctggggtgccagcaccctgccccgtcctccccagtctgcccagaccccacaaacacacactgcccagctgcactgtgcgttcagcctcagggctcctcgttggaaatctcagagctccccttcccatcaccccagcccaggctgctgggtgtaaggactctgacctgaccctgcaggacacaccacagcctgcgccagatcctgtggatcctgtttgcctggaagcaaggcagcctggtccagttgtcactgctgtccccagcgctggggttggggaaggggaggggaggttgactggtcacacctcccttctgacctgctgcgttgctgacccctgctggccatctccacacacacccctccccgcacaggcatctctccacagagccctggtgcttgaatgcttccagggccagggagctcaccacctcatgcagcatacagtagcctcttccaggtggaggtgctctgcttcttaggaaggttctttgtattcgctgaagtctcaatactggtgactgccatctgtttacttacagtcattaccctctggagtagattttcatcatcatcatcatcatgtactatctatgtgccaggctcagtacaacatgccatttaaccctttcaacacctgtgaggctggtgcctgtgtcatccccattatatagatgggaaacctgaggtccagaggaaacgtgttgcctaagtgtgtctcaaagccaagaagtcacagaacctgggtttcaaatccagagcccatgcccttgccagctagggatgtccccatctcaccgcccccccccaccccttctgcttggctctggcttattctttcttttctaccaagccctgctgtcccacataagctcccaccttccccccagaatctgcagtggattcactcctcctccaggaagcccttctggacagctaaagggtaaggaaagagctttcttccccaagtatcttttcagagtgagaggagaggagtggaggacataaggagcccacatctatgatgtgggtgaatccttggtaacacagtggcggtggggggaggggtctgttccttctgctcctctcccctccagactagattttggtcaaggacctgatgctcctacttggtgcctgtcaggacctcaggagtcagcatttgtggggtctgcgctggcctagtctcatgctgaccattggcaggatggcagcatctgtagcattgggggtggcatcttcctgcaggcctgtggccccaccctgcctggtacaccagcttctgtggggggatcaggagtgcttgagggcagagctgggggtacaaacttcattgcccctcaaagggcaaggagcaggaagggggcccagagaggctttatggttcaggccagcccctgcagggcaagaaactgcatgggtgtgggggggggcgggggggacccaggacactctggttaccaggggtctgggatctcccgcttccttcagtgacctccggccaccttccgtagccacaatgccctcagtcatgctcaggtaccctcatccctggctgtcaccttaagctccttccattttgcagtctaactgttgagacctcagggagcaggcctgcattcagaaggattgccatggatgaaaatctctatcaggcttgaaccaaaagcatctcagtgtagggcaagactttcagacccacctagtcccatccattcattctgtgctagcctctctgctgagtgccaaggcagcctctgcttacatgcttccaatgacatgaggctcactaccttttgaggcagcctaaggctcaaaatagtggggaccgtctttctcctgcagagctgagagctgagttcacaaaggctcagaatccccctagcccttcccctgatgaagtttggagcaactgaccatcttattgccgcatcttctccccagccaaagtgaagagaagaggcctgctctgagaattggggcggggggggggggcgcctgccacaggggagaggcatctcacacccaaccctcagctgagctgctgaaactccaagcccagccctgccagctttgggtggagagtggagagagttttgacagaacccacatatgcccacccaactttggggttctcagaggttcaggcctgactcttggtggcacacgtttgaagggagaggctgccctaggggtgtcctggctattggaaaggagagagagggacacctgggtggctcagtcagttaagtgtctgccttcagcttaggttatgatcccagggtcgtgggagagagccctgtgtcgggctccttgcttctccctctgcccctcctatgttttcctatggccccttctgcccgcttatgctctctctcaaataaataaaactcataaaaaagaaaagaaaaggaaagaaaggcgagatggacatgggggcctgattcccaggtggatggcacagaaggaggccaggcttgagctgcctgaaaggcccctgcccaacaggacagcctgaccatcctggaattcagactcaggttctctggctccctagtccccgctgccctcctcagcctggatgctatacttttttttttttttaagattttatttatttatttattcatgatagacacacacagagagagagagagagagagagagagaggcagagacaggcagagggagaagcaggctccatgcagggagcccgacatgggactcgatcccaggattccaggatcatgccctgggataaaggcaggcgcttaagccgctgagccacccaggctgcccatggatgctatacttttactgatgcagccacagaccccccaccctcacccctgttgctgcctatagaactgaccatcatcacgagccccccaaaccctcactggagttcagtccccgccccacaggtctgcgcagtcaggcctgtggccctgcgtgcagtagtgttacctccttcctccagtgagtcactgttcctcccccattcctctgcacgtggagacggggcacaaatagataaataaaacgaaataaacacgttcgtccctgttaagtttcatcttgttagatccaccccattgctccggcctgtcagcttctatttagatcccagctctgtcatctggtgtatttgccatcatctccccctcccccagctctgtggcatctgcaaatttgataaagtacacggagcatgtttgtctcagaggaagtcccctcctccctgcattgggtggctggagcacaggtgtgcgcaggcgtgtgtgtgtgtacacacacacacacacacacacacacacagctttcctcttccatttttggcagaggcttgtcagccctgtcgagtcacttggatcctggtggggaccctgggcacccgtgttccacagagggtttggccctcagcagccacttgctgtgtacgtgtccctgtgaggacgggatgctctgggtacatccacacatcctcacctccgttggctgctatttaaagagcctctgaccaggcaatgcctcactggccctttccaccgcgctcgaggcatggctggccagccagcatgggccttgggtctcccggacagctgcgtctcacctcccatgctgctagacacacaaggcacagcgcctggatgtgtagctcatcctccttttggtcgtggctgttgatagtggagtcagcacgactgcatggggtgagaactcctccttgcccatgcacctgctgcgtgctgtttctctgatccttctcttcaggggaccccagctcttctctttgcagtaattgcatagcgaggatagccagcttggaaagatccagatctttactgcagagcctgccagacatcatcttagtggaatggaaaagaactcagggcctagacagaccttccagaatcttctagtccattccccagcctccaggcactgcatattggaacacagaggacttgggcatattcctattgctcccctcctgcaatgggagctgtttgttcttcccgcagggaaggtggcaaaagctggttacctgcatcaggtagctgatggtggtaacaaaccaccccaggttcttggtagtggcttctaccaacattcattgatttcttgctccttctactacactgcaggtcagcaggggatttggtctaagccatcatcacctgggacccaggctgagggcctgccccagctgtagcatcaccccgtggccgaaggaggaggtcacagatcccgtaccagctcctagcggccctgcctccatgtgtcatttgttgcttccattcagcatttcactggccaagcaagtcctgtggctaggcctgatttcaaaggggaagaggcaatctcatctctttggtgccaggaatcctggcgaatggactctgcatactggctgctcctgtcccccatcgtggtcccgagttcccgtcgtaccgtgtgggtgcgcattctctgagtctagggtggaatgtcttccactctaccccaaaagcctgtgtaatacacacttctgggggattttgttcacatctggacctgttatccatatgagcaacagaccaccccaaaacttagtggtttcatgtgacaaaattccatagaactacacccacccacccacccccccacacacacaagaagtgccttaatgaggtctgggtctgagttagtgtatcaggatcaatttcctggttttgacacgatgccacagttatgtggggtattattcttggggggagctgggtgaaggatacatgagaagtctttgggctatttttgcatcttcttgtggatcttagactatttcaaattaaaaagttataatagtaatacagagttagtggctgaacacagcaacagtgcagtgactcatgactgccatttgggcagtgctgggtgggaacagcttatccctgctcacgtgggactggcaagagtggcttcactcatgcgtctggcgtgccaactgggctgctggaacagctggggacaggcaggcatctgtccccacaaagtctctccagcagggcagctgggcactttacatggtggctctgagcccaaggggtgcaaagcagaaacgagcaggcctgggctggctccggccagcatccctctgaccattgccctgtggtcaaagcagtcgcagaatcagcccagatccaaaggaggaagaggcagatgccgcctcctgatgggagggtggcagagcatgtgtggcatcttcagctcactgctgtgtcagaggcttctcgatttgccaccctggctccagtccaagtccctcacctgtgccgtggtgggtggaggctggagaagtgaatggaaggaactggcatcagccctgccgagagagagtgctccagagagtgccccagactccggggcagtgctggactcccacccagggctcagcccatttcaccccttcgaagcccctactcccgcccccttggcagcagcgggacgcactttcccagcccagcccggcctgctggggagtctgttttgcacatgctggtgtttgcaatcaaaaagttcagcggcccttccagtctgcttaaattagtccccgtgaaaaccaaatcatttcatttgcagagaagggcttaattgcaaggggaaggaggcaaagggaattctgttgcctgttttcattgaagaaaattgctgtactttcccctgtctccttccttaaacagaagcggctcagaaattgggctgtaatcaccagtgatacctctgctccctttcttctcagaacttgctcagttcctctgttcctgagacactgctccggactgtccccccagcttgcagcctggtacctgcaggaggcagcccctccacagtggcttgcagcctccacaccccactgccccggttagggttcgtccttcaggtcacggggcctcagccctggactggctccgactcttggcaggaggaaacgtcctgtcacttccattagaaatcttggccaatctgctccaagctctccctccaggaggggaaggagagagccatgtggagacttgggaaaagagcagacaggtggaacagccagtgtggaggcttggaggcagcagtgggcctggtcagggtgagggcagcaaggtgtatggcctgagcagagtgggggcgagcatgagggcaggccaggggagcctcctagagcctctctgaggtcctggctcagcggtggttttactgtcctggcgaacccaaggcaactcgacaaatcatgagtggctccccttactatggtgaagggaagagagcagggccgagaacacaggctctggagctggtctgtctgggttcaaaccgcagttccactacttgcccgaacgacctgtgcctcagtttcccccaccccatataaaggaaagaacagctacggcatggggacgttgtgtcattcagtgggctgcagctcactatgagcatgccatgatgctatcatgttcattttaccatttcttccttaataacgtcccctgtacagggataaagggattggtcagcccaaggttccagccagtaaaggacagagccatcccggtcccgaggatgctgagtccccacctccacaccaccactcgctccctggggtgcagcaccaggtggcatgctccccccccactcatcccctcggcctctctttttctgactgcaccatggggcccctctgcccagattctctccttgtctctagagctttctccagacggggtggagaagccggcctgtctgcctgagagggctggtcggagcagttggtggttgccgcctgaccgctcctctgccccttccctttggtggaggcccaggaaataaaggatttgaaggccgcacacctgcctccacgaagggatttgtgtgtgtgtgtgtgtgtgtgtgtgtggctcaaagtcaatggtgtattaattaaggggaacagctgctactgcagttcttctgataagtcagtgacaaatggccgtgtttacctttctcctgagcagaggctccgggagatggcctggagctcctgggtggatgtccagggctgagatttgtggggtagagcctctccctcccttacccgcctccagcttctgtctctgtgccaccaagcccaagagggctgtttgtcactgaggaaagacaggcaggtggactggggagccgtggaggggactgggccgggcaacggaaacttctcaacgatggctcctactcgaaaagaggcccttggaccccctcctcagccgatcccaccatcctgcccttccccttgtgcacttagagctgcttgaaagagagacttggcccttcaaaggggaggaaggctgcagggccggatctgaggctctgcggcagaggatgcagatgcaccccggggctttgtgcgctgcaggaaggccggggctggctgcccaggttgggggggtggcgcggccttttgttatttcacttattttgatctcgctcctgctctccaaacagcctcacagaaatagagccctgcattagctcccttcccagcttaagacaaaacaaggcagagggaaagcctttccctgaaaaacagaaaagggcaagagaggtgggctcaagtttgtctgggtcgtgttttctgggggcttcaactccatttctccaccagatctcccacagtgcgaaggaagggctggatctccgagccaaccccagtgtctccgctggtccccaggcccactgtgccctcagggtagtggctaccctggtggagatcagtccacctggaggcccagaccctgcggagtcctggagtcctgcccatcctgcgcccccccagatggcacctgggcctctgcagccgtggcgagggcaggtgcagagactaggctgcaggggacacggatctccgcctcctcggaaggcaccaccagctgccaaggagcctcatccaacctttccctgctcttcgtccccctcccagggctgagcacgcccaccccgggagcctctggggcccccaggggaggcagaaatggggccagaaagaggttctactgaccctcaccctttgccaccactcactgggaccaggctggtgttctgagtccaccctgccgggtatgatagccacgctgtgttgtaatagggaaactgaggctgagaagttatgaggcttgcccaaaaacctgctcatggaaaggctggggccgcatgggcagccttgggcgaagacttgggagaagacacccagccaacccgccctggcctcctcttcccactgacctcttggcaagctgccgctcctcacaacgttgctctgtgggggaaagggaaagaatcgtggacgagaaacacatccatttttaatagtttatttatccaacagtttcaaccctgaagtgaagcctgttgccgcgtccgaattccggctggggcctgattagaccattgctttgccgtggggcgggcgctccgagccagccccgcgctcatccagacatcagaggaaatgagagtattgctcaaatgagggagatggagctttattaaggaaacaaaaaataccagtaagaccgacaaggggtggctgatgtcttctggaggcgctgttgtgggcgccctggctcgcccctctcccgcctgcctcggaggagagcacagggggacgaggctctgctcgaggggctcctcgcgttgagttaatagggcccccggcagggcgcttctggagccgggcccggtgggggtgggggtgggggtgcaggaggaaggtctgtggcggcgctggcacgctcccggcggccggcagccatgtgaccccgcaccccgcgccccccaggtcggcctcaagttctggccctacggccccgcagccctgcagggggccgcccgtggttgccctggagaggggtgatcgttgcacaacggagacgtggcactcccaagctcccggaatccgcatcctcctcgacgcagtgtcgcagtgtggcactgtgagaagcaccactgaagaggcccagctctgaccctgcgggtggcacggggcggccctgccctctggccgcccccgctccgggctcctctcaggaggccgcccccgcagctcacccctcctgactggagggtcccgtgtgccaggacctggcatttctagatcttctacagtacttgttctactttctagcaccttaccccttcaggataaaagaggcccaacccagctagaggacaggctttctcccctcacccttgagctcccggtaacaccctctgaaggcacatggaccaaaccgctcccaacccctgctgccccagcctgccagcccgacccacctcccacaggctccacgcccaccctgctgagtgctcccgcggtggaagagctccagcccacctgactgcatacttgctctgcagggtctcccagctgctgctctttcatcttctctaagcatcagaaacaaacccttctcccccttcctgccagccaccgggcagagaggactggaccaatgcagaggacgagctacccacctggcctctggctttgccacccacccccaccccgctgctgcccctcaaggaagcccaagctttcctacaagctaatctctcaagagtcttacagagagacctttggaaccagagtgggaaggagggtgaaagtcaaggcaagcgtgaattcagcactggcaggtctggtggccttctcacgcccctggaggggactggcctgggacaggctgactgggaaaaggtccccgcccaggatttatcgctctgagtcggagaaggaggagggcttagtccatctccacaccagcatatcttccccagccacgcggtgggactctgtctggatccgggattcattggatgctaggaattccacagcccggtcccagacacgcttcatgcgcctcctgcaatgagagggaccaggttcagcagcaaggcagcagccccctgccccccgcaagctctgtctggtactgcccagagaagcgagctggcctgtgcacgccctggggacaagaccccaggaacccacgcagaatttatctgtgggaggaaactgcgtcaagtactagcagaactcctgcagagacaaatttcttgagccacagaaaaaaattatccctcaaccttctctgctctaaaagcgctcaattaaagggagccgaaggggaccagaggtgccggaggaccccctggtgtgtctgagtgggactgggccgtgctgaccttggccagctcttgccaggacctgttactgcagcagccccagccaggcggccccatcaccagcactggctgcattttaatgccccatgtgggccaattaaagagtggccactgggctgtggaatccaaacttgacagtgctttggagcatgggaatgagctcagcatctgacgggggaggccaagaagccggagctgctcccctcttctgctctgctgggtccccggggcctggcatccccttggaccgcccctataacctcctccccctccagactagacaggaagattccagggcagtcaggttgctctgacatcttctctttgatgagttcctgtcttttggcagttccgcagcctgcctctccatgacgtggagagtgactgtggacatgggcatgtgtgagcaggaaaggctccaccagggctcaggacaacaaatgagggaagatcctgaggtggcctctgggtcgggagtaagaatgggggtgctggggctttcttcctcggagttcgggtcctgtcatgagcgacccctcagcctgtttggcagtccccacttgcctggtgtcacccagccctccctccctggctgcccattaataggtgaataagccagctgcttttagcccccctgctttcctcaccagccaggctcttcagccctccctcagtctcacaggcagaccctcatctgcagggcaaacctgagggggcccacggcagcggatgtgtcctcacaactggagggcttggctgcacagatgaggggtagcaatcaagaggctgagagccaacagtgtgagtctcccgggtttcactgctagggctcagtcccgagacaagccgagacggcacttttgcacttacttcagtacatgtgtgggttgcacataaccctagctggagcaataagggctgccctgggatgagctgtgaggccacctccgacacccccactccccttttcctgaggccttgtcaatacctaacagcacagtttccttatgcatttgttacctctcttcctcctgagaagcaacactccagcacggtggggatttgggcttcttccccacaccccaacacaccccacccccgtgactcaggagagtatggcccatagccaagtgctcactaaacatctactgaataaaggagggcttcaaagcaaccctctgcaaggtggtggtattgtctctgtgtcttggatgaggaaagggctcaaggaggctgttccccaaggccacatgagactcctggccgggccaggaatttggtggtagtctggatgcaccaagtagcctccccctgggagcaggacggccacacggctgcctcatgctggacaacaacagcaagcacaagccaaggccatgatcccagctctccctaagcttcctgcctgcaccttcccaaggagtagggaaagttcttgagcatcttcacatttaaaaatggccttaaattcacatttaaaagcagttttactcttccacttcctcttgggttgcacagaaatgccaccagcggtgggctttgagcaaattccttagcctccacgtgcctcagttccctcatctgtaagatgggatactcactgttctcacctcccagggccacagtgagggtcaaccaagtgggactgtgctggggaaggcccagagcaggatggctcacagcgagcactcggcaaatgtgagtgcttgtcactctccgaggggatggcatccagccggagaccgtaccaaactgctgacaagggcccccagtctgagcccacgccatgccagggccctgctggttgggccctgggccctcctcctacaaagcttccccacgtttggttttgtcaggggccacctagcatctgcagcccatgtggaaggccccctggaaccatgcgtgacaatggcctgctacccctgcccatgcagccgtgcacctgaccacatccattgccatgaaaccccgcgttcaactacatgcatgcatgtgtaggtgtgcctgcgactgtgggaagcaaaccatgatgttttaggggacgtgtcatgggtcatggttaaaaatgtctgaaaggcaatctcatccttgctagtgactgattcaagaacacaagtaaccagttctggccagcgaggcctcaaggagtgtgtcaccggcagcttctgggcatgttttctcctgcccatgagagtgactggaggcccatctctccccagttggcagtgacaaggcagacgacgatccagctgccgctggctaccacttgtgtctgggaggaactccaaccagcccacaacatccggaggccagggccacaagcatcacagagaaatggcactagagtctcgactattctgtgcccggagcccaagggactctggacttccactaatagaaacccactaggtccctcccaacttgagccactggggggaaggcacgagcacctgccacccacagctctccagttggtatcgacgctgacagagtggggtcatgcttccgtacttcggctgtgcattctgccaaagatccgagcactggggcagcggcgggaggtgtgcctggccccctcatctgtgatcctcagggccgactcgcagccccttaactgatgctctaggccctctcctatggcaccaggctgggtcagcccaggactcaccggctctgtggagggatcagggtgtctcgcacatgcaggatgcccacgtatgggtagcgctccatgtcctgctcccagtccacgtagtggtcctggaccacatctgcaaggtaggacagaggacaccatataggggaaggacgttctggcaggtgccagtggtcctttccccaggggccacgcacctataatcttcttcaccatctcatacatagcttgttcctcttcttccagcttccgccaccgatatttcaggaggatcaggagcccccacaaaaaggccaaacctatgaaggaacaaaggccccgttaatccatctcatcacttgtggccattcagctgcatgctgggtctcagtgcaggccagtcgctgtgctggaggctgtcagtgagctgcgttaggtgtcctgagaacctgctatgtgtcaggccggggctggcatgcagcttacgcaggatggggagatggcggaggggagacaggctacaaagtgatcatcttcctctgccggttgtcaccacggaggcatccccagctgtccagattgaggctcctcccaaccccattccgggctttcatctcctcccttgtgaaccagaccacggggtttcatacatatacacacgcagggccctttgtattccaagatgctgctgccgataatgacgactctgcctgatggcgtgggtgagggagctgtgtgcacgcccaaatggctggtgatttgtctctctgccacgtctgcagagctggcagtttctgtgactcggcctttcaccttccaaaacaccctgaggtctctgttcaaaggcagcccctgatgccaggccacaagatgctaagctctgctttgcagctcagccccctgggtccttcctgctttccttgggtacccagagctccaaggaggtgtttacatcgttcagggagtaaaattaagccaagctcctgctgcacctcctcctcctccgagaggcatgtgccctggagctctgggggtgacgatgctgggctccagccaaggcccagctcccccctcggggacaatgatagtctctgaccccgatcaaggatattttccagttcccctcatgctcctgccaccaatctctaaaggtaagatgacccagggcagaggctgacttgttcatctcctctgttttattagacctcaggttcacgagacagaaatgaactctctgggcctgggtttctatagctcatcactcatgcctaggagtgtcactgagctgggctcccgggaggtgctgtgtgagcagtccctatgccaagggcgggggaggggcttctcactattgtgaagggggtgggggtgtgtgaggggagaagggcagccaaggacttacaccagaagaagatgagcaggttggtgatcgcggtgaacagggcacggctcaggcggcagcccacacccatgcgggggcgggcggattccaagcagaccactttgtccacagttgtcaccaattccgatgggtcttcccctttcaacctgaaacaggacacagcgctgcaaatgcattcaggagctcccaggaaccataggatcagccccaatttgaagcaaggggagatgaaaggaggggctttgaggcctctacttgcttataaaatagacttggtatcctggtcgcatactttccagaaatttcccacattggctacttagaaagaataaagctttaaagatggcagcaggctcgaacccctactgctaaagtgacgtctccctctgtcgagtcttctgacaactcctctcagcgtgtggaagattaaactgtaaattggattcccacctcccagcatatagaaatggaaatgtttactgaatcacattgtttgcactgcatagcaagaactgaaagagtctggggtgtgcttttcctcgttgatggtgacaaggaggcacataagctgtttaagtataaagattggggtgtcgtgaggctcggggaaggataaccactgggctctctgaggctaggctcccagccacagcgcctccactctggcctctgagaggtgtcaggacacatggggatgcccacgcctgcaccttcttctggctaggtgacagtctcatgtatgggaatgcccagtgtctgaagtgttccgatttctcgtgacccgctttgaacactggtcgtctgagctgggctgggccaccctccgactgtcttcccacagtgtgaaaaggcgagtgccatcattcttctgtgctagcagctttggtgagcactgctgaggataaaatccatattctcttccgcctatcctaacacacaacaggaaaatcgctcagccactcagggaagctttatttattttttttaagccaacgcattttaatcgcattttaatcgtgtcctgcatccagttatcaagctttaggctgaacagcctgaggggcttctggtggaggcactgctgatggaattagtagtctgagtggattagagacggagggaacaaaaccctagagtgtacttgagtatcaggagctgtggcctgaacagagaccctaacaaaccctgggaaatgggagggagtcccagcatgaagaaccttggtggtggcaaggggtgggggtgtgggtgggggggcatactggtgtatgcagccagatggggcttttcagaaggctgagagggctcaccatcctggctaacagtgctccccgggggtagaaatgaggtcaaatgcccagtcagaataaaatccagtatgtcctttttcaatttccgtcctgagcgaaaccgacagaaacatttcagctaggaatgaagaccagcaccagacaaaaggaaatacagaatgacttctctatgtgggaccagcgagttcaaagggcacagagtgagttacttgaaactcaaaggtgtaggtagaaaactaggctaacctggattttgtgtcttatcgtgaagtggctccttccgctgcaccctgaccaccttttccttctgttgcctggctgtaggcttagcccacaaggactcggcagggagacctggctctaccttcagacacctctgtgagctgaccgtggccgcaggtgcccgtggtagtgcccccaccctgtgatgcctcgcccacactcaccagatgcccacatccttgttactgctcagtatccaggtcagcgcagcttcaaacttggcaggggagttgccggtcacattctgtgggagggggcgggagattagtgctgtggctgggcggaccagctagaacattgttctcctgctggattagggaagacctatcccgtgtcctccagcgggccccagagccccattccgctaaatgcacgacaaagtggaaggtggaaatgtgggttgatgagagccaagaaggggctctaccaggaggagtcgaggtgggagcacacaagaaagtgatgcaggtctgaggtagccaaaaacaattttctcaagtaccaaagcgtcaaggggtagcagctcatcttggggaaaataaaaacacgtgtggggctgggggccccaggggccagtccctgcccctctctgggccccagtctcctcatctgggaaatgaaaataggctaggggacccctaggtttctgctggctctaaggttccagaattctgtcaaactggggccaggccaacggccacacagacccggagcaatctacacagtgaacataaaggagagaatggacaggtgaaatgtaggtctgtaaagctgctgggaaggggagaaaagcggggggtaagtaatggggctgcttcaagaagaggcggcctgcagtggccataccagctgctcaggagacccccacctacctgtggcaggcagggctccggctcacagctcagctgggaccaggcacctctcctgctgcctaaactgaaagtagcctaacactcaactaagttagaaagaaagaaaagaaagaaaagaaagaaaagaaagaaagaaagaaaaaagaaaagaaaaggaaaaaaagaaagaaaagaaaagaaaagaaaagaaaagaaaagaaaagaaaagaaaagaaaagaaagaaacaacaaaaaagggaaaacaaaaatagccaaaaagcaaacacaaaatggaaacagaaaaaaaaggcagggtctgaaagatcagaacaaaagcaccaggacctcctgggagtgggtgagcgctgcagcctacttactgctaggtattcctgggcttccactacagggatgcatttgctttttagcttctctggatttccacattcaaaattacctaggaggaaaaaacacattcaaacaaaaggaagaggtggggaaaaaaatactctgaaatggactaaaaaaaaaaaaaaaatgcagcaagaatcaagccatcagctttaatggggagcatgtggccccatgactctggtgaggcatcctcagtctgcaccaagatcaaaacccacttggcttggatcgattccagatcattaaaacctgacctgcaaaggagtgcagtgatttgcattaaatgactaaaaagctacccaatcctaaggtctgttctcaattgatccctaagaggatcagacaggtagctttggaaggtaccagaatggcactataaataaacgcgacccgggaaaaaaaaagaaaggcagggcggctgcaggcactgcagggattctggccatggcacaggcagggggctaggaactccaggcccactgttttgaggggttctggggagggaaggccaaaatgccccacagagaaagagggcatccctgtgctgggcagtggggcctcagtgtggtgccccaaggggccacccccttctgattaggtcccacctaggatgaagctgggagcctccccttaggcccacccagggccacctcctctgaaaactcccgagcccatggggaaatcttgtcggaccaaatcactctggacttgggggcctgccacagccagtggctctcaacagcccactatggtccacccaccattgttctgcttcctgtgggtcactagatgccttgagagcaggcacagcacaggctgggggcatgtacaagatccttaacccacacagagcctcactgctcttaacctggcgcagcctggggtctggggagggagtggctgagaatgaactttaaaaatcttgagaccaaactaaaggttatccctcctgtgccaagttgagcttgcccttatgggacccctgagatcaagctggcttttcccgacaggccccagaatgccctgccccgcttaagctggcctggaccacagccatggtctcctgattagtttcgtcctctctcctttctcatccacgtttgatcaacaaaagtttaaaatgattctgcttaaatcgcactactacactcaagctgccgtcacccttgccttcctagctcctggctctcaacatatcactctgctgctcaaaagcctccttggcattcaccgcctgcagtgatcaaagccctggtggcctgacatctatggccatccatggtggggcccaaccaacctttccaaactccattccttcccctatgaagccaagagcttccatccctgactctgtcatttcccgcctcttggctctgccctgccccccacatatacagaatcaatcctccttgggcttcagggtctggcacagacaccacctcccctgtgatgctttcctgactgctccagctgaaaggtaacatgcctactggaacttctggcctctcggttctcatctaatcacaccttttaacagccattggtcagggaggtaggtggcctgtcccttctactagatcataagcaccctgtggactgcaagggaagcacaatgccctgcccataggtgacctcccaggtggggttggggttgggcagagtatggcctagcagagccctcattcccctgcagtgagaccctcaggctcgccgttggccaggcttgtcagaggacaggaggcactaggccccctgatggcataagccaggaccacaaatggagggcaggatggaggagaaatgtctaccagcatctctggtttaagacagagcttccctactttataccctagggcttttcaaaaatgcagactttgattcataggtttggaatgggtcctcagattctggatttccaataggttctggggtgatcctaatgctgcttgtccctggaccacaactgagttactaaggtctggaacactctcttaaagggccagaatttgggcagcctgggtggctcggcggtttagtgcctgccttcagcccagggggtgatcctggagacctgggatcgaggcccacatcgggctccctgcacggagcctgcttctcactctgccttgtgtctctgcctctctctctctctctctctctctgtgtgtgtctctcatgaataaataaataatatcttgaaaaaaataaagggccagaatttatagtccaaggacccaggccatgcagaaaggcccctggggcctgtgatgctgtgagctcccatgcctactgctcctcctccgagctcacagatgccttcctgaccgccactagtctcctgccagtcaggggaaggtggtggcagagctatggcccataagacctgccccaagggctgagggcccagtacaagcccatccagcctggattccctagcaatgactttagacaagggttggccccacaggtaagaggcgcctcttgaacattccataagactgaatagttctgtctggttctggtgcaccaagcttggggcacaagctcaggtcacactatgccctaagcaagtgattctgagaggtgtggggaggtgatatatctggcctcaaagaataattttctaaataaaatagtagggaagccttctggatggattactttttagaggtacttcatgggggtactgaaaatgtcctcctctagagtaaaacaattttcatttgttaaaaaaaaaaaaaaaaaaaaaaaagaccaaggaccacttggctagagagggagacagtttctgagaggttaagggacttatccgaggtcctgcagctagatggggagatcaggaccagatgtgacacgggggccctggcaagctgggtggacctgagtgtgaccagcccaccgggcaggcccctgccacttgcataggcctctcctcctggcctgaccgaccatctggtacaggaggctctccaggtcagaagatccagactctgaggagacctggggcctggctcctgcgagtgcaacatgaaagcatcgagtggtgggcatccagagaaaacaggcttgtgcaggggccaggacccctgagacccttaaaggggatatgaaaaccaactataggcttaagaaagctgtgtctaagtggagaattggggcaagacttggtttctgagtgtgtcttctgggagatcaccagcaagcatctcggcctcctgccagccagccccagccaggctgatgaggggaagagcccacagcccccacgaggaatctcaggcccagagatatccactcaccggcttggacggccaggaagttgtagagttcatgcagcagctccagcaaggccgccttctgcttggcctgacagaactggaagggcacaggacaagcagtcagcaagcagtggtgggggcagggggctccgtccagctggttttacctccttggctgcactgccaagtgctaggcagcaaggcacaactcctaacccaaattctgtaaagtggtgggcccagggacggggtcgataaataccgggttaactgagcaccatgaaaacagaggcagaactaaaagcagacatagtaactaaggaattgccatcctgaaggctcccagcctctgtcctgcagttcccacgggaataaaggctattaagtagggcggtggagcagaggtgactaggctgtggggagatgcagcagcccagcttccctggtgggccaggcaaatgctactactgcagccttgtcttcccttgggccgctcctgtctgtttttggagagtcaggtgcctacattctgcctataaattgtctgcccggtggattagctgcagcaactgcttcatcttagactggattcctgactagaagtgggaaatttctagaaatcttaaaactatagaggacaaaagtcatctgtatgagaaaacaggaacacgaatacacctagatctcctccacttataacagaattgaaaccattttgctagacttgctagatttagaatatttaaaagaaaaactgctcttccttgagagtgaatgacgggctgtcatgagtctgcactgaatcctcaccacaatccttaccacaccccaatttctcagatgaggagtccgaggtttagagtccatagctaggccaccaagatcccacagctaacaagtgctgaagatggtcaactccaagcctaccgcccccttcagacctcctctggggtgtcactggggtgtcctgggctccgggcctggcttgacaactgtggaaagaaccacagtcactttccttcttgggcttgcttgatgccctcatctgcaacgttgagggacttggtttctgaaagtctcagaggccaagatatgttcccttgtgttgcctaaagacccaaaagcctttccaagtacaaaatggggttaccaagatttacacacatgactgttaacgttcagaaacaacgcacaaatctgtaagtagaatcagatacccaaactaccttttaaagatgaatgtgatggaaaatgttgataataagaaatatagctgaatatacatggagatcccaattctataaacatacatacacaaacaaatgagaagggaaggaaatacccccaaatgtcaccaaaattatttcttggtggcagaatcatggctgattttggcacatttttttttacactaaacatctattactgtcacaaccaggaaaaaaagagaggtggtcacaattaactccatttcaaactcaccgacgtttaggcaaagcggggctgatcccacctaaagggaacagaaggacggaaggcactagaccacgagatggcctgagacagcacacccactcccagcctatccacgcgttttcagcagcacaaaggcagagagaaaaatgctaagtgtcatagttggctgagaagggaaagaacacatatctctcaaactccaatgcccatctggattctgggggagcctgagccacacaaagaataagacttttcagcaagagcctcaccaaagccaagagcatctcccaaactgcctattcctgtgtccacccttcatgacggccaagaacaccccatgagatctcagctcattggggcctgtgatgaggcccagactctgccttttgatgccctgatgttacgagtacccacgctgctcaccgagcacatctttagcaagatcccgggatgggcccgttggggctcactcagctggggagatgaaccaagagatagaaaccagagaaacaaacaaacaaaaaaaagataccagagaaatcttacagaaaagttccttgctttcgggttcaaaattctagttttccctctggccactacctatttttctgggccacttcctgtaatcatcaactgtggtttccatgacagaaggcactttcaacttaatatgaatctgttttcacaaaacaactgagaggcaaagatacttggtggatgaatgcaacaagtgaatgtaataaaacatccccaaagatgacatagcggaagccagagaagaaataaaggctattatttacaccaggccaccccttctgttaacatggataagagagtgaactcttgactgtgtgcactttcctaggccccggggctgccagacgtggagactgaggccttgggagaggcctggcattgcacacttaataattagactactaagtcatgccctctagcaggaaaaggctcctgacctggtaggatttatgacctgaaaatttactgcctcctatcttccccagactatcacctgtgccagcatcccagctcctagttaatgccgcgtgcatgactcataaatggatggggctgctcgccttccccaaatattatttgtagggaacattaaagcctcataaaacaaatctataggcaagaggcctaattccacttcagatatatttaaaacaaccccacccgctccctgatgtttcaaatccgaacagcactgtcagccacagacaccggagcagagggaacgtggacctgagaactcggcctccagaagcttaaaaactgccagcccttcctctggaagccagggagcttgagaggtcctttagcccaacctactgcatccgcctagattgacttaggcagatcaaagtccccggcgctgtgagtgatgggagaggtaccataacaagccagggttggatcttgggagttctattctttctatttcaagtactctgtcgcctgccacaattgagtctgacacaaacatcacagaacacgatgtgattctggtacattacaggaagcactcctgaaaatgatcctattatgatccttttctggggaagtttacctcctgatggaggctaacatccttggggggaataacaaaagctagagaaactcagactcaccttatctgttttgctgtcacagtccactggcaataatttcactgagaccaagaaaagaaacacagaggaaattaaaagtgtgggttcaggaaaagattacaaaagagaaccattcccaaaattcagggtaagtaaaacattcccattaagggtggggaccagaaagatgtcctctaagtatggcacttgtaaaatgtcgatagtaacatgtaagggtttcccaagcccggatgaggaatcaggactaggaccactggtccaaatggtagctggaaatgattagccatgggctcttgggcaactcaaccactctgaacctccacctcctcatttgtagaatgggatcaataaagcttccgctgcttaactcaaggagtaaacctcaaacaagtcaatatacatgattgttttgtaaactgccaagtgatatgttgaatagggatttgtaccaccacgggaggggagctccagctaaatcccaagatatacccaagagctgttgtcttaaagtatctcagcagggactatgaaaattgtactgtttgactgctgtggtatcatatagtcccacgaccctcccaggtctgcttaatttctttagcaagtggatagactgctctcatagccaagaagttatttgggtgtgtgagtctgggatccccatgcccacagacttgttcatatacccaaacacccatctgctgcaacagctaaggtacaatttggcctctccctgcattttggctgttcctgctaggcatggaaagaaagatgtggcagccttggcttgaggctgggaacagtattcatcacaatgctttgcaaagaatatcaaaggctagtgaactcactttatactttagatttatacactttaccctttacattttcatgttgagactaaagcccagttacccaagaagcagattccccttttaagaaacataccaatcctcaactagtcaggatacccactgtatcctgcagacctcttattggcatgtccaatcactaactaaaatgtggacagaagcatggccgggaatgtccttgactcacagaactctctcttaacacactccaggaggataatgctagcaaggataaacacctccatgtatatcagtttaaacgcttttggtgatgcaaagctgggaacccaaccagatccgatctgtgggcagtcaaacctggggtgtcttcaaatgggcactaatgtgtgaatgagccagagatccaagttaagaaagaactaaaaaggaatgggggtggacctgcctgttggagaggggtgtggttttctctggagagggaaaaccagaggttggggtggaaatgactaggaatgaagactgcttccagcacgtggttgaaagggagactggtagggagggcgagggcagaaatggagaacagaacaggagagtgaggacagagatggctgcaggaactccaggcctcttctcccgcggcggcggggagcagaggcaaggtctggaggggagaagacggccagaagcagctggcaaggcccgggcggggcagcctggcgtcgagaggaaccggtggcctcaggtgggcgctcactcgcgcgcccggggccctcccctgcgccggcccggcccgggacgtactgttgtcctccgcctcctgcggcgccgagggcttgcccatcttcacccagaggatgcccaggaagacgagcagcagccccaggctggcccagaacaggagccgggacaggcagcgctccagccgccgccccgcctcgggccgggcccgcgccgcacccgcagggccagtgcgcgtggcccgcaggcccgggcgcggggcggcgccgaggagggcggagggcggccgggccggggccggggccggggccggggccggggtcgcggcccaccagcgacggacaccgtggcccggcgcggccctgtcgagcggccgggcgtcctcgtcctcctcggagctgccccgggccgaggcgcggcgccggggcggcgcggggcgggcggggtaggcgaggccgcggctcccggcccaggacgccgcggaggccccgccgtcgccgtaggccccggaggtcgcgtaggccaagcccgaggccggcggggagagccagggctccgctcgcaggggggccgcggcgggccgggctcgcagcggcgcctcctcgcgcagccgggcctccccgcgcagccgctcctcgccccgcagcccggcctcctcccgcagccgctcctcgccgcgcagccgggcctcgccccgcaggcggcgcagcttgttgcggtacacgtcccgggtggtgtcggtgatgggtcctggctggaagcccagggcctgtagctcccgccgcagctccaggtccgacaggccggccatggccaggacgccgccccccgcccgcccccggcgcgcaccgcacccggaactgctcccgccggcggccgcggcggagcgggcggggccccgcgccatgatgggaaggtctgtccgcgccctcccgggtggcggccatgttggggaggtcagactcggcccaaatgccgccatgttggggaggtccgagaattttaaaaatgtttttcttcttcctttttctctccttcccctcccctccttgcccagtccttgtctgtaagaccgatcggtgtttctttacgaatactcctccccatgcgcggtcccgggcacgcggtagacacctagcaaagtgtggatttagtggtgaaggacgagcccctgcggaccctttgcatctttcttttttttttttttttttaattttttaaaaatttatttatgatagtcacagagagagagagagaggcagagacacaggcagagggagaagcaggctccatgcaccgggagcccgacgtgggattcgatcccgggtccccaggatcgcgccctgggccaaaggcaggcgccaagccgctgcgccacccagggatccccctttgcatctttctgtgcttggggagggctgtgggtcatggactaggcccggcctggaccccaggtggagggcggcgggcctgtgtccaggcgctcagcgcagctccggaccgtgggccccgccccaggcacctgccccagagccaatgccccgggcgcgagtgggcgagtgggcggcacccgccttgggaggaggccctgtggtggggtcttcctggaggtgggtggccgagctccgagaccgtccgctgtcacttgcggatttaggtggggcctctcaaacgccaggggcgccgctgttagatgtgtgatcacatccagtgaacatttctggcctcccggccagtaaagtccgaaacgagaattagaacagggcttgggcacagggcccggtacgtgctcccacgtgtttatacttatcccctcccggcgggcatcggcagtgcagggacacctgactacaggacctacaggatggctcttagctgagaggcccctgagggaagcctgggggccgaggcaagtgcgagcagagctgtggctcagggtccttccacctccctcccctgtttgtaagccttccacggccttcttcatccccacccccatcccaaacgtttatggccacccttggcgtcttgggttccggtccactgcgactcctctaattcggttctccccttgcctgcccatcgcccaccccccaccctgctttcccctctcccttccctgggtcatgggcaaggcccctctgcgggtggtttgcatccctgccacttgccgtaccaccacgggggtattcctacactggccacggttgctggaaaaattatagcctctgctcggtcaggcttccattgttagcctccccgtatcccccaacttagctgttcccatgtggtgcaatttttctcaccaagtgttttcctcttctctgcctgtgtttgcacggaatgccatgaatttgatatagtgattgcctaacacatataccacataatagtattttatttctttctgaagcgctgtttgcatgacaaatgagttggtaacatttgtgcaactccttgcagctgtgcagttcaatatataaggaatgagcctttcagcatcaataccggccctgtgtattctaagagggtttgaatctgacgcttcaacaaagtgaacgttctgacatttcgcagagttacggtctgtttcatcacaatggatcccaggatgatttaaaaatatgtactgaactggagccgccccctgcagtggtccccagtgtgggctttgtcagcctgccttgtgtttggggacgctgctgctgctacacatacctagggccaaatgacccccacccgtccagcctgctgtcttccctccagcctggaacccatcatgttggcagccctggctttctgcccccaggtggtctaccctctgcctccatgggactcctaacagatgctcaatttgtctctctgggtccaaggagcctttggggtagtgccgccaccaggcacagcacgtttgccgatcaggactcccagcccgcgtccctgccacgcccgcccccaggcagaagcctcaccatctgattgagaaaagtcaaccagaaaacccctcacaagtcagtcgtccttctcaagtctgcggcatctctgttttcctcctgagcatcctgtcccagtcctgttcctccgtggattgacagtccctctgaggcctgccatcaacattctgtgccaagactactttacctgcttgttgctgctcatgttccccctgcatgaccaccacatgctttcttcactgaccctcatgttttccaggccccggctgagccgtgctgcttctttggtacccctgcgtcgttttgggagctgcccaggaggctcttcctggcacgtgcctttgccttctgtgttgagtatgggaacgcatattttaaagaaaaaggcaccattgcaaagtcagtggctgccctgcaggcccccctctctcctcactttcttgtgggttttttttaaaggtgagcagccgggctgtgggcagtcttcctgatttattaaaggcagaagtggaaaaacaagctgcaatgtccaaatatacttagtaaccacatccacgcatttagcagaagcgaggggcctccaggaggaggaggctctggattcccagagggctgccacgctgcctgccgtcctgctgacctccctctgtctcagcagagccttataataacaacagccataaatcttttagtgggttccattctccttcttctcctgcaaaaagccctgcacacatttatcaggtccttaaatatgcagggggaccatggactcatcctcgatctaccctctcaccagcctcaagcgtccctctgggcttccttggaaccatattgtgagtggtgtcatgctgtgcggtggtgggggcactgggagagtgtggttgaaaagtaggggacaaagcaggtgccatctaggctcaggttttgactgggaatgttcccagcactgcccaacttctggctgccccatctcagggctctggtgaagaggagagccacctttcatctctccaggtagacgaaggggcaaatagagtcacagggaaatgccagaacaggtataatgggcagttatgttggctgcttttcataatcggctgaaaatataacaaaactctcattcttttggccacactttgatatctgtgggtaagagttctttcagaagcctagaatacattccctgatgtcaataacgaattgtgtatgaagaaaaatgtaacgctttcagaacattttcttttgggctttgtccatgattagattatactaaattacagagtacagatatcaggcaattactctttgcttttaactattcaatttcatggcaaatcctcatagcttggtaattataaaatcataccgatgcagttactgagaaaatacctcatcatctccatcttgtgaagctgggttcaggttgccctctaattacccatagtcctgttaagtgtaaagtacatcccagatgaagagggggtaatctgtaactcgctgtaacggcccagttttctggagagattcttgcagattttgctggatagacctcagtaagatgtgaggaaggtgggtgtcttcacctgactggttcctctgggcacttgccccctctcccctcctggctgggtcctggtcctggccttggatagctttagccaagagtggatctctctttacttctgtttttttgaaaacatggtcattttggtcttggctcagctcacagtatcctcccagcctcccccagttttaatttcttccagggctgtgcccgtcctgtaagcaatcgagtctgctgtcctggaaactggaggaactcgtcagagaaaaagaattatttgagccgattgtgagaaattgaacaacggcaggaggaggaaaaggagagaagaaaggagccgacacatctaaccgggcagctggggcactgtgcatacagatgcaggtggcagctgggtccctgttgcagctcattactgagcagcacatcagaggccactgggtgagggtcacggacaacctggctgcaagcactgagctttgaacagggctgttctgcaggacgaacagcaccctcctgccacctgggtactgtggctgcggaaccaattcccattttcagaaatgcagactgcctggggtacaaccacctaggggcctcatttcctccttggcacctatttcaatgctgctatccaaccccaggatcttaaggaaaacctcccagcggggtgaggggtatggggggtggggaatccgagcaagcttgcaagcagagaggcaggggtggagggagagaggagcacccctcctctggtggtgggggaaggtagtctcagtgtagggacagaccccagcagagtgaggtaaagacacaaaagctgtgttttccacctagacagagaccgggagcattttgttggcctgcgttttggagtgggttccagataatggtgtgaatagcatgcatggtggaactctgaagggcaaggagtcctggatcagttcttcccaaccatgtactttgtagattctcctgcatttcttcctccttgctcctcccctgccctgtgcagccctctctccgtttattacagggtgccttggcagcatttcccaggaacctgcccctgcccttgagctgatcagtacgtacacaggaaatcgtgtgactgtgcagcacgaagggtctgggtcccatgtaaggtttgggtgtccctcaggagcattcagagcccccaaaggagcatcctttctaagggtcagagttatcttgtcctgataactatgatctgtggctaagctctcaaaatggctggggtgggtggaaatgtgaaaggggcagcatgtctagttgctggtaacctatggatagagggagctgtggttcctctaaggccccagtttataaataaatgaacattcattaatgtaaaattaaattagaatgaaatttctcatccagttttgtttagaaggcagaaataagtgggttggctgtggaattttgctgtgggtgctggagcgtctagtcacaagatgatgataataatgatagtgatgtgctggtgcctgtcccccccccccccccaatctcagggcacgcattaccaccttgcttttacaaaggctcattgaggttaaagggctagctggaagttacttggcaaggggttgagtgcagaagactgacaaggtctagcccattagacctcgagcttgccaataaacagaaagtagaccaggattcaggagacctggattccagtccttgctctgccactgactggtgtgtgggcagaaactgctctttcctcattggcacgaatcttccagttctgtgggtctgacttaatatttgaacatagaattgatcgaaggcagatgttttgctactgtatgtaccgccatttatggccaactccctctgagctttatttccgcccccctttatggagtgacttaaagctgacctttaaaaattaaaatattaaataaaaagagtcatttctgtatatttcctgctttatttgctggaggggggcttgcttgggagagaatattttccttcggagcctggctgtcgggcatgcagattttggggcctgcctcgggtgggaagcaggctcctggtgtcatccaccttttctgccgctggaggagcaggttgtcacttgtctgctggggaaaagaagaggaggtttgcagctcagtgacagcagttccacttatgaaactgacttctaaacctgcctgctgaccaaagggagaaggggcccgaggtgggaggggtggggggagtggggggattggtcaggcatctggaagctctgcaactaggtttctctgtagcctggggcaagtcatttaacctcgttcttccaccttgaacactttctccccacctctctcctcccctcctggagactaggagaagtaatcagtggctgtttgtgagacaagtcctagcttgacccaagttacttgggcagaccttgacctgggcgagggccaagtggagctcaggacttgcatctgtaaaacagatcaagaaaatgcagacctttgtggttggccagttccagagtttcttttagaaaatgcagacctttgtggttggccagttccagagtttcttttagaaaatgcagacctttgtggttggccagttccagagtttcttttagaggaacggcccagccttggtagtgttttgggaaggagcgaacatttctggagcagagggagggttgggtgtgttgtggtctgctccgccagagggcatttgggaaagggggctgagccttcagggcaggaccttgaaatgcccctggctggggaattgctcaatgattaggctctcctcagagacgggtgccctttccccagaagacagcttcatattctcaagtgcaaggcacaaaaacaaatcgtcatccgcacaccgtgctcaggtgcactcccagaatattgacacaggatggctgaggccaggtcccaggtgcagggccctgccttcccgtaccgttctggggggtcagcagcacctcactcagcagctcttccagggcggcccagtacttttccagctgcctggagttcatcttcattccaatttccacaggagcagtcaactgtgaaataaggtagagttaacaaggaggaagagacgcggagagcgccattaacccctgggtgccttacaggtggcgggagggactgctcagctgtggccccgctgttcctgatcctccttggacttccaggccggccagggaattgtggcacctcctcccctgcactcgaggtcgggggctggatctggaagtcgcacaagacttggctgggaggaggatccacaaagttccctactggggaagctgggatggaggggagcagtgggcaggaaatgccttggcttttcaggtgggaggaaactctccctccccctccgcctgaataatgacagccaacgcctggagccttagagctgggagtccttccggaagctttatgtataagaagcctcttagtaaccctatgaggtagggacgattagggtctccgtttcgcagatgaggaagctgaggaaaaagacgtagagtaacttgctcaaagccacacaggtgctaagtggcagagggaaaaggtgtcaatcccagggggcctgattctagccagcaggcgagactttctctagccctatggggacacaatagagaccccagaggagccgtcaggagaggctccccaccaagagaggtgggtgtggcccagctgggggggggggtgtgtgtgctgaccaatcttgccgtcaccccagagcttcctggctcagtgatcttggttcccacgccagccggcagacgggcagaagaccggggactccctgcctgtctggagagctgtacgcaggatttcccaggggctccctggcggtggaaaacaggctggggcctcccgaagggccacacggagggaaggtcactgtgggtccggctccagcccgacccacgccatccccttgccgcgtgctacgcctttctctccgacatcagtgtccttaaagtcaggaggctggacagaatgatccagaaaggacctcctgacccatgtgtcctggtctaggcagctgggaacagcctccccaagatgtcccacaggatgtaactcgtgccttacactgccaggggtgctggcattgggcagctccgactgagctcccctttgccacctgaaccagtcactcccagttcctcctgagagcccaaggagcatgtgggagaggaaggcacactgccctaaccccgtcgcccggtgtggtgacagccccgaggtccctctctgggccgtgattggcctccctgtttgtggtcacaggctgtgacaaccggccagggtggaaggatccgtggccggtggctggcgggaggcggaagacctggagtgcagcagctcagtttcaccctgactactgtgtgaccttggcgaggccctcactcactctacttatcagtctccccacctcccaggcccctgggagtgtcccccgctcaggtccagcagcgccttccttctccatccacactcacctcttctaggatctcacccagtcctggcttgaaattctagcaaattgctgatgcctcccacgtggatgtgtccagccctgagctctcctatatccacctgcccgtcccatgcctccacctggaggcatcttacagttcacagatcctgttccactcgaccttcctcccggcctcctgtggccaatcgtagggttaaccgtctccatgagtggcaaatccatccttctaggtcttctggcccatgaagtccatgtttcttttctttttctctatagcctaaattcatagcaaaccctgagggcctctaactctaaaatatttccggaacctgaccactctgctctgcctccaccatgaccaccctgggctgttggatgctgcagcagctccttaggggtccccctaatcctgcctttgccccttcaggctgttctcaacacagaagctagcgagacctttttttttctccgtaaagtaggctccatgaccagcatggagcccaatgtggggcttgaactcaccaccctgagatcaagacctgagctgagatcaagagtcagatgcttaaccgactgagccacccagatcagatgcccctggggaaactcttttaaaatataaatctgatcatgtcccttctctgctccaaagccctcaatggctcccacgtcagcagaatgaacgcaaagtccaaacaatagcctacagagtccactgtctggtctcacctcccactttttctgactccctctgctccagccactccaacctcctcactgttccttcctcactgttcctgggatgcaccaggtctacccctgcctcagggcctttgccctggctgttcctgctgcctggaatgctcttcccccagacatttttatggttcagtgcctcactgtctccaggcctctgtgctaatgccatgcactcatgaagcctgctctgaccaccctatttaaatcacaactcatccatctccattctctgctttacgttcttccatggcactactggccacaccgtgaaggttgcttatttatcctgtgtgtagtctgttgccggtccttctggtatctcgtttccggtcccccactcgagtgtgagctccacgagcttggaggatttacctgttttgttcaccactttattcccagggcccagaaccatgctttgcacttagagcttgggaactatttgtcgcctgaataagtgagtttgtgaaattaaagaggtgccctggacaaactcaaggctcactctgaccgctgcaatctgtgctatcagcactcagcactgacccgggggctgggggctgaccctgtagttgtctcctaggttccttgctagggggaggaactggcaccctcgtcatctgtcccctgaggacgacagctgcatcctgactgatctcctgcctccacttgtgctgtccaggatctttcaaagtcagatcaggtgacttccctgctttgaaccccaggtgaccttccagacatctagcctggacaccaggccctgccaacctcttgttctctcctggtgcaccctcgcctcgaggaccttgcaccttcagtgtgcttcctgagcagggcctttgcactcacctttccttccttctggaatgttcttgctctagctctttagctctttgtatgagaggctccttctcatcattttggtttcaaatcaaataagtgtcacctcttctgaaaggccttccccgacccctcccccagccaaaggaatggccctgaggcccatcccatcatgctctatcctacctcctatgtggtgcctgaaatggttccttgtctcattgttggtgtctgtctccctttcttctaggatggagcttgttgccagaatgtctagttcgctgccgtatcctagcataatctgtggctggccgggggagccattccccagcgaggtttctctgcatcgcccccctgcctgctcaccttgataacttggttttcttcttcctctgtgggctccacagagtccagaggccccacttcctcagacttcttctgtaagatcaaggacttcttttgccctttgttgcgctccttttcctaagggcagagcacaaagtcgcacaaaaccaaggtctctccactgcctgtctgtgcccagggtgccaagcagcctggcttcccacaggccaaaagaatccctcctccccaggtgcctctacacaagaggtcccccaaacccaaaggctcacagaaccatccactaacagatcaactcgcagaagattccattcctttgtcgctcaaacactgcacccagattgttactgttaattaagttaaaatattgaaaataatggttgcccttcatacatattaagtgtggaaatatgtttttcttagcagagagcctataaaagcagtggcaagacagcctagcctgcgagggcaccatggggtggcccagaaactggagtctctgggaggtgatttataagaggcgagacagggagatgaattatggtggaaggagtttgcagcttcttcataaaaatcctggtgcttggcaattatgaggcgcaaaaccagagggcggattaatgcaaagtgtcctttggttgccattttgctagtttatgttctatcgagtttgactgtttctgcccagccccaaatcttatgtggcgtcctgcttgccgggtcccagggcactgaaatcagaggcacctcagtcctttggtttctttaatggcacccttgggattcagctccaggccttgcctgagacatggtgattctagagcaatcagctgtctcttctggggaggaagccagtggtggagaaagtgtgtttagggagcctgccgtatctcttctggatttccatgggtacccctgaagaaggggggctggggccagccttggctctgctaaggacccgggccactgggcctgtggcagcctgccccagacagagcatgtgggtccagaggccacgtgaccaaccagagaaccgattcatgtctctctgtccctattagagccttgatctcagactggagggatgtggaagacccatttcatcatctccttgggttagagagaaacgaatgactgcacaagatactcagaaccccttgacatctaaagtaaagggcacgaggagccaggtctggcggcccacttttccggaggccccactgcctgggttctgttaagcctgccctgttttcttctgggttcttgagtggcagcagctcgggtgagccttccacgagcagcatcttctttcccactctgggcatttgctcccacagcatcccctccttctctctgaagacccccagctcggctcacccttcccctgtaggcttctgacccatgccagcccgtgaagacctcgccctccatggagctcagcactcaccatcagtggcgcttgctgggcaattaatcatgtcctgtctcgtgccatctcccttgttttctatcttagtgaatttttcatatgtttgtaccttggctcctaagcctcctccttgaagacagaggttcctcagatctccttgtatgcctggcctctcacccagggtggccctttgtactgcagagatgctcagcaaatgtttattggtttgttaattgaaaatctctcccgaaggccaggcaggggtgggaaaaggtgtcgcttgtgggagccgctgtcacttttgagtggtgttagggaggagtgaaggtagaggagcggcagctggagtttggggtgagcttgggtccaggtcttccatgctgtcctcaacatggctggcatagctgattaaatgtgggcttatcgaagggacacttgtcccttagactgaggccacctcagtgctgaataaggttctgagtcacctgggctacacgggggaaccaggcagcctgggggatttcctacccgaatcttctggagctcactgtgggtgaagatgggaacgaaggcttctgtctgggaggccagcatggcagccacgtgcaccaccagcagagcagccacggcctttcgggacaccatcctagggctggacagtgacaagaagctccgtcattgggttcaggtgcacaccctgcctgcagctgtgacctggagcgagccgccgagcctctcctgatgtggataggctgcggggctttactggagttccgagccccttctgtgccagagccaggggaggtgagcgagcacccgggagaggcggcctgggccctgccactggctgggtgagaagtgttctacatgttgggccccctctttgttacaggtcaggtcttccaaggccagcagggctcctgaagtgggaaggactccatgtttcagaagaaagactagattatccacagaattgtgccccaattgagcccttctgctccctgggctgatcgggatgacaaaagagatggacgcaggctcagatgaccctggctgtccccgagagcaccagataaggacactgggtctggaaagaaaggggctggaaacttctccccagatggaggcagagtcaaatggaaagttccaggaggaaacagcacccaagagctggaagcagggtctctacccctatgggggccagccctgggtctggaacaagattctcctgagctccagctagctgcatgttggtctagaaagagggagtgcatcctttccctgcgcccactccctgcacagctgagaatgccaccagtgctgggggtgcctgcgtgcatgcatggggcctcctgtgtctcaggaagtgggaatgtctggaatgtggatagaaaggtgggctgtggacccctgccggggaacagaagggggtggtgaccccaggagtgcaaaagcttaaaaaataggctcagttgggccgaatttgggctggtcaggatggtcctgtggtgggggttgggggaggagggtactgcccactgggtgcctgtctcagttgattccttaccctggtgcatggagtcctcttccaagccctgtcccacaccatccttgccctcacctgggagcaggtgcaatctggggaggggaggagacctagacaggcgaaggggactcattcagaggtggtaggggctggaagtctggccttctgaggcctgctgctcggccctgcaccccactctgcattgcctctgcacgcagaaggcggggaagggcatggcgggggcagcctgttgaatactattggagcacccacattcctgtggcgagtgggctgctgagcgcagggccaggcaccagagcaaggaggggaggccaggggcagccctgccgtggcaggagtggggtgactaaaaggttgcagaggaagagcttcagaggagtcagctcggggctcccacagccatggggcagcctggattctgttaataggagagggtcctgccctggactagcctccaagcttctcataggtccaaccccagttacccctgtggagagaatcttccaaggctgtgggcttgcaatcggcctctcctctgagacccttctcctgggtcatctgaagccacctctactaagcacctccctaagtcccctccctttgccttctttcgatccttccatccccatcctactttttctctccatctggctaatactccatgagaaagcatatgagagcatgacagccaaagcttctcatgccagctacatatgatttcctagtaaggtcagaagactgccctccctctgaagaccacctctcgggaagccaagaccctgtccaggagcccaggaggatctggaacagaacagaggatgggcggagtggagggctcccgatcatgattccccctcctgttcctgtcttttccttgtggagtctgtggggccccgatttccctcccagtggagatggatgtgtcacatttatggcatcccatttccttcatggagatgctatagagcccttttcattctgatgttcagatttaattcacttcataagaatcaataaaaactttaaataaaaaaaaggcaaaatccaattgctgctcattttcttgatccaactggcagttggcatgtcacctacattcatttgtgtgcctgggagctcggagtgggagagcttttcactgtacgatgagatactgacttccttttctatctccagggatggggctccagccttcaagccatcagctctggatggggggcgcctgccccctccctcctctcccacagtagcacaggctccctaggcaccagcttaactgctaactttccagagagaagcctccgtgccgaatagggtcctgtgtccatgctgggctctggcttgggttcctggcctgtagtcaatggcaccatgcaccccagacagcctctcctttgccagaattgtacccaccgctcctccatccagcttctgtgcccaggaaagtcctgcttttgctcacactctgtgtggctttaacctgctcctctggaaatcagctcagcactttcagccttagcctagctaagtatttgaaggtggctgaggggcatagatgtgatctctggactgggctgggctggctctggtcacatcactgttctgtcctgggtcttatgctaaccgccccctcacccccttctgtagctactcacagcagcacgtcggagcagggctggcggaggtggtctctgctgtcctctgctctctggcagatctgaccggtctttatatctggtgactggctggtctgatgggccctcgggccctcccttaggagcccgttaacctttggccaccccttgggggctttgggtggagagcctggattcttgaagctcatggaaacaacgggcaggacctgccacgccgtggacttctggggctttcctggaaggcctctgcctcggacaacagtccaggtttggtggaggccaactcccacccagatggcactttgtgggccacttagaactcagctgccactcagagggtcattttaacaaaagccctttcttttttgttacttaaatatatgatgttgttgagcggctctggaccagctctttagtgatcaggttctcagttagcatgtcagggagagtgctgtattagaaagatagcttgtcttcaccctcacccccaccctaaagcccctcacaaaagaaagaaagggctcaggggtgtgtggcagtttcaatcaactactgaaaagaaaatgcagtccagactcaaggctgtggagcaccagaggctctgtgggagccaaggaacagtgtaaggtgtgtgagacagaaggtttatgggtttgtagcccaatggggaagaggagccgccaatctgggaacatctcatggtattgcgtaattcaaatgaccaactgaaaaattttaagagggaaggggtgggacgcctgggttgctcagtggttgagcatctgcctttggctcaggtcgaaatcccaaggtcctgggatcaagtcctgcattgggttccctgcatggagcctgcttctccctctgcctatgtctctgcctctctttccgtgtctctcatgaataaataagtaaaatattaaaaaaaataaagagggaaggggtgaatgtaatcaggagtcaggcagggcttgcagctgcagccggccagtgccatttctggaacatggttgtgtctctggcaccactcagggaatgcttgacatgcatgttctaattaagcctcaacagtgccatgacactggtgctcctgtatctcccattttacagataaggaaactgaggcacaattaaatagctcctctgtgactcaactgcaagatcactctttctcttttttttaaagtaagttccaaccactatgtgggtctcaaattcactaccctgagagttgcatgctctaccaactgagccaaccaggcactcccaaggtctctttacacaagagtcaaggctggatatggccaaatgtggcagtgggtgggagtgggggcttctgggatgcagggcacatacagatgtgcaaaggatggcacagggtggggccatccctggaagtcccctgtgtgggttgggagagggtcgttccagggtctgaatgtggggggtttaatgaggggagaaattggggccctcatggtgcctggaaggggcttttcatgataatcgtgtcatgctggaaggtcacgcagtgactgtactagggtacagtcacgggggcaaggtgaatggaggctgggaggtgtctcagacagaccgcgaggtccagagggtctgggctagcagaggctatttccccaggtgaaccttgctggccattagcacctttcacagaggctgctccagacatccaggtggggactgcttctggtccaggaacccctcccctgtcagtcctttagtcggctgtggcttttctttcagaaaaaaaacaaatgtttgcagtgcttcaaacccaacccacataacctctaaataccctgctcatcaaggcttcttgccagcagggtctctgcattccactccaacaccaggtcaaagctcccccagcactctggaccgccaactgttgttgggcatgtgccctgggtctctgcagtctttgagatttatctcagaggaattagagcctgaaatgccgggacttggaactgagatgccatccccactctgccccaggttgcaagagtggcttttaagatgtcgtcacagaccttggtggggacaaggtggtgtgagggctgtgaaggagcccactgccttcccaggctccaggaggctccatctgcaccacggatttctaggggcaggcgtgggagggaaaagggtcgatatctgtacctctaacacatagaccagggaccaaatccagcttgtgagctaagagttgtttatagattttttaataatttaaaaaattagaaagagaagaatatttggtgacatgtgaatttagaagacattcaaattcttgtggccataaacaaagttcattggaatatggccactctcattcatttgtttgttgtctgcggctgcttctgggctacaagcaagggagttgaatagttggaccgaaacattaagacccacaaagctgaaaatacttattatttgggacttaaaaaaaaaatatatatatatatattcattcattcattcattcatgagagagacagagacacaggcagagggagaagtaggctccctgcggggagccggatgtgagacttgatcccaagacttgggatcccagcctgagccaaaggcagatgctcaactgctgaaccacccactgaccccttatttgggtcttctagagaaaatttgcttacccctggcctcaacagtatctggagtgtggaaggtgcttgttatgtaaaaaataacagccagacatcctacggatcagctttttaaaatctcacaacagggatccctgggtggcgcagcggtttagcgcctgcctttggcccagggcgcgatcctggagatccgggatcgaatcccacgtcaggctcccggtgcatggagcctgcttctccctctgcctgtgtctctgcctctctctctctctcactgtgtgcctatcataaataaataaaaaaataaaataaaataaaatctcacaacaccattgaggctggtgtgatatcatcctattctacaggtgggaagactgaggtgaaacaatgagcccaaggtcacagtgattaaaatggcagggccaagattcaaagaatccagattcagagtcccctgtgctttttttgccacttggtgtttgttgcatgactacatggatgtctatggcaggggaaggcccttttaatagtaccccatggaaattctgcaaacctgccactttctcataagccagccccccacaaggcatctgagcatgacccattcgagctgaccgactggatgacaacacaggttgtttttgttctcagaggaggactgctgatggtggaccaggccgcctgccaagcacaaagggaaagtcgaatcctctccctgtcacccctctatcccaggttctgagaccagtaccctgtctgttgggccagtccaggctctagtccagagacactctgtctgagaaatgataagaatctcggtacccgagacaggcctgtgatgagagatgggaagaagggaggggctgggaacagtaaataatccgggatcaattttctgggcgagaatagcattatcctggagctttcctgtgattcagtacttttgatccaagcaatgtgccatatttcagtctgatatctgcagtttggtccagaaggaaggcaaatcagggttcacagtgagctgttccttgtaactcagaggaaaacgtggagcagaggggtgctctgctgtggcctctgctctggagtcacgagctgcaaggatgaaggggcctctcccttgtgcccctcttggctgtgggtcttgaggcccagccctttaggaaacatctcaccagaagaatatcctgtctcctctctgtcaggtgccttgatcctcgaggtacattttcttctgtcacagatagtgcttcagaaaaggagagatgggtgcataacaagcctaataacggctactttgcctttaccatgtacaccgtctcgccctacaaatgctcaattagtggctatttctcctgcgaggaataaataattggccaaaaataaaaggaaggcataatctgatgttctccattctccaaaagggaaccgctatggatgtgcaatggcttaagcagaggggaggcaaaaaacctaacccaagtctgagaaaggaagttcacaaaactcagaggaaatgactcaaaccacatgtggccacttgattgcctctctcccccatgttgggcagaagtattagcagtttagctctcctctcttcatgaccttgaaaatattgtttgctgggcactgccataacatcttcattaatggcctggaacagggaggcaacggcatgttaattaaatttgcagatgatactaaattgggagatgtagcaaacatcagggaggacagagccctaatacaagaagacgtcgggaggttagaactacaagctggaaaagtccagatgaactgctggacatatgtcatccaggccccgaggacacgagatgaggatgtgggtcgtggggagaggccagcaaagaaggaaagcggcaactggggtgacctggggtggggtgggggacatggtggtgcacacatcaccctgtttaccagatgattccctcaaagaggcagaggacggtggctagaagaaggcagagctcagatgagtcaaaattgccccaaagttgctgggaatgccaaaacttgaggtataaaaatgaaaaatgaaaggtttcaaaagaccggcttgtccagaatgctggtaaggtttaattgtgcgattgctaatgttgagcagaggccaaggagaagcaaagaacaccgccctgcctgagtgtcaagtgcaggagcagcggagggagaggggcggggtagccgtggctcctcctccaggcgcccttcctggagctagaggtgtgtgaccccaccccttaccagcagaaatattagttgatggtgatggcgtttaaaactagagcaagcaaagcactgagagatgtattttaggcaacaacatgccccggcccatcggacacatgctttggtgacctgtggggtatttttattcttatccttcaattgctcaggatttttttcaaaagccacaaatgatttgtggagaaatgatacacagcagatgccatacaccaagagccccctggtatggaaatagtgtgagtggaaaggaaaacacgaactctgagagagtctgtccagaattaatttccaatttgttgagcttcctgtgtgttgcatctgatactcgaattaacgctcccacatctctgacttcctgttgagtccattcaatgtgcactgacaaccctggaccccaaacaatccaataaaatgctttcctgttcagctcagcatcgtggactattgacagtgtgcacagaatttggggactcggttgagttttacaatagcattcctgctgacttcccagtcaatacctctctgggtggttaatatactcctagaaatgtcccagtcactaacttgcttctgggttccctttctatttatgggggtttatcacaaaagctgctgttataaaacttcaaaaagaggtcacataactttttttccagggacaaggatgcaggtgctaagagctgaaactatgggctggactctctggtgggatctgtttttttctattcttactgttaattgagctggtgacaccaagtctccttttagttgaattttaaatatatgtatttatagttttatagagatgatggatgtgtgtgaagagaaagcagatggctttggaagtgacgaattaattatgagggaagccaaagcctctcctttctcctcaacgcttcagggctggtggctcccagcgccctgatccgagggcatgaggcattagaacaaggaggcagagacagctgacacattttcataaatgattaagggagtctgtggttgggaaaagtttgtgctttcatgtttaaggaggaaagaagtcttggtggaggttttacaccatgtggatgggaaggcaaaatcatttcgaatgtcagcccaatccagggtagattcaggtaaaaggagctagctgtccaaactttttctcttccattgcatcaatgaaccgcatctgttgacttccccatgcccactgggctgacaggttttggaactgggaggctgtcaggcgctgctaatggaaacagtgggccacacgcagcttctgccattgacaactgtggcagtcacacagacctccttcccaccagcccactctggaggcaagtggcagggcaaagacaagattctgtttcctctgtggtccatggctggggctgggtggccagggagggtctgggcaagtgtggaagacagtggaggagggcgagtttacccaggaattgagcagaaattgtttgatgctcaggtctggtgctcaggagccattcccagctccagccaccttcgtagatgtctggctgagcagagacctgatctgtcaccacagcgagcatgcttccgaggtcctgaacccttgtgatctcttgtgcggcacctctaagtgaggtatgggccaaatgagcaggtcctaaattctcgaatgggttggtagggcaagccagaggcaccatgggagccaggccagggcaacatgggcttggagagagtgatgtagacagtgcaagtcttggctactccgaccagggtcctacacaataacagccctgggcagctctgaagacagggatgatagagctcatcttcaaccccttggcagcacctggtcctccttttttcattttctgcttcctagaataatatttctcttggaaaaacaaccaagttactgagaaactgcagccaaacaacactgcgggactttgagagaatgcccccaggtcccaggcaagacccaatcatggtgataattcatctaattattattcacccagggctcatctcttgagtgtttgactgtcagatctgaattccaccccaaagaaaagctatgctcagagaagatttgcagttgttctttgtaaaaaggacagaaaaaagggagaatttatttaaaataggcacgtgtaaactcccaagggacaggaggcataaattgcaagaacagctccaatcaaacttgaatcctcctggtttagaattttactgagggggatggaatatgaaagagaaccgagtatccccactcacttccaagtcacatcaaggcagtcagcttgtgacagaaagattacctgcaggagggctttatttgatgtgaaaagggttaacgtcattttagcagattagaaattctctgggtcttttaggaatgaaaagcaaattcaaagcttttacatgaaggaatgtgcctaaacccctttttagacactagaaacaaaaggggggagtggccgggcttgctttgtgcatgaagatcatgagttttttgattctcattttaaggatggccttgtagggctgtgagtaagtaatggggggtgaggggttgagactatgttaaaagcctcagcctttgaaccaatgaatgaataacagtaactgatcacccatgcagggttcagctctgtgctaggcactgggtggggtggggcagtggacacggatgacacaagcacagcctatccctgcaggagcatatattctggttgaaaaggaaagctgacagcaaggaaccaatcaatgctgagcaccctgagatggcagtaagctctggaagactccagaggggagaacttccttaaggccagagtcatcagagagcccttccaatgccattgggatgggcgagcggcgtggtgggaaagcatccaagcctcagaaacctccactgccgtgtcaccatctctccctttcccttttttctctccccttgttgctgcatccttctggcctcagcacctccccacaccccacctccaccctctccagagactgaagacacatttcaggccagccgtgttattggatttaaatgatgctatggctttttaattcttgctttaattgcctttccatgcagggcactgaggatggttgattaccaggcaactgggcctggcggtgacattctttatctgatgttccttcaagctgcagtgaaagggacatcctccagggcctcaagtgtggacttttctttggcctcgccctcagcatcctccagcctccagcctgtggcagctcgggcccagggctctgtccgtggtgctaaggatcccaggctgccccacttaatcaggctcccccgccaccccacggcactctttgctccagctttggaacttggagggctgaataatttttttttattaaaaaagttttttttttttttttttttttttttgagagagagaaaaggaggcaggggttggggcagagggacagggagggagagaatcccaggcaggctccaagctcagtgcccaatctgacatggcaatggatgccacgaccctgagaccattacctgaaccaaaataaagaactggatgcttaaccaactgagccacccagacagccctggaggacctaataatttaaacaaatggatatatttccctttcccttatgggcagcaaaacattccctgctgcatctctggaacaattacccctcattcagtgtactcagcaaccctgctgggagctaggagagcaagagaggagtgtgggcagcctctgctgtggtgttcccactgtgggtggggcctgccattagtacacaagagagaggagccccgagaagaagagccagctctggtggtcatgctcagccctctttcccccagcctctggctttgtcaagctctttgggagacagtaggtccaatttgtcccctatcattgatgacaggcccagcactgtgccaagaagaagatcttactttgtcctaaaacacagctgcttagcgaggccaggctgtcacagagagcagcaccacacagacccacgcaggcagatgctgcgtggggatgagagggctcattaaaggatgaaacaatctgggtgtggtgctaactatgctggtgggcagcagacctttccttcaccctccaactcacaagctgctgtctccaaggtcctgtaggaccccttcaggcctgagtccagcttgaagctgtagtccaacttgtcaattgagatgaaagaatgaacactaggggtaatatcactcccagtcagggctggaccagccaaaaaacctgtagaagggcaaccccactagttcacaagtagttaattagcacaccctaaaggtaaaacctttatgttcctgatgaatcagatgtactcgatgaaatctctaacataaagaataaagatatgtttcagattccaagtttcttgagatggagaagacctctggggaacaagatgaagctccactagagcacctgctagcatggcctcatggggctccaatcaatggcatctcccttctcaggagaccccaggcccctatttttcccttaaaaaccctcactgacaagcccctggaggagtttgggacttttgagcactagtttcccgttcctctgagtggcaccacaccaataaatagcctgtatttcttcactgcagtggagtatcagttttattgacttactgtgcactgggtggacaaattcttacttgattcagttataagcttaggttcccggaggggtgcccatgccccacctccacttggcccctgttctatcctgctggctgactctctgggtttctgtcttgtctccaaatgttcttcacttcctctctcttctgttgtacagcttctcattgagtagctacgtctgatgaacccctgtccacagttgtcagccacttctttctcctcttttcagccccctctccccaccaacttaatccacttgaaatccttctgtagtcatttgatccatggtcacagtcaatgacgaagggactgagtgtccataaggaacaggaatgtagtccatctccttgggggctcaactctctctgggacagaggtgggcaggaggaccaggtccaggccgggggtggggggcaggagaggctgtttctagagagccaaggaggccactatctcttcaccaagcttgtggaggccatctctaatgtgtgtcttctctaactgcaccaagaaattctgtgacaccagctggtgtccttcaatttaactcaattctgacactatctacctagagggctcagtcccacaagactgccttcatttcagatactaatcagaagtccaggttgtgacttgtgcttctgactggctggcaataaattgtagattccccatgagcctctcctaaggtttgtttacgttgttcatagaagtcagcttctgtgactggtaagcttatgtttaccagtttattatgaaggatacagataaacagccaaataaagagatgtgcaggatgggatctggaagggtcccaagcacagaaccttctctttccaaggacctgggggtacatcacccttttggcatgtggatgtgttcccaactcagaagctctctgaaccccgtccttctgcattttttataggagtttcagtggcaccattgattaaatcattggccagtagggactgaactcaatctccagcaacctctccctttccttggaggtggaggaagggggctgaatattccaatcatcttagtcaagtgattggttcactttggcaacaagccaccacccttaggtgcttttcaaaagtcaccttattaacgtaaacccaggtgcattagaaaggggcttgttgtcaataacaagacactccttttattttcattgctcaggagctatttcaggaaccagaaaacaaacattaacaaaagatgccccagttgctctcctcacttgggaaattccaaggatttaggagctctaagccaggaaagaggaagaccaactatgtatttcttattataaattccattatcactccaccattagggagcactctcctaaggacaatttggtggtgtggaggggcagagacaagagctccctccaacccagactatctaagctggagaggaagatgaggaggcctagagactggagggaagccacagcaagagggaactcaggagccagcagaatgggagtactgacattaagcctcacaacctgacactgcctgtgtcccccctaccatcactacactgtcattgtcagagtgtgggtgtgacaggctccacctggcagtcccactttcattgtcatcattttttaaaaagattttgtttatttattcatgagagacacagagagaggcagagacacaggcagagggagaagcaggctccctgtggggagtccgtgtggtactggatccctggactgggatcacaccttgagctgaaggcagatgctcaaccactgagccacctaggcattccatcatccccagcattttaattagctgatgtaacatttcccccagaacatagggttgattatttcccccacttgatttcctagggtttgtctcttcattgtttttcttcttaaaagaataaagccaaagataagcacctcttttatgcttttgctgaaatattgctgctgttggtgaagggggtgggtggtgatagagaaggtgcatttgggtgaagggatacagagggaccagattcctgtgcccagtgagggtgagccctgcttctagaagaagcaccccctggaagatgctaagtctgggtggggtatgactggctttggagggtgcacccttggggaaagcaggcctgttccataagctaccttgacaacactgtagctctgagactgtgctgaccctgaaggctggatttagggtcacctatctcagttgactagagcatgacctgggcacctactagacacaagattaactctcttaccccatccttccctccagcatcgaaagtgaattgagtaaggactgtgggtagcagggatcatgagacatctctcctatgacaggaaagagcttgaccatgttctagaaactgagtaggtcagcatgtgtggagtgaacccaggaggtagctggtgggaagtggataaactgggggtgaggagaaggcaagagctggatcatgcagtgcttgaaggccacctggggatatttatcgtgatttggctgtccagcatccaccccttcctccctgttggggcagtgagaggaatctggtcagattctctcttggctgaatttgcttggccaatttctccctcctgccctggactttgagtctcaagtagccaaagatgggaagaaagtcagtctctctctggggtagtgatggggaatgtggggcctagcagccttgagtgtgttctgtcctggccattgatgccaaaaatgtttcttgcctgttttccacacctagagtcttccgtcatcaattctgaggcctgatattccccagaagagccttcttttctcatactagacagaaaaggtggtattacatatggatgagtacaacttgactgatcctggatgggagtctggattcaaatggcatgcctttgaggggttttaggcagggatctttattctttctttctttctttttttaagacaaaaagagagtgtgtacgtgcacatgagggagggaggggcagagggggagagagagagagagaactttaagcaggccctttgcacaacatggtgcctggcatgggtcttctatctcacaatcctgagaccatgacctgagccgaaatcaagagtcagatgctcaaccaactgggcaacccagtcactccaagtagggattttatttatttattcatttttaaaaagatttttaatttatttatttgagagagagagtgcacacttgagagagagcatgagcagggggagggcagaaggaaagagagaagcagattcccccctgagcagggatacctatgtggggcctgatcccaggaccccaggatcatgaaccaagacaaaggcagacacccaactgactgagccactgaggcaccccgacagggaacttttaaaagatccttctggatgctgcatggagagtgggttatggggaggcaggaaaagaagcagggataccatcttggaagctataggccagatgggagatgatggcagcagggaaaccaagaactcaagatctatatacttggagatggcttcaatgatgatggatagatgctaaaaggaatcaaggatgctgcttagatgcctgggtggctcagtaggttaagtgtctaccttcgactcccatcatggtcctggagtcctgggatcatgcctggcttcctgctcagtggggcgtctgcttctccttctgcccctcccccactcattctctttctcagataaataaaatctttttttaaataaaaggattgtgctgaggtttctgacttggatactgtgtgggcagtcctgaagaggactgaggacagaggagattcgtgttggggcaggtggaatcaacagtttcatgttgcacattttaagtgtgagcagctatggtcagtgacagtctaagcaggaaaacagaacttttgccaggtagttcaatggagggaacacaatatgcagaatgagctaaaacaggaagtgggaaacggggatctgctccttctcccccactcctcccacagccccgcccccaggatagaggtcctggggtatgagcccaggacctgaggctgcctggtgggagctaggatgtgggcaagaggctgcccaaagggtctcccaggctggggaggctgaggccacggcagagatgtggccactgccaaataagcagcctctggcagagacaccacaaatcagagagaggaaagaaataccctggcttctcctcttctccctcctacgggtctctaaccattggctgaatctgattggaagccagctggccaggagccttggaaatgtcgctttctgggggcagctgctgtgatccagagaggagcaggagtgcaggcgaagcaggcagaggtcagacagatgtctgccagaaatcacagtgacaggttaactagtcttctcccagaaattatctgtatttctaacgtgcctttctcaaaggaataaatcactggggaggggattcaagcccacaggacaggtgagctgggggacccaagaatctctcctagtttccccacagagagactgaatgtgacctatcccatctgggatggatccaccttggaagtcagaaccagccttgctcacattctaagaaagcgcttctgctcgccggctgctcccagcctccgtgtccaacatccttctgcttttctgcagggacaaggaaacagccgacttgtcagaaacctgcctccaggataaagagaaggaggagaaatgtgactaggaaagtcatcaaatggtgatgacagctgctgcttaatatggaaaggggatcctaattattgcttggacaagcagggaagtaagaagtccatcagccaaggtggagggcaaacaggcgagtcagggcaggctgcctcctgctaagaacactggatcccttcacaaaggtggacaaatgagttgctggtgaccgaaggcacctgagccactcactctcgacctctggttccaccgaggagcacgggtggcgtggaggtggggcggaaggcctagagcagcattctggctgcagcaggagagtggggctttgggacagccttgtgcaagctgccacacctctccctttgggccttcagttttctccgccttgttaaccagatgtcccctgcttctctggtctacagagactggacttcctgcaacgcccagaccacaggctcggagccctcccgttgtgtgcaggaagcccagtcttgcccaggttcccctccaaatgctccagcatctcactccagatgacagctcttcctggggtctgctgtctctgcctcatgtgggcattttcaggccaattccttccttctcaaactccttccctccagctgggatacagttctaattctcataattcccaaagcctggctatgagtaggctctgggatctaaacaagctttacttggggcttagccagcccctctccctctccctcagggtgattctcgtcttagcttggatctgatgctacagacctgctcataccctcaatgagaatgccatcggccacagcctgtgacccagagccgaggaccccaacctctgctgggctcagagagagaggtcaccttgcttctgaaaccatgcacttctcatcaaatccatcttgtctagtcaagaataagagtttggctgcactttgatacaaaaagactctaccgaattattttgcccagaacaaacgagctctttctacactatggatcagagaattgctgacggctttgattgtagaagcttgttcccacttctggccatcgaggctgcagaaatactggggtttggcctggttagagccccttttcatgtgaataatggggatcatcaggtctgcctggctgggacattctgagtattaaatacatattggatacaaagagtccgggaaatatggtaggtgttcaatacatgctgaggtgttctctccatcttggctcaggtacttcaacagcattacaaggagctggggaaaagaaggctgtactggagggtttgagttgtccctctcaactctctgaataccagagactgggagagggaggatttttctaggtgatggctggccttggaaggggccagaccaagcatggtggatgtgggttcaggtctctacttactgtggtccctggcggtcagctgtgtggaccactgagaggcacgtaaagagccgggttcatgcccagcttctctctctccctgccttgctgtgtgtcccttgggcaaggcacaacgtctctgtgtctcatattaactgccattgctgctgtagatgggcctgtgtatcttttttttttttaagattttatttatttatttataaataaatgtctctctgtgagagacacagagacacaggcagagggagaagcagaccccctacagggagcctgatgtgggactcgatcctaggacaccgggatcatgacctgagccgaaggcagatgtccaaccgctgagctgcccacatgtccctgggcctgcgtatctgattcaggtttgagttgccaacctctgcttgtggggcagagccaggcctatggggttgtgtgaaccgagggccgtgggccctgatctgtgcatggagggtttggagaagctgcccgtggttatgtgtacagatgtgtaacatcatcttgggcactgtgtccctgctgacctcctcttggaaggagtgacctcactttctcctctccctacacaccatgtggcttaattagagttcgctgaataaatgggtttatgggtgagaagtcatggtttaaaaaatgagaagatgaggggcacctgggtgggttagttggttaagtgtctgccttcagcccaggtcatgatcctggggtcctgggatgagctccgacttgggctccctacttgcaggcagtctgtttctccctctgcctctgcctctctcccactcatgctctctttctttctctctctctcaaacaaataaataaaatctttaaaaaagaaaatgattaaaggttagagaaaattagtgagggggaatagggagaaagaaactctcaggtagaaagatggtctgctagtccttagctgtaaagttacctacatgggggagagggagatggacaaggcacagcccctgcccttcagaagctcacagcaaatgatccacagtgaagggtgggctgggcaaagtctggtggacagagaggacaaagttggtgggcctcctgtggtaggtggactccctggaggaggcacatttagatgcagggtgggagcagggtgctcaaggacaggttctctcagggcctgatgagctgagaatgaggcctgtcagcaaagtgtctgggaatggggaccctgttttgggcacctagagaggaagctgactgtgtcccctgcccccccaccctctcctagtgggtctgctcctgctgcagggtggggtgcccactgtttgttactgttgttggagctttgaggtcttagatttacagctgtgttcagcataagagtgcagctcaatgcaactgaatgaatgtttctggagcatccaccatggaccccacaattggtggtcctgacccgtttgtcccctggaaatgagaagaagattttgacccagtttctggcctgagattgctccaatctgttgtgttggagggtgacttggggtggggactaagaggaaggttgcgattaaaggaaagggagacatgaaggctgagacaagctaggctccccgacttttcaagtatcaggatccctgtttgatataaaaaaactttcaacagctttgaacaccaactggatatgaccgagttaccattaagtattaagtgtgacaacggtattttgactccactttaaagcgaagtggagatgcatagtgtagtatggacagatggacccataggacatagggcgctaggatgtgtgcttcccaagaacagggaggggcgtagctggggtgtggccacaaggaacttgctctgcactttcgggtagtcttgaaattctccagaatgaagagttaaaacaaaacaaaatccagcaatcctttgaaaacaaagactttcaactgtacttgtggtagaagtgcatcactgtgtggggaaatcacagtggcaaaaatccaccctggttcaaggaggctttggatgaatttgcattctattagtcacaataggatcttttgataaatgaaaaatggacaaaacaggacacaggaggagggcaagatttagcccccccccataacctccagggtgggggagggacagggagaggaggtggaagggggaggtgggggatggggtggggaggcagggctggtgtgagacagatggtagagagtgcccctgggtggagaacagcttttggtgcactgggatacagggacagagttgtttgctgtcagcggtggctagggaaatgaggtggggtcacatgatgcagatcataggactaccaccacagtcctagggccaagccagtcctagggtcaagccgggaacttcagagcagatctgctcgtccctctccctctcgcttcctgaggcctgttgtcaccatggggcattctctgtgcttacttcctgactgccccccaacccgactccatcacctgcctggtctccagcttctctttgcttcatcccattcaatccactcccatggccacaaagatgtccttctgaaactgcagcagggttgggggctggggaactcatcttcctgcttcacaacttggagggctctccatggagacacagctacttagctccatagatagaggccatcacctgcaggccacctgctttgctctgccttccattcctccatcccccatcccagagtcctccctgcaccccaggcttggtcaggttccttaaacacgcagatactgcactcctgcaggttgggcacactgttccccttgtctggggtccttcaaggctgagcgaaaatgttcccttctctctggccgctttccctgactcctcaggtggaatagatggccacctgtgctcccatcatacctgtaaacacctctggtgcagtcccgccttctctctgttacttccgcttcactctcatcccccatttgactcttcagtgtccggacaatggggactgtgtcttattcactgaaaaatctgccctggacacagtagacacataataaatgcttgttactttggagagataattgccattcacatcatacatgaattgcttgttttcttttaaaactttgaaaatctataaataatagtgaaagggaatataagggaagggagaagaaatgtgtgggaaatatcagaaagggagacagaacgtaaagactcctaactctgggaaaggaactaggggtggtggaaggggaggagggcggggggtgggggtgaatgggtgacgggcactgaggggggcacttgacgggatgagcactgggtgttattctgtatgttggcaaattgaacaccaatacaaaataaatttattataaaaaaataaaataaaactttgaaaatcattacaaaaatcatccccagggcttttacacattcataaccctgtggaagtagataaataaaaagcaagagtccctcatacttgtctcccagtttaattccccagagtgggcctgtcaatcacagggagtagtttctctaggccagtggtcctgaaagctggcgccccaccccccagccctgcaacagcatcaacctgcgttagaaatgcaggcctgcgggagccacagccacttgaggaccaggcctagcactctctccaggtgagagccactgagaaccagcttagttagggctgaagctccgggagccagagccaccccgaacccctctggcccagacaggagggaggtacagcaggtgcagcccctatcacagacccttgcattttattttggagcaaaaccccaaagtcagctaatttccttgcctttggtctcctttagtctcagtgggtggcaaaagagagccagtgtgggctgatggccggtccccttccctggtgcggaaggggtggtggaagtgcatcactgtggcagggtgaggctctggctcggacactaacgtgctatgtgatatttggcaagttgctgtactgctcttgtctcaaaaaggcactggttctctagatattctcccgtacattaacaaacaaaaatctgtgttttgagctctcagagagcttgaagttcagataagagatttttttttaagatttattatttctttaagattttatttatttatttatttatttatttatttatttatttatttatttatttagattttattcatttattcatgagagacacacagagagaggcagagacacaggcagggggagagcaggctcctcgcaggaagcccgatgcgggactcgatcccgggaccccaggatcatgccctgagccaaagacagatgctcaatcactgagcccaggtgtcctagataagggaattttatgggcatttccaaagggaagaggcaagacgcccaaatagtattaaaggactcatttctctcctgtgcttttctgctttcccaatgaagtacaaaccactgcccaccagttgcctgtgtggcctctgtttatggatcaattagaagaaaagacccattgcatacattcaatcttcgtaaagaacgggatataacaaacatcatcccctcccatatgccaggcgctattccagatgccagggatccagcagtgaggaaaacaggcaaaaccagcctgccgggatggagtttacattctagtccggagaattaggcaatcaagaaagaactcagagacagtgtgggagaagggccatgggctacagcaggtgccgtgaacttagcgggatccagagtggcagcagctcagagtgcagagccaacaggccagggcatgatcgggcctcttctgcacagcaggagaaagggaatttccaatcgttcttcacatgagccaggggctggtgtcaggctctgtctttaaggggctctggtgtgtttacagagagagacaagactggcctcagggtcacatatgattcttccttggacaggattccatttatgagctggcttggcccgtcagggaaggctggtcaggaggttggaggattcagagtgggctgctcccaggaggcggcaccctggctgggccatgaaggatgagaaaactcccagctgcacgggagggagagttatccctgggttcatggaaaaactgtttgggaaactccttaaaaaatagaaaaatggagggacacctgggtggctcagttggttaagtgtctccttcagcttagatcatgatcccggagtcctgggaccgagccctgcatcaagctccccactgagtggggagtctgcttctccttcccctttgcttttccccttgcttgtgctctttctctctctctctctctaataaataaataaaatctttaaaaaaaaatagagaatgggtatctgtgcctttctgtagcccaccccccacacaaaaactttctctttagatttttgcccagaaacagttcttggttaggtaaggctggtgtgggaaagggaaggggagtaagagggccaaggtacagtcagagccaagggctgctcagccctccccctgcccccaccctgtgcaggaggggatgggctgccccagaccccctccttctactcaaagcccagcccctgcctgaacttggcaggtgctgtcagcacacagtgctcactaattataccctggacagatgctgagccctcatgggcctggcacctttcagggacctgcgatgtaagcctccaccctgggcagtgcattgatgggattcttttgtttttttccaggcctccccttccttttgccacaccagccttacctaaccaagaactgtttctgggcaaaaatctaaagagaaaatttttgtgtggagggtgggctacagaaaggcacagatacccgttctctatttttttttaaagattttatttatttatcagagagagagagagagagaaagagcacaagcaaggggaaaatcaaaggggaaggagaagcagactccccactcagtggggagcttgatgcagggctcggtcccaggactccgggatcatgatctaagctgaaggagacacttaaccaactgagccacccaggtgtccctccatttttctattttttaaggagtttcccaaacagtttttccatgaacccagggataactctagtcccatgcaggccccactgggaaggggaagccagtacaatgagtaagtctggtggtccagaaaggggtcgggaagatctgtgcctcagtttctgtacagttgtgttatggaactggggtgggacagtcaaggcctagcaagttctgaatcttgcactagaagggcctggcttgccagcgagctgaccaatagtgagcattttacatctgtcctgtggctcattacaggatcgaaggcaagtctgggctgcggagccctggggtgaaatatggctcaggaaaggggagtctgtgggtggcggagcttgatgaaggccactaggccattacttaaccatcctgatgggctttacactcccagtggtgacatttttgctttgattgcttaaaaaaacagagtggtacctcccccggtcatttttctgctttttcctcataaatgaaaaggcagatgtttcccagaagagttgtagctagaatctcatttctccttagtgccttgcagctcaggaggagatgagagacactgccaccccttgggcctgccctccctcccagtcccggcccctcatctccacctcagcatgctttcttggtggtctccctgctgactcctgctcagggcttctggcctgtgtctctttctctctgccttcccctcgccctccccttccatccttcccctttgtctcctctgggagtgcttccccattccctccccacctccttcctcaacccttcctcctctctcccactttccagctccctccccattttgcagatgagcaaatggagactcaaagccaaggagcacctagcttatcccctgggtggtcagggcaccaaggctgctggtcgtgtcatctgtagcatggggaggctggatgatcgtccccccagctgggttgtctgtgctgtagtgttcacctgggaagccgcaggtctggctagcgcaggcccttgctctgtggctgagcagcatcgccagctgggagctggtgagagatgcagaaccccccatgcagattcagcactttaatgctattccccctgagattcataggcacatcagagtttgcactgagcattttcaggggagggtctagatccccccagtccttcctccaggggcactgtatacccctcaggggctgcaggtgtggccacagccactgcagcaacccccgtccacccctcttctgcaccaaggaagcacgtcagggtccccaccaggctgcccagcccagagtggggccgcagtgggcacggcttggccaactgccctggttctcttgttgcttagttaggtcttgataaataatggcttggagacagctggaaaccataacctggcattagcggctgggcccttccacctctttccttccactgaggtaggcctcggtgggcagctgtggcctgggccaagcccactgtggtggggagggccgtgggagcctagcagaggcaggatgtgaaggagctgggatcctgctgtgtggtgagcctcccaagtcagctgctctggcccgagcctcaggcctccccacgaggttctgagagctgccctgggaagagaggtcattggtttctgggaagcccatggggcagggtgctcccagcccccgtggctagtgtccgggctcgaaacatggctgtctctcccaatcgaagcccctcatttgacaggaagaaacaggtccagtgcagggaagggactcggttaaggtcacacagcttgtccttggacataaatagcaaccccagtcaggacagaagtgattcagctcccaaatcctggagtcatcctttgactcacctccttccctcacacgccctgtagcagattagtgatggccaaaaattctccacttctcctcccactgaaaggtgaaggcggtagctaatcaccttcctcttgagtcagggccggcacggtgtcatgtgaccaatagaaggtggtggaatgagattctaggactagatgcttgatcacaagaggcttccaccttggtttgtcggaacacttgctcttgtcaccagctgctcgttatgagaaagaagcctggagcacctgggagaggcctgtgggaagaggaatagaccttgggccacctgcctgggacaagctcccagccgctgtcacacacactggctgtgcctgagctgtcttggaggtggctctggtagctcctgtcaggctgccccggccggtgtcacatggaacacatgagccttcctcattgaaccctgccaaattgcagactcatgagcaaaataaattagtgtggttgttttaagccaccaagtattgggggtggtttgttatgtggaaatagacaactggaatgcaccctgaatcaatctgtcagctttgccttctaaatatatctagaatccaacctccataatctcttacttggaagattacaatagtctcctgatggatgggtcttcctgcctctggtccctggccccctacaatctgttctgctaaaacagaagtcagatcaggcccttctgcttgaaccctccccaggctccacagtccactcagagtgagaggtgaagtactttccacatccagcaatccctgcaggatcagatgccacttacgtccctgtcctcgcctcctcctgtctcctggactccctctattgcagccactgggcttgttagttttcgaccattcaaagttcactctggccccaggatctttgcatctactgcttttcttgagcctgcatcccatcgcttgcagataccctgctagcccactccctcatttcatttagatctctagtcaaattttccagagggactttcctgatcacactacatcaagcagcatccctatccttcccctgctcccttatccttatctttctccatagcacatagcactggcgatctacatgtttattttattacccctctttcccgactggaacacagtctccttgtggaggggagggggttgtctgtctgcgtcactgctgaatccccagcacccagctcagcttatggcctgccgtgggtgctcagaacatatttgtgggtggaggaatgcatgagagctgacctggggagcctgggggccctgagggtcctggggtgctggcagggctcctgcctttctcctgcaaacttcgcttcccaggggcccttgctgtgggcttctggttctggaggaagcacagggggctcccaggccacacgctgcacccctccccctcaggtcctcccacctcctcagcacccagtgtctccctttgggcctccctcacacttgcccctgccccttgaatggcttcctccagtctctgctgcttgttgaaatctcacctggctcagctggccacctgggatttcatgaaggcttctggaaaacagagcgagttaagtgcctggctgcaaagtgaggctgttttggggggagcccaccccagaactctctgcgctgtctgtagccagatcaggcccagatgattttcctccctgctcagctcagcatccctggctcccccagccttgcctctcctcccatgcagcattttcttccgcaagtcccaggcttggtacagctggcacccgtggggccgctcctctcacctggagacagcgccaggccccgtgccacgttaagaggcctcacttggcactgcagctcccagctctcccccagaatgtctgcacccacattaacatgtctgacatcctttcagccacatacggcggctggaggacctgcttgcagctacttctatctcagagatgaagtctgcagggcacaggaagagaaccttagccctgagtctcaaaaagtattttctatttggctctggaacctggttctgctcttcgtctgcctgcaggaggccttgggagagcctcgagcccgaagctgtgctgtgaaaacctgagggagggggacagagtcccacctttaggtgctgaggaggcggcaccacttggtcacgtcaaatccaagattccattcatttaaagagtggcggctgtcgtaggtaccatgaaaggggggaaatgctgctgattaaaccaggaggcgccatcaataactagacggaccttagtttcagcgatattaaaatgtgagagcaaatgtgcatctttgataaaatacggttgtgatggaggtggaacggccccttcctctctaagctaggcgctctctggctcacaccttccctggaaaggaaggaatggaagggttgcctctgatccaaaggctttggctcccacccttgccaggggtgtctgtgagaagaaccagagatgggggtgatatcaacagagggctgggggggggtgtgggaagctgagaaggggatcctggcagtagagagtggaaatgaatctaccacctacagagcctgttgaataataaagtcacaagcccagccaccgtcttgtcagcccagagcaaaacagatggcctcagcccctgtccccccatctgagtcatggaggagtagcaggcgcagtgactgtcctaacccctcccccgggttactcagctccctgctgctcagagatgctctctgcctgggggaaggaaggagaaggggtgctggagggagcctcctccttggatttctgggagggaaacctaagtctgcaatggggagtcatcatcaccagtccagggagatggggtgatgtgggaaggacagacgagggagcagggcccagaaacacgaggggaacatctggctgcagtgggagggactggagtttgacctgcaggaggaaagggatcctttgccggctgaagggaccctccttccccaaggttaccccattttcccgaggcagcttgcatccagtgactggtaaatgcacagcataagggaaggtcctccaggcctcctgggcggctgcctgcaggaccatcccctactggcagctcctggggatgggggtcggggtgggggaagccaaggcttttgctgtgcctgcctcagggcccagttctgtaccctgccccatcttacctccttcgctcccccatgggtcctgtctccaggaaacccacacatgaccctccagctcagagtctgtttcccaggaacctgacctgtcgcatttggagtaaacaagatggagcagtgagtggttgcagggagtcccactctgaagctggcaggtgccccagacaacccctggagactcctcccaagcctatgggtcctctgggtaggagggagctctcagtggctcccctgggagttctccacatcagcccatggtccctgcccacccacaaggccagaggagaggcaacagatctgggaaccatgtgtctggaccatggcaggggcaggggatgcagatagagcccaagagggggtgcgggggtgagggggtggctaggggatatttggcaggtgatacaggctctgagggccccaagtgaggctgtgggcagtggaccccccctatctgagtacagagcagagcatatttgagctgtatacaaagctgggttggccagtacaagactacatatgattgcatgtgtaggagagtgggcacaaaaatgtgtgtgtgcatgtggaggtatgagaaagtgtgtgtgtgcttacacctggcatgtaagcatgtggttatgagtgcgcacggctgagtatgtgcccgtaggcatgagtgtatgcaaacaggcccgtgtgtttatcgatgtgcctatgtgtgggtacagacaactcatggaggcgactcatcctctgtttcatctcccttaccagcttcagccttcctgtcttgcctcagatcctctgcctaagctgtcttaagaccagctcttccttcctaagtcttcgcctcctccaggaagactaccttggtgaagatgacacaattgccgagccatcctttcttgtgttttttctcaccggaacaatttacctgtggattcagctccatgtatttgtctgtatcccaccatcagactgggaggtttccaagcctgggaacagcctttccccaatggccaggatctccccaaagatgggaactggaatcctaactgccttccagactgtgcttcataagccccactgctaaggccctgagagaagtggagggctggggacctcactccctcgcaccaagcccagtctcctttctggatgacctatgtgggtagttcagcagaaggagctacaggctaggcattgggacagttgtgttctcatcttgactcagtgtgacttgggaaaaacgcctgttttctgggtcctgagtgcctcatttgtaacgtaggtggttagacaggtggtcccagggcacctcatggccctgccctctgccaacacagctctggtgtcctacagacccgtgcagccccttgttcctccccctgaccccagtccacctctctgtcctcactttaagctggtcaattgacctggcggccagcagtgccagccccctcagccatgcagagggtatggagagggtcactgtgggccacacgtcctgtgttattacattgagtaagctgacaaaagccatcagaagataaatcatttaataggagattaaaaaccaatgagagcagctggggttctgacccagagtctctgcgtttttaatttaatttcttttgctgctcaaatcacaacattctaaaatgatagaagtagctgtgtttgctcatgggttttatcattaattgatttggctgaggttttcccataagcttcatcttttggaacatgcttctcattttaagcctctggactgagcaaggaggggaagtgcaagatatgtgggaactggagtgggcgcgaagggtctgcccttggcaaacacctccccgggggcagtgggtcctggaccagtgcagaagcctggtggcagcttggtggcgttgctgcctcagcatccagagcaggcaactcacagccttcggtctaagaggccagaggctgggcatcaggtgacgctgggcaggctggggggggcggggcgggggaggggggtgccccggcggggctggtttccggccaggcgggcctcacccccacggctgcgcaggtcagtggcggccggagcccacgcgcgtgtccccccgctgcccgtctccattgggcccttcccctggacaggagcccagggctgcccggggccaggccccagctctgacagccgctggtcagggcttgggccgcgcgatcggagaagccctcacggaagagggacagtacgagtcggcaatacacgtgctgtttaatttctgtttctaggtggtaacctacgggcctgaagcacgaggacgagggttccgttatcagagcccttttggtggcacgtgaggggccgccgcctggagcccaggcaggcgggagggaagccgttacttggcgaccccaagggcgggccggcgcgggacccgtccccgccctcagccctgtcccgggtcgggcggctccatccccccgaggctgcggcaggaaagaccgctccaggcccggggacctcgcgggagctctgattggcccagcttggggcacatgctcaccccgggccaatcgccgtggcctgtgggcgggatcagctcccactgccctcctgcttcctccagcagagcaggctcccgagttaggcgtcctgttcctgggggcgagggagtccagcttccctgtcaaaccactgtcacatttggatgcggttcctaccaagtttcccttctcaaggcaaacgccccgtagaagagaaggcgtgtaatggaagaggaaaccgagtaggacccacgtgtggcaagatgccgggcaccgcaaccagggcgtgcgctccagagcccctgggacacggctcctacccaccgactgacaaaatgaaatctctggggacactgggtgactcagcggttgagcgttcgcttttggctcaggtcgtgatcccggggtcctgggatccagtcccacgtcgggctccctgcacggagcctgctgctccctctgcctgtgtctctgcctgtctctgtgtgtgtctctcatgaataaataaataagatctttttttttttttaatgaaatgtctctacatccaggatatgggaaacagaaacactccactcttggtatcactgcttgggagcacaaggtagcagcgccctgggaaggggaaggtgggcatgccctgcaccccaactgcactttggggtgtaaatcccagagccagtctcactcgtgtgcacaaggaaacctaagagctacagtctgttctgtgtgtgtgtgtgtgtgtgtggtttggagagagagagagagtgactgtgggggagggcagagggagagagagaatctccaacaggtgagattctactctctgtgaactcctacccagggctccatctcacaactgaggatcaccacctgagccaaaaccaagactccgacacttaatccattgagccacccatggaccccagagctgcagcattttttggggaaaaatgttgtccatagtctcagcatttattaaccagagaaaggataaataacgtgtgggatacataaatggtgttcttgacaagaattaaaattaatgtttcatgttaccaagacggattaagtgcataaacattgttgattgaaaaaagcaactcccagaaagtcttgttctatttaagaagctgtaaaactgaacaaatattatatattacttatagatacacacgagtggtatgtatgtttaaaatcatgcatgggaatgacaccaacttagggtggctacttttggagagggaagaggctatgtaaggaactgggagaaatatacaaaggatttcaattgtatgtgtaatgctttatttcttaaaaaatgatctaaaacaaaatttaaaaaggggctcattctgtgtgtgtgtgtgtgtgtttgtgtgcatatctgtgatgtcctgctattcactgaacattttataatgaacatggaaacatgatttttttaaaatttttatttatttatgatagtcacacacagagagagagagagagagagaggcagagacacaggcagagggagaagcaggctcatgcaccgggagcccgaacgtgggattcgatccctggtctccagggtcgtgccctgagccaaaggcaggcgctaaaccgctgcaccacccagggttccctggaaacatgattattaatgtctgcatagtatcccttaaaagggatgtgcccatgtcctattgttacatatactggtgtttttttttctcctatttttcctcatcatagtgcctgtccttatacaaattattttcttagggcacaaagctgtgtcaaagatttaagctctttttaaggctcttggtaattattgggggtcacagggtttgtcagaactccttcagttgcaagtgacagaaaaccaatgcaaactggcttaagtaaggagggaacacatgctggtttatgttgctgaaaagaccagggaagaaggttgtcctcaggggctgatttctgaggcctctgccacccactagtccctctttctccaccctcacctctgccttcctcagaatcagcttcttcacaggtaggcgcctccacaaggcacaggtgtttctgccactctaggtgcccactggctgtattagtttcctagggctgccgaaacaaattacgacaaacccagtattccttcttaaaaacaaaaaacaaaacaaaacaaaacaaaaaaacccaaactttatttatttgagagagagagagagagaaaatgagcgggtgcggggagagggagagggagaagcaggcttctcgctgagcagggagctcaaagcagggctcgattccaagaccccaggatcacaacgtgggccgaaggcagacacttaactgactgagccacccaggcgccccagtagaaatctatttgttcacagttctggaggccagaagtctaaaatcaaagtgccagcaaggctgtgctccctccctctggaggttccaggggaaaaatctgttcctgcctcctcagcttcaggtgactgtcagcatttctcgccttgtggtcacctcatctgtttggctttcatgtcaccttctcctctgtgtgtggcacttagggcctgcctggatgatccaggataagcctctcctcttaaggtctacaactcaatcatatcgttggcatatgaggtaaccttcataggttctgagtgttagaagtgaatacatcttggggagggaggcatgtccctaccatccttacagctcagaatcccagagaaggggctgaggcaaaaatcccaggggagggttctaattggccagctcgagtcacatgcccatccctaagccaatccctggggccagagcagagaaggcctctgattggttaggcccagtacacccctaacctcgcaggtccgagagtggggccagccccacctaattatgtggactaagtgtatccctatgggagacacaaaggaggaggccgcagactgctcacaggcttgttttaccccaggggctgcagcacctcttgaagggggggagagggaggatggagagagggtgtcctgcctgcctgcagcaggttacattcctaggtggcttgtccctatcgtccagctgttagttttttcccaaatgaacgggggaggggggggagggagaaattaaaaaaaaaaaacaaaaacggcagtaggttcaagagtgctttaatggggagtgctcccgggccttgagtcagggaagtctcgcccaggcaaaccgcaggggggtctataaagagtttttggtgggaagatgggggcagggcggcattccaattagggcaagggttacaggtcttttgctatggtagggtagggaggttagatggtgttggctggaagatgggggtagggcggcattccagttaaggcaagggtcacggggcttttgctatggtagggtagggcggcaagacggccttattgggaggttgccggcctggggtcggccgttttgaggtcccagcccaacaccagcaacctgagctcagcctgcatgtgccctccctcctcaggagtgggagggaggcgggtttcatctttccagcaaacagtgcgggtggcaggtgaactatggaataagtgcagggaaaggagggggtcccaatgaaagctccagcagaggaggccccagcctcagggccacatggctcctggatctgacatctctggtcctctcagtcctgccccaggccagtgacccccagagagctgtccattgtcataggtagggaacgggggagtatgggatgaggtgtccttagtgccatgaacctcaccccagcaaaatttccctcagggatctgcagccagagtgcttgcttcacaattgtattttgaagaggggtaccctcgggtagtctggctttttaattcaagatgctgggacctccaacaaatgtagctccaggcaagacaaagactctgggcttctgagatgactgtaatgactcaggactggggagccccgccccctacctcggacttccacactggattttaactgccttggctgctcctgtcatcagaaccccagtgagaatatggacagaactggggtggatcagcccctaagatgccctctgctcctcttcccctggcaggcctttgcacacactcacactcacgaatgtgtacctagctcttcagtctctggccatgaccatcagccaaacaaaccctactgtatttacacatcttccccaccgcagggcctccaccaaaagcagtcagcctacactggctgtaaaagctgggccaagtcagcccgtgggggtctctgggcaatctggtattgggctctgagatacgtgctcggagtcagcatctattctattccttctggggctgcaggggctgcaaagctaaagacgacatttcccagactcccttgcatgcagggttttagttcacattaggttccgctgaatagatgcacctgtctgggatcgggaagggcagaagcgaaacagagccactccctgctcctttggctgtgtgctgatggcacttgggctttcttttagctgcattcccccctctagtcaccagccttgtgggagcccagatacaggtatggtggtgacagttgcttgtggccctgtgtcccattggtggctctggattcagcaccttccggatggcgataacacctccccagagggaccgtgtcagcgttgctctgagacgtttctggaggcctagcctagagctggtgcctatagcacttcccatgactcggtaaacacctgattccctgcactaattccctctctgcttaaaatccctttgctgcttctgtttcctgcactggaccctgattgaaacagacacaaatgtactttgtgccaacagtttggacttttagcatgaagccaatagatcatgaggggccctaggaccagggtagccttgaaggaccacacagaagtgaaatcaggagtacagtgtctgcagagaagggcccatccaaccgcctgccatgcacacacaaacacacacacacacactggaaggacgtgtgtactttctccctccccggtgctccagtgtttggggtcgttagccacacatagccttgtgttataggatgtcttgttgacatgttagttcatatatactgtggtatgcccccatccctgaccttggctgttcctgttcagtagccagcaggacagctgttgtctcagggaagggatgagtcagcataaagaaagaaataagtagtcatggcctgggttttgagtttacaaaaaatcacatccctcaaagggaaatggaaatgacttacgtgggtgacgggagtaggtgggatgacacagaacaagcttcctgcacttctcccctctatacacacagagttttctggaggaagacttggggggagagagagagggaaagtaagcagggcagagatagcttgggcctgagaaacaggaggcctgaggtcatatgtgacctttgagcttggctcacacagctccctgattggattgctgagttccaattccaaattcttccaatttcattggcttacctcatcatttttagccaggccccaagtcaaggccactgagcagcctgtgaggagatggcctgtggctctgctgaccaaccctggtctaagcagcagtggtcaggaagtgggccacatggatggcagtgtggggtgtcacgcataggaggcttagagggagctgccggtgagggcacagctgacacacctagtactggagatggccagtccttcaaggcccggcctaggggttctaggcttttgtagttcctttacctcactggttcataatggagccacagagttgtcacctctgggaaccaggagttttgccagatggagtggagtgttcatctgcttctgactggaccgggctgcagggaactgctttgttaagaatttcaggtatcccagcagcaaagtccatgcacctttccctcttgacaacctgggtctgtcacctgagtgcactgtgcctcagtttcctactttgtaaatatatacacttcttgggaggcttccaggacattcatcagcatacatgctatggagaagcccaaagcagaccctgtaaatataaaccctgtggggaatggtgaactcaggcctctgtttctctgtctctccccatactgggcccccagcccaggctgccctccatggccccctcagaaccaaggcagagaaaggaggagccttcttcacccatgggcaggcatggggaggggtggggcgcagccaggctaggggcagtgaggcgccgacagagcccttctccccatgatggatggcccgctggctggagctgcacttccaatttgctccccatttggacagccgctctacccacaattcaacttgtcatggccacaaatcactctgcgccatcagaccaaggaggcagggagtgggaggtgcattggttcccagaggagcccaggctggggataggggccatgatgtgggggtgctgaggctgtgaggtttggctgggacccctgtcctgggacctcttgtcttccacacctgcccactccagccatccccatagttccagatggcaggctccatatccactcctaagccccaccctcttcccagtcccccggaaaaaagtcccacataccctatgtttattgtcgtattcccccaaactgtccagctcaacagtcttgctccatttgtgctcagaaatccccagggccttctgctgcctttctgtgcctcagtgggactgatccactccatctccaggccttaccggaattagggctatcgatcattcattcattcattcactctgaaaacattgagcattcactatgtcacaatggtgagcaaaaggggcacaggagtggctcagtggttgagtgtctgccttcagctcaggttgtgatcccggggtcccaggatcgagtcctgcatcgggctccctggggcggggagcctgcttctccctctgcccatgtctctgcttttctctctgtgtttcatgagaaaataaataaaatcttcaaaaaaaaaaaaaaaaaaacgtgagcaaaactgtgagcccacagtccaggtggcagacagttagggaagtgtacaaacttcaaactgagaccacagctgagggaggaggaaagatcgtgggaccgttgagggcatgctgctggggagcccaccaggtctgcagtctctctccacctcattacttcaaagcactgcttaggctcacctcctctgggaagcctttcctgattgcccggccattaacgggcaccttgtgatgggtctctgaattaagacttctggtggtgttttttctttctgttaagcccccaagagttaacataagggtctgcctccccaagcatggtttggataccaccagcacctccctagggctcagctcagatgctcagatgcttcctccattcctgccatgtgtcttgggcctggagcacctcctttggcccccagcacatcctgggctcagagggcattgaagctgccccccaccccccaccccgtacctccaccaggtacctctggggcatccagctttactttaagacccaaacatccctcctccagttccactgctaccccctggcctccccctacctctgccctcagctaatgatgatgtagaggcagacagagcaggctttgatctacagcagctgcctccctccttgatggatttctgggcctcagatatcactttcatcagccccgttacagtgttccagtgttcccagattcatctcacggaaggagctggtgctgctgtgctcagaatgcactgggagggcgactctccctatgtccctgctgggccaggatctgggagcagctggtggttgaggaagtgatggcagggccggacaactggcaggccccagtgcccatccatcagtttgcctctctgcagaatgagtagagacatacacactttccctcttcagactgactggaggctggagaggggtgcaggctggcaagcgtcctctaagactggggtctgggaggcaggggctgcccatcacccatcacagtcctccagaacgtccccatgatgaaatcttacaaagaggaccagcccactttcagccacctcagcgtgtgaacacctgcttttaggcaaaaaccaaatggggaggacaactgtcctctgcggagaggaactcaccgtggggtcctcactgatgtgttttcctggtggatttcaacgagtattcttttgcctggcattgatttatcctcccaaccttttgggcactcgtggcttgtatagagggaggactccgcacatcagaggcaggtctgccgagctgatctcagcagagagccttcagcccactagatatgtgggagccggcaggagaaggggggaggccgcggtcacccctcgcaggccctactcacatgtctgccccccagggtgtgctgttctggtacccagagatctgggggtttaaacttggcaactattgcatgcttccaggaggagcagaacaaagccgcttccactcctgaggctcctctcccccctcctctcccttttggtgcgccctgggccctgcgttccatctctcctctctcctcttcctcttcccacaggcttttcccacttgcctctcactccccggcccctgcctggggccccaggggccccagtgtcatttgcacaggaggctccctgtctttggggtcctctgattggcctgaagggaggctccacacagatgatcaaagaattggaggataataggatgggtgtttatgggtggctagtaccaaagccctgaagctccctgctggctccctcagaagtgcccagcataggacccttattctggggagtggtgagtttgagccctaccatgggggtagagattactcacataaataaaaatttaaaaaataatttttttaataccaaagctgtggcagttcctgtgtggcagctcctccatgcctgccctctccgggcccactccctcctttgcccctgcaggtttcggcgtggttgtgagtccccacactgtctgcccctaggcatgcaccactcccgctgtttttccagagtgcccgtttgaggggccatctgctttctgccttgccttccactcctcctggcccgttttgtgtcctggtccttttctctctaatctttttccttttgtccctcctgaggctcattcctgctgggaagggctccccagggaaaccagagccaggctcaacaggggtgatggtggcctggtagggcctggagtcctaggcgtggtgaggcccatcaacaacttggaaggttctgaagttgagttctagttgattcatccaggggtgcacaggcccaagggagatgctccagattagtcaaacccagaaagcaggtttataaaatagatccctttcttctgtgtatctaacaaggggtcccatacccaatgggaatgacacttccagttatttgttgaggacgcccccttccagggccaccacctcagggtggggagaagaaatttggttccttgaggcatttgccataaaacataaatctcatcaaatgctctttaccaaaggggtttttgtggccaaataagttagagaaattctgcattttgtagactcccaatgtgttccctctatcgaagactctgaaatgctctgtggtaaagaatatcctgcttactatgtgtttggctcagtgttcccaaagctggaccaaggaaccaaaataccctttttccccccaaagactcatttgctgagcccaagtgttctagaggacacactttgggaaaccttgatcacaggctcagagtgtacagctctgtggagtagagaaatgagagcaggctttgggctaggcagatgaggctggagtccctcccagctctggttcttaggggcagctaggtttgggcgcgggggtaggagggaagtactcacaatctttcaagtctaaatttcttcattttctctcaaaagggaagaatccacggctctgaggattcaagatgataatcatatcttagtgaagactctcttggttgcaagaacaggattcgtgttaaacgaaaaaaaggaatgtattggaaagatgctgggtgtcttcagggcagaagtgtagcatgaaggccccaaaccaggagtgtggtaaccttggcagtgtccagaacccatccttcagctttcctctctacatatctgcttcctctgcagactatgtttttggctcccaggggggtggggccagctgtgctacccccaagtcccatgacagcctcagctcctcagctccgggcacttcttcctccctcagtctccatctggactggcagtagtgcccctcaggacaaattggagtttgtccccagaagagagtacctgattggctcaacatggtaaatgtctgctcctgtccaaccacctgctgccagggtgctgggggcatgtgccgactgggccactgtaccttagctcatctgggtcaggagcggttctcagcatatgtggtccaagggacacagactgagcagatgcccacaaggctgtctgctataacacataaagtgcctgaaagccgggtaagtacttggtaagtgtagctcatacgagtaagcgaagtctgtctctgagaaggaagtggcatttagcaacaaggactgttgtctgtcttgaggggctccactcccatcccagaaacttccatgtgcataaaatcacttggacacatgttacccacaaaggaaaaaaaaaaggtaattcagaccacatttggataaaaaattcagtccatcaaaagacatcagtaagagcaaaaaggcaagacactaagttgaagaagatatttgcaatgcaggtgcccaaggaaggactggaatccagaatatgtacagaacttctataaatcgataggaaaaagacagacagtaggattccaaattggcaaaagaccgaacaggcacttcataaaagaggaggcccaaatggccaataaacataggaagatgtgcttaacatcagtagtcaccagggaaatgcacgttgaagcataaaatgataccaccccaccggaatggctcaaatgcaaggagaaatgtcctcaatcttttgtgaggatgaagatcgagtggaactctgagacagcactggcgaaagcctgcattggtgtagccactttggaaaatcactcagcagtatcccttaaaccctaggacacaacaattctgcttgtagtagatggatacccttcggaaatgcacacaagtgtccacagaggtatgcgtaccacaatgttcatagcaaccctgtcctaaagctggaaacacctcaatgcccagcccccctccaccccgtaggaggcagacgggttgtaggttgtaggacaggcaggctggagtgctcctcagtggtgagcgtatataaaccacaacggcgcataacggtatgagggagcctcacagacagtgtcaagcagaaaaggccagacacaaacagctgtgtaattctatgcatgagaagttcaaaagcaagcaagaaggagctaagctgttagaagccaagatagtggaaccctctggggaagttagtgacgggaagaaggcatggggggggcagtttccgagggcttgtttatgttctatgttttgatctggtgtagattaaacagatgcaatttgtgagaatgcattgagccatcctcttgcagctggtcagtcttctgtattcatgtatccactaatagcatttaggaaaagccctggagagttgattttattttttattttttattttttttaaagattttatttatttattcatagacacagacagagggagaagcaggctccatgcagggagcccgatgtgggacttgatcctgggtctccaggatcacatcccaggctgcaggcagcaccaaaccgctgcgccactggggatgccccggagagttgattttaagtgcaggttcctatgactcgctggcagaaactctggttccttgggtctggggtgggacctgggagtctgcatttgaaccagctccccaggtgatcctggtgagggtttgtgtctgagcagcaggctttaacctggtcctggccagtgctggagagcgtcaagtggagctgggccgttcttggtggcctgcccagtcggcccgaggcgctagcggaagggctcagggtgctgcgcaggagatggggaggtgagaggaaccgactggtagagcctgtgcacccaagggaaccccggcttgctggagaactctcaatggaaaaggaagtgtggactcttggacaagagtttccagagcgtgagatgtgtgaggtgatgctcagagggccagtcattctcaggttaggtgtggacatcgggagggctccattcgatgtcacaattaagtgactctctggatctccgtttgttttgttcgacgtgaggatggacacccttgatagccttagaggtgggttctagcctgagttccaggtctggtcctgccctgcaatagctgtgtgaccttgggtcagtcacctgccctctctgggccttaggtttgtacccataagacaggatgggactctccgaccccaacctctctgttcacgcggccaaccttgggacagctctccctcagctgtgagctgggaccatccctcagacctctttagagggtgctgctgttgacagcacaggctatggatgctctgataggtccgagggtccgttacaggtctatttcctcctcacttcctgccccgtcagcagggctgggctctaatccctctgtccctagcagtgtcaggcagtgtcaggcatggcaaatctggaaagctctgaggcctctctgctctgacattctgggttctggtttcttcctttctaggaatactataaccacacgcaagtcccaggtgcaagggggtctgcagtgccagcccccctccggctggcctgtgataagactggactcttgggggataagaggaaccagagaggcgcccccacctctccctccggcccagagcccaggcaggcgggcaggtgggcaggtgggcagttgggtggttctggctgtccctctgctgagttcattaaagggtgaattattaactcctggccggggcagggcagcctggggccccgggcgccccttggagccgacaggggcaggcctgcgctaattgaaggcttaatgaattttcccagtggaggctgcagccggtgccttctctctgccatctggccatttgtcttctcctggtgggattaccctctgcctgtccaggatgccaactgctcctccgtctgggctgccgagcacggtgggctcccagcctggatctccaccctaggggctccttccttggctcctcagcccctcagccctttggctgggtgctatgttccaatcactcctcattcttccaccttcaggcttacttcaaattttgggcatttccacataggccctggagactcgccagctacacctgagtggtccgtcagaatgttccagaggtgggcagggctgaatactgtcagctggccttccagtggttccagaggagttggggtatgggtcttcacaccccaccactgtttgtgtgaacaaggcactcccttggcaggattcaagaactgagtgcctggtcccgggagatttgctcgctacagaggcaggtgggggagagaagggatgcccagaggacactccccagagatgggggggatacagaggggggatcttaggtcagggagctcctacaacgagccaggcatccctcatcggattctaagattcagcaacatcttttttttttttttttttttaagatttatttctttatttgagaaaaagagggagaatcctcaggcagatgccccgctgagtgtggagcctgccacagtgcttgattctaggacccagagatcatgacctgagctgaaatcaagagtcagacccttaaccaactgagccatccgggcgccccactcagcaacattgtgacatagctataaggtgccactgtacgcaagggaatttgggggcacagcgaggtagctcatttgattcatatcccgctggtggtacagggcgtctccagggctggcttctccatggcccccagagcttctcactttgactccgtgagatgagaacctggctctcccgctttgctaggacaagttacctaatctgtcagaacctcacaccccaaggcaggagtagagtgggccccagcccctgtcccagagccagagctggaactggcaagggcaagggaggactggggtagggttgcttgaggaactgaaacttatttggaattggggtagaatctggattcttgtcacttccaggttaggaacaaagcctcagaccagatttgggattggcgttctgaatgctgcttggttaaggactggggtcacggttgggactgggttgggatctgcctctgaggccaagactggagttgtggaagcctggggagggatgggaagtgggagtcgggactgggaactctgggcctgcctttgtgctgacccactgctgggcccggggctcatcatttccctttgcaccctttggcctcagcctccttcctggtctgcaaacaagggatcgtcactgtgtcgtgtgtccttgcagctgtcacagaacaacaccagccaccaccccatgagtggctcctgcgttaggctcgctgctagtgttctttgtacatcttctttaattatgacaagcaaaggagagaagagatggcaaatcgccatgacaggctacaggcccccgtgagctaggaaatacgtgagggttatgttcctgccaggctctgggtgtcttgctttctatagaccagccccttccagctatgccccaaataacagcttgtcctcacagattctggctacgcatctcgcctgttcccctgagccctgggcctgcctctgagcctccggaagggcctcggggaggactcccaaccatcaccacgacctccctgttccctggtttctcccggggtctcgagcccagggcgtctggctccggcccgagttgggaccctccaccacctccgttggagcagcttcccgcccagggcctgggcccctgcagtgagggaggagagctgggtgctctctctcccagcacccggcctgctaagaacacacacttgttgcttggagacgtgctgagctgtcagagccttaaagtcactctcgggggcaggagaccccggggctccatcgacagaaaccgtgagaggggcagggcctctccttcttgagtccaagacgggcggtcaccatgctcatccctagccccgccctgtacgaggctctggacctctctcccctctcctggcagggacaggaactggttcatgtgggagtggtcttcctcttcccttgtctggaagcccctgaatcatttccatcgacgaggtgtattttgacattgtcagagtagcagccctaagacaccactctcagggacctagcacactccccctgctccagcccagaggcctcgctgcgtccccagaacgtgccctcacccacctgttgcagggtcttggcactctcggctccatctgcttggaatgcttcactccacgcatctgttcctaggtcggctctcaggggacccaggggcagaagcgggcctccgtaaatgcaggcagccccagcagggcctgtagcttggtgaaaggataggtggccggggaggtggggctggggtcagtatgggggtcagtcgcagaactactccaacggcagcagcattgggcctctgcaaagccggcgctggctccttggcctaatgagcattcactgtgtgcccaggacgcagacattggtgccacatgctcccgttgccttggttttcatgtctacaaacacattgggtccctgcgcccctctggctctgattttctgagtcaagaccagctgggatcccacctgagaaactgatgcacagaataggagggtctaactgggggagagtggttcggtggaaggtttggggcccagaggcagtggggttgttaagggcagcatgaggtccacgcggtgggcaggtggggtcaggaacctatcctgtcttgctccactcctgtgtttgggactcttggggtgtctctccttattcctggaaaggagtggcctcaggccaggggagcccaggttgtgcccggagcagaggctagggggccgtggtctccttgtgaacttggtggaatttacactctgggaaggggtcgatggggaggggcatattcgagccctgctttccagggtgggttgggcctgggctgaccagccaggctgctgaggaggtgaccagcagcagggtcctttcaccagggcctgtccccacgggaagggccttgcctcatcccagcttcctggaggcaccagcctctggccatccttagtggggggaaggatcctgaggctcaaaggggttcagacaggggcaggggagatatgggggacaccgccgcctccctggccagcgggtgtgtcttgccccaccttgctgctggggtttgaacactttcatgtcacttttctgtccacctcccaccgtgaggccaagctgatgccagcacgactttgatacctcccctcccaaacttggaagttttcaaattgccagctgggagtcgtaaatcaaaaagggatttgggggagcacttgggtggctccgttgttaagcatccggcttcagcttagggcgtgatcttggggtcttgggaatgagccccacattgggcttcccatgggcagtgtgcttttccctctgttcctgcccctgctcgtgccctctctccctcaaataaagaaataaaacgtttaaaaaagattttttttctgttcttggggtgaagtagtgtggggacaaagcctgggtgccccatgttggcatttctaagacatttcaagactcctagggacaagggatgggagattgaggacatgattctacttgaggaggtggcaacttgtcagcaggactctggctcccagcctggacgggaggctttcgtggctggggccacagcctttcctcttagggcacggaaaagagggaggctcaggatggcccctcagcgctgcctatggacatcagggagcagacaccttcttgagggtgccctcctggctggagatgagcccaagtcgtggccctactcctctcctataaagccgatactggttaggtgccgggagcccactgaggcctgctgccaacagctctgacatggcggggggtaactgcccctggaaccccagagaccccttgaagccttctttttttttttttagattttatttattgagagagaaaaaaaaatgagagcatgagcaggagtgggggtgggcagaggcagagggagaagcagactccctgctgagagcctgacatggggctccatcccaagcctctgggatcatgacctgagccggaggcaaacactcaacctatcgagcacccaggtgcccttccttgaagccttcttgttaagtcttctgtctgcagccctagcctagtgtttgagcacctggcttgagtccctcttcatatagaatcctcttctccctctaagatagggtctgatggtccaactgcctcactccaggctgaaaggtactgccgtccagcctcctattcggagcctccaaacacagaagactatactgtgtggtgggtacagaccagagaggctctgggttcggactgcctgcacgtgagcccttgcgctgctcctcagagggtttatgagcctcagtttcttcacctgtaaaatgggtaggacaagagaaccaatctcccaggactgctgtaaggactccagggaataaggcaggtaaagctcttagggaagtgccaggtagagccaagtgcccagcacagtttagattttagattttaggtttcatttttagcagacctgaaaagaacaggatgcaaagtcaggcaaatctgtgttcaattcctggctctcacacttgctggctgtgtaacattggcccagccagttaagctcagtttgttcatttgtaaaatgaggtttaaataatgacctactggggcacctgggtggctcagtgattgagcgtttaccttcggctccgttcgggatcctgggatcctgggatcgagtcccacatcgggctccctgcatggagcctgcttctccctctgcctgtgtctctgcctctctccctgtgtctctcatgaatgagtaaatgaaatcttttaaaaaactatgatccacttacctccctaggttcctgtgagggctgaagggtccatctgcagcttggctctgggtttagcacatggctgaggctcattatcaattaacttttcctactcttcttcccgcctggcctgcatccccaccagactctgtacacagcctcacccagtcctcttctgctgccgtgccttgactcgagtagccatctggcccctgtgtcccaccacacttgttattcttgggctgccacaagtccaggctgcccctaccccgggggacagatgtcagtctcacgggctgtttgaaatcagttgagacaacaggtggcagagctctttgccaaccatagaaggttctgtacatgtgaagggttaaagcgctgcctgcaagtgacacagagagctgagagtggtcccaacagaaccctctagaagcaggacgtccttggcccaccacctcctcctgagccagcctggagtctgcttccagccagcgctcttgcttctccatcctaaatgccatttccccccatctaaatgccatttcccctctctgggcccgagccactgcctgctgtctggggcggctggaaatttctcaaatgtcgctttgatttatggctctagttaattcttgaggaggcccgtgagatgccctgagctctggagcctcaatgggataaatcatttaacaggtagttaaatattctttaaggtctgaggagcacaggcagggtatagactggggacggaggctgggggcaacttggcaagtttctgaatggaagaaaggaaagctctgcagccgcctcagagccatgaggacgatttgtcctaagccgtggctagaggtggcacctgggggccctttgtacccagagacccaggaggccggggacacctagggattggagggtgtggagacagcaggaggtgggcaggaggcagaggcagcctgctgggccccctgccagctgtgtggtcctctnnnnnnnnnnnnnnnnnnnnnnnnnnnnnnnnnnnnnnnnnnnnnnnnnnnnnnnnnnnnnnnnnnnnnnnnnnnnnnnnnnnnnnnnnnnnnnnnnnnnnnnnnnnnnnnnnnnnnnnnnnnnnnnnnnnnnnnnnnnnnnnnnnnnnnnnnnnnnnnnnnnnnnnnnnnnnnnnnnnnnnnnnnnnnnnnnnnnnnnnnnnnnnnnnnnnnnnnnnnnnnnnnnnnnnnnnnnnnnnnnnnnnnnnnnnnnnnnnnnnnnnnnnnnnnnnnnnnnnnnnnnnnnnnnnnnnnnnnnnnnnnntgtacgaaggagggacagggtcagagaggctggaatcctgcctgaggcagcacagctggccacaggccaaatggaatccaggaggatgcaccagagggaagaagcctcgggtgtgggacggaggatcaggaggggacccggaagtcacaggtccaaagcatccattttaaagatgaggagacagggcctaagacgggaagaagtggacccgagggaaggatagtggcagagatggggatgaagcctcagggagaaggccagagggtgcatgtctgcccctcaacaactgtcctcccaaggggactgtttcctgtgaatgaaggctgtgttagagtctcagggggctatgaaaattgaagtggcagtggtccaggtaggaaggcagtgggagtgggaggcccctctgagagcctccccgccctccctggtcccccatgctgtaccctgagttcacacctccttcctggtccctgatcctgcatctgtctgatgcagccctggggtgcagggccaggccaaggtgaggcatcactctgtcccatgggagaacagattcctctagggctggggttcagctccatgggtgggaaggagcaggagaggcctgggctgacaccctgcctgaccgtggacccacagagacacaggtctgcttcagggcatcagggctgtttgggtgggggtggggggtgtccccaggagtgcctcctgcccctagctttctttctttttaatattgccatttaaaaaaaattatttatttattaatgaaacacagagagagagagagagagagagagagaaagagagagagagaatggcagagacacaagcagaaggagaagcaggctctacacagagagtccgacgcaggactcgatccagggactccaggatcatgccccaggctgaaggcaggcactcaactgctgagccacccaggcatcccaatattgccatttttaaaaaaagatttatttaggggcaggctgggtggctcaatggtttagcgctgccctcagcccagggcatgatcctggggatctgagattgagtcctgcattgggctccccgcagggagcctacttctccctttgcctgtgtctctgcctctctctctctcttaaaaaaaaaaaaagatttatttatttgagagagagggcgcatgtgagtaggaggagaggcagagaaggggagagagtatcctcagccgactcctctctgagtgtggagttggatgtggggcctgatcccaggatcctgagatcatgacctgagctgaaactgagatcgggtgcctcactgagtgagccacccaggtgcccctgcccccagcttcccaagcaggtcagaatgcacaggagcagctagagtgggcacggggccccgggccagtgtgcggtgagctgccctccctgccgggccctaccttgcttcctatcagaaagctccaggaaggtgatgcttgctgtggtgcatgaactggccccatggctgaccagggagttctggaaccttgggaggttctgcaggctcaggaggcagtccaagaagctgatgtcgtaggactgacttgttttagggacaaggccagtcccttctttcctgtgctccgaccaagacctcaggggaccctgaagctgccatggacaagtactgggttagggtcggggggatccctagggcatctgccacccacccctgcagctgtgtgtgtgagcgtatgtgtgtgtgtgtgatggggaaatgtcaccccacagtgcccgtgcccacgtctccagcccattgtggctgatgctcccaggttgactgcctgtggcccggctgggagtttcttgtgcctgtggttattttctctcccaggcgagcatctcctgtggcagagggaggtctcaaccgcagcattcccctccaagcccccgggttaacatggcacaggcctgggtcctggcagatgccactcaggtgaatatgccccatgtcagagcatggcagagtatgccatgtggtccgcagctgttgccagggctatagaggggaggggaggagcccagggtcccccgatgagcctggctgagtcacctctgggtgtaggcgaggggtgagggcgggagtgagaggaacaggtctttctgggtgtgcagtgacaggtagtcctggagcatcttggcaccctcatcttctgagtcatcccatcactctctcttacaaccatggaggatgaatgaataattcaccagtggttccaactttatgaagtatccacccttccctggcctccagagtaattaactctcatgcaggcagaggagcatcatcaacagcccattagcaccctgtccctagtacctccatcaaaccgctgtctgggtggggcttcctgggaatgagtggtgggtggtttgcccagggagcccagggtgagtgaggtcttggctctagctcctgggtcctcagtctggagcaaactgttgctcatggattttgcagagagctgggggttgcaggtaggctcttagaaggacttccaggggaagagtagagcatcttcagcctctgtctggtgggactttagatatttttctttttgcagctgggggcacagagacagggaaattgctggctcgtcatctcatagcttgtgggtggtcaaaaggggagctccggtccagtgctctttgtattaattaggctttctgtctaccctccgcctcaccttgagcccagcaatgtctccaatgggggtgtggagagatagtagagactcccctccaggaagggatgggtactagagggaaccaggtcatccttccctgggccactcaccccttggtgcttgggatgacctgcagagaggcagaaagcccctccagacatgggtccacttgctcagtgagtaccactcacctcccaggtgctgcgttggtaccaccctgtcctctggtgcacggagtgggcagatgggggctgggtaggctgggcagctcagaggcccagagcaagtggagggagcacaggggcctgggctgagggttcacacaggcctgaggtcattggctgtttgggggggatcctcctccccagctggagccaaagagatgggagagggggaggaagaaggcagagccttggaaggatagtatagggagtatccagcctcagacggactggcaccctctccagtcccctgacagcaccttgtaccctcgtgcccctgcttttgtctgagccacgccctctgaaagagagcactcagatggctccttcctctctgtgaatagatgtgcatctaaccacgcaggtccctcctccaggagtcctttcttgatccccccttcccccttcccagttcccacctcccacctgggggttaggccagatgtccctctcctgggctcctcatacgcccctcatgttgaaatggcttctgtgccttagtcatccaggcagccctgtcccagcacctagcacaggcaggctgagatcagaagctccaaaatcagctgctgagtcagcgggtgggctgccagccaggggacctcatctcactgcctggccctcactcccatttgctgcgtgaccttgcacaggcctctttgcctctctgggcttgggctgcactattgttttccataggtttttgaaatgcatttcacatccggacaccatacaatccccatatgttgatttataaaacctaaattgagaccaaattttgcaaactgatgtttcccttactacatgtgtcatactctttattttgtgttctcttcccccactcctgccccaaaggctggttgcaatccatgaagtggttctcccactcacaggtgccgatggccagttggaaaatactgcctaagatggtccccagcttctctgctgctcattgctcctgcactacccccttcaaagacttttccgacgtccccaacaaagacagcatcagggatgaggctcgaggaggccacagccaggtcctcagctctctgggggagatgttggctaggctgtgtctgacgcctcagtagggagtatgccaacctcttccaggctctctgagcagggtggggaacagaaccccagctcctagcccctgctccaggcttctgcctgtttgggaacctgcagaagaggcctctggaaaaccccagcagagatgcttcctgccctggcccaacctagagatctccccagtgtcctacgctctgttcttacagggaccccagcattcaccttctggacccctccaacagggaaaggaggtgcgattagaaagggcactaggacgatgggcatcaatcaggtatctgtacaaaccaggatgagtggtgaccctgtgggggcccacccagccctcctccccttccaaggctcagaagcaggcgcgtggctctctcttccttacctgggcctcaggaggcatgcagacgcctctcttcaatctctgcctcgctgtggggaccatgctgctctcagcaatgtaatcaaccccctgagcagaccctgctgaccactgtcctcccgcaggtaaaccacgaacggttgaggggaggccgtgtgacccagtcctgaccagtgagatgtgaggggagggtttctcctgataggctgccgggggcagaggacttgtggcccccaatctgcccttggccgtctgggtggtgccgtgggagagcttcagtagtcgtggctgatcctgaggaggacggagtgggacaatgaagggagcctgggtcttggtgacaggactcctgagttggctgagtgacactgggccactccaaataaatttgtaccacaaagataagtgtggtggaaccctgcagtgttacttgcgcgacgtccattacccctccttccactcccagtgtgtgggttagtgtaggagtcctcactacacaccacacaccccatgggtcccgatccaggcttggcccatcagcattttcttcctcctgattatcaattggttcaggctgagcctgtgacccagtagaacccgtgaagcttcgttaagggcgttctgctgggacatgggggaaaaagaagttctctcctccactgggacttctaaggtctaaagctgttggccaccattgtgccaccttgggaagaacctggggacataatggggagaaagtctgagttgtggtgaggatgcatgggtgtcccacaatcaatcctacccctggatggcccggggccacctgcctgaggatgtgtaacaatgggctcaggggtgcggggtggggtagagagagtcctgaggtggtgtgtttgccaattcccggagtgtacacactcctaccttggctgactcaagctaccgactgcttgtcattgaacagagttgggaagaagtacacacggttggcccttccaagtctatgaggaccagctccagcacactgctggggttaagcccctctggctgggctttgtgtcactgataactagaatgatctgacctccatacccagtcccactatgctgggagggaactctttctcagttgggtgtgggctcctatcaagactgagcaagtatgtggtgttccccattcgctacgccatgggggtagctgtggtttcgttgggctgtgctctgctgttttgggctctagaggaggctgtggacacctcgaagctcctctgtggcctgacctggggctctgtctcccctccccaacccccagatactagctcattttggagcctgggctctgacccaaagcaggaaaagctgggccttcaagccactctgctctctgcctccactacctgggacctggctgcctgggttttgttttggttttgcggtggggaggtgacaaggtaggaggcaagaaccggcagaaagaatgcagagtaatatcttaagcagttgtcctgccgcagggaacagaaacagcaccttcctccctgggctgccgggaggattaaattacatcagactgggggctccgtctaagcctctgccttctgcccaggccctggggtcgagccctgcttcgggctccctgctcagccgggagcctgcttctccctctgcttgtcgctccacctgcttgtgttctgtcaagtaaataaaatcctttaaaaaataataaatcacatcaggcctcagagtcctcaggaaccaacttcccatgcgtggtgctgcctttctgccagctattttcataactgtgctgccgtcctgtccacacatccctgtccatgcacccacacacacccctgcctgcctcccagaaaaaaacctaccctgctcttcccgaagcttccttatcttgataaatggcagcttcatccttgcagccagacccagtccttggagctattccctcatcccacctagtccaccagctaggcggcctgctccacctcaagatgtcagccaggtctgaccacttctcaccgcctcactgcttccgctctggttcggctgtttcttgtctctcctggaggagtacagcagcctggcgtcactgccactgcctgtgccccatcctcaacccagcagccagagtgatcttattaaaacctgggccagaccattccactcctctgctctgacccccacagtggctcttgtccccactccaagtcaaagccacagggccctaaggatctgcctcgcctcacccctcaaccacaccaacacactctgcccctgggcctctgagggtctgctcctcagaatgtctggaacattcttcttcccagatttccccatggcttggtgccatcagggcaccttcttggggaggtgccccctgcattgctgatcatgccatctctgcctccacctcactctactttgcctctcccagcactgactctcagtgtttgacaaattgtctgctcagaggcttttctcctctacccatccaggagggcaaggccaccaagtcactcacctggctgagacgacatgttcttgactggcccagaaaggtctggcctggggccttgtcgtcttccttgctctattcccagggcctggatcagagcctggcataagcgaggagtacagtacctatacatttgactggcctcagtagtcttagaatacatttcctgcagttgctccaaagtgagttggagctgctcagaggggagtgtgcttttccctctccctctgccagttgctccccctgcttgggctctctgtgtcaaataaaatctttaaaaaaaaaaaagaaaaagaaaaagagaaaccagatgttggccctgttgggcccaaatctctgcaagcaacagtgccaagaggccgggtaggggaggctcccatttgagtctacactctctagctagcggcaggcctcaccacccctattgctcctcaggacactgggctctctgctcctcttgtgcacataccctgcttccctcagtgaggtctcatatttggcttctttttggcacttgggtttgtgatccttggtccaatgaatgaagttccagctccttccaagtgtatgatgtcttctgtcaggctccttcatacaactccagctttatccctggcttctcctggcttgctccttggactccaataataaggaaccacttatagcttcctacaaccacactgatgttatatttctctgtgcctttgccacctcccctttttagctgagtcccattcaccttttattcttctactcatccccccctcttttattttttgtaagatttttacttatttgagagagcgggaacaagaaagaaaacacaagcggggggttggaggtgaggagtggggaagagggagaaccaggctccctgctgagtagggagcccaaccgggggcttgatcccaagacctgggtattgtgacctgagctaaaggcagacacttgactcagctgcccaggtgcccctctactcaccttttaaagctcagccatagtggttgccggggcggggggtgagggggaggtagggaaatagggactacaaagggacatgaaggaactttctaggggtgatgaaagtgttccatatcttggttggggtgatggttacacacatatgtacatttaccaaaaaaaaattgttttgaaagaatttatttatttatttatttatttattgattgattgcagacagagagaggcagagacataggcagagggaaaagcaggctccctgtggggagcccaatgtggaacttgatcccaggaccccaggagatcatgacctgaactgaaggcagacactcaattactgagccaccaaggtgcccaatccatccttttattatccccatttttatgggtgaggaaattgaggcaccgggtagataagcaccttacccagggctgagcaggaggtgggtgcagactccggtactctgactccacctggagcacgtggcctctctactggatctgatcaatggcacctgctatttgtattatgtagctctttctccctcgcatgatcccctggtgccccttgtctttaaccatgtcccagaatcatctccagtctttaaggtcacggtcacagttaacaggacgcttgcaaaagcaagattttctcattccccacagagtttctggatggagaacaggctgggcctcatcaccaggcaaacacccgcgttgtgttgacaggagccaggcggattaacaacgcagacggttcagctcaattcacaaacatttagccaacacccatgatgtgccaggcagtagtctggcaccaaggagcagggcagagctaggaagatggagaaaaaggtgcctcagctgggagatgcagaggaggatctaaaggggcctgagtgagagagctgtggcaggccctgccccacaccctagcggcccagtttcttggtttaactcccatctggcctaggctttggaggtttggaggtgacattcgtcattcttttgggccacccagaccctaagaagttggggggagtcctactccagacgtccctgtctcccactaaggaatcccaatgcttagtttcccagactccctcacagccagggcataggcctatgacccacatcctaccaagcagaagctatgaccccagaaagcaaatggttatggagagggtggctgccgacacccctgatcccagggtctgtggtggcagaggttagtgctgtatcctcagcgatggtgcgcgagatgggatgcctgtgttggctgttctacggtgagatgttggacgatactatattccttattggacagctgccaaacctgctcttgggccctcccagggtccctggcttacggcacatcctctggtaacttggtttctgcttaaactacttggagctgcttgtggttggtgactaagaggctgggctcatgtgttcagtcctcacggccctcatcacccgaccgccccacacacagcctctgctcacagcccagcagggagctggagatctcaccaccttgctcctcactcctgagcccttgggactgaggaagaagacagtggaaggggtgtgtggacatggtgggtgggttcactcaccctctatccccacaccctgctgtgctttcccttctgcactggaaggctgggaagctacaggctacacttcccaggtgcccttgggtcctgccatccagtgcactcacaggaggctttgactcaggagccgtgttttgaggagagggaggaagggcatgagtgtccactttactagagttgatgtcagggtcagtcatttgagggtggtttcctgctctggcactttctggaggcagcagctcacttgggtagcctcgttctggggtgtggtgttggcagctgtccattgctaggagttgtctattcggatcttctggtgcctttgtgagctatctgtgcccccttaataaattatttttgctggaataagaatcgtgggagtctgccatctgcagctaagagcccagtccaccctacccaatggagtccagcccttccttggtcctccctttgctccagggggtccccacagctgccacagctccatcagctcacccctccagtgggaacttcctcatggctcctgccaggggtaagccgtctccccagccatctccccaaccttctaaagaccagagccatggaagcctagggtcctcacctatgccagggcctggggctcttcccaccaccttggcccggagtccagagcactcgacctgcactcaccactccccgtgtcgcctgtctggagagagcagtctcctccttagctagtttaagcagaaaggaatatattaccaagagttcatttacagaattgtcagaagaacttgtgggagggtcctacttaccaaggaagaaaacaggccgaaaaaaaattacttggggcagtggggctggtggtcaatgtgctcctgggagtggccacatccccctgcttgcccccagtaccagccccgtctccgccctgacaccccacagtgtggctcaggcttactcaaaagccctccaggtggccctccagtgcagtggaggtctgtctgtggagctcctgccttagcacatgctgtctatgggagtgaccaaatctattgtgggtgctttacctgtttgtgagcttttaatgaatacaaaatcaggttcctagatggttctcttgactgatttttcctgcaggcgttatggagggccaatatagagaccatgtagagagcataagttctgagtctctgctagtgtgtgtgtgtgtgtgtgtgtgtgtgtgtgtgagagagagagagagagagagagagagtatgtgtgtgtgtgtgtgtgttgtggggcagtgtgtgtagtgtaacctggttacacccccttccccagcccatccgggcccaaaggaacacattctggaatcaacataaaaaataacagggataatagggttgaacagacccatttctcccacacttcagaaactgacatggaaacactaaaatctggacgaaactctggagcaataaacagatttcaaagtagtttgaaaaataaatagtacacaggactctacttgctttgtactctgatatattctgcttgaattttttcttttattctcttcttttttattttggtaatactggtcatagcccatgaaattggtctcactgctcgccagtgggtctccatcttactgtttgaagttcaccgtcttagagcatctccctccacctcgggttttataaaggcaagcaggagagaccagctgccttgtgtgcttggtggggaaagggggtcagagagaacagactccagcctttggaggatgaggtgatgagacagggcatgggctcctgggaggacacaggggctcttacaaagccatcaacaaaggagggcggatggcccagggatgcctctggggaaagaggagactggtatccagctgctagcccagaggccacagctttgtggtcctagaagtgtggaggatttcctaaggcagggaggaagaacttcccttccttcctccctccatacctccctccctccccttcatccatcctctctgccttccttactcccctccttcctcctcccatctctccatctctaacctcctttcttcctccaaagcctggctgagctggcttcctgtctggaccctgctcctccctggctcccagtctgtggctgagcccccttcttgctccaggtcttggggtgctggtcctcactgtccctgtgagctctgagagttcctggggtggctgatggctggagccctgggccaggggccagaaagggcctcagaggcctgtccaacggtggctgggtgatggggggatgggggtggggtgggaatctctagatgttggggtttaatgctttctgccgcacagcccatcctaagcatggaatattcattatatgataccaacatttagcttcagcaatggaaatgtcaactttaattatgttcaaggagtcttgatggctctgggaataaatcaatataaataatgttttcataaactctgaatcatgctcctaatagcattatatctataattttaatattcaaaacaatttttctttgcatcttcgcaattaattgatgccaagtgctcatttttctgttttctattgctgtcacctcagagccagaggctggagtgggggggggtgacacaggggcacaggggctgtgtccccggaacctgagaacattcctaattctactgcccaaagggccaggctccgtacgacgtctcttccccagaaaaccacccccatttctccccacccattagtttactcacccttctagcccagtgtctccaagaagcctgttttggccaccacgcctggcagggatgggtccctcttttacactagcgcgacattcccattcacggctccccaggtagacagtggggacagcaggacagcagtgagagctcaggacttgtccacggtgcgccaccagctgtgtgactctggacaggtgacaggtgacagtgccaaggggtcatctacgaggtagggttcctatttgcaggtcacagagaatgacgctggtggatatgagcagaaatggaatttattaaagacaccaggaagctcaaactctgcaagggccaaacagttctgcctggaggcaatccaccaggagcagtgtgtgaaatttggatgcagagctggtccagaggacaccactgacacgctgaggtcctggcccttgcagtttgcacagcagatagaaaggcctggatgctgggcagatgctgaaagctcttggaagaatagctggcgttggaaactggctgtggccgggccaccactgttgcccggatggagaactttcccatctgcagcctcctgcttaaacacgctggggcctggggctctgtgcagccaggctgcagaggagtatggaaaaatgagtatctactggttggcatttctgctaaagtgaggcaacctttctgcttatcctacgaggggaccccaggcataaggaggaggctcagatgatgggcagattggacaaacaatgctaccctggccacaggcctccctctgcctggtggttgaagcccttttgcagcagcattggggccagcattttctcagtagggaaccccacaaatgcagctcccacggcctcctctccaatctgatttctgccccaagcctctggttcggattcgctgtcccaggttgtcgactcatctacaggaagaatgcactgatgggcaaatgggagactgcattcctcatgatggttattgttctcatgtaaggaaagaattggccttcgggtttttagaacctgattgctcatgaggttacagcctatgaaccagtatcccaaacctgtcccttccaagccaccagccatttaaggtccctttttctaaggctggtaacctagccccaggtcctggtgacggcatggggaatatctggaccatggctggccctgtccatgaccctgacctagcagcacctttccattcccacaagcataggacggtgccctccatcagtcaccatgcatttgagagcagaaacgaaaactacagcctctgtgaaatcactcacaccaaggctttaaaaagatcaagcccgtttaaggatatattggaatatcaccttcactttcaaaaatgaaatttgtctgggtgggactctctgggagtttccagaccctgtccctcttcagtgatagtgggctgaacgctgggcacctaggggttctgcactgtgggagggacagacgaatggctggagagctaccctccaagtccaagacagccagggagggagggttaggagcaaaggggtctgtgctgtggagaatatgtgagcacaagattattctttgtctgggactcctgggggtctaaccagaggtgagtggatgcgtgggataactttctggggtccctttctggacattttttctaaagatgcccaaagagtacagatcaggtaaaaagccacaggagagcaggtgacgggactgtcatccccatgtgcatcattctaagggatctgccaaagacaccaaattatattcccttcatgcatgaagacaaagaagggacatctgagagctcttcttttaaaccgtgctcctcctaacaaagaaagaatgcaagcatttgtactggagagccgtccacttgattactacacccaggacaaccaattcatattatccctgagcaagatcctcggagattaactcgacgtctcataggccattcatctccctcgtccaggggttgggcaagcatgtttgctcctggagaacgtgatctcccaactttacctgagaagtttcttcccaacagcagcatcgtttaagagtcacctcctctgcctctacccattccttctcttctccctcctacctgtccagattttccattataagcagccgcaaaggaggagggaggtcccaaacagacttcctgagggtgtgggagcctcaccccagtgagaaggggcaacgagacagcatggcagcctggcatgtaccctgcagcttgagcagagggaaggcagacagggaggaagcaagtggtaacgggtcacagtgggagggacagagaaccaggggatggactccaggctgtggccagcatcaggtctgcagggtttggggacccaagggggtcgcagaactgccagtttcttttttttctggcgtaggcttgagagagaagccatgggcatagggtaggagtgggaggaagccaggaagggctggccaggtgggtggtacataattgagatcctgaagggaaggttctggccctcccccctccctggcctaccctaactcctgggcaaaagcaaaagtgggggacttccgggggggccctgtcagggatagaactcctcaccccatcaggtccggcttgtgagacctcagagaccgtccaaaaggagaagcctgggtagggggtagctgagggcctgatgcatggcccagagcagtgggcaggtgctccaaagagaccaacgtcatgccctcctgccagcatgagtgctggccccgggaagaggtgcctggctgcctggagcatctgggtgagagccagctctctgagaggtggccccatagctgcacctgcggggtagctcaaaatgggttgttggcaggctgtctgagcctcctggggggtgccagggccggtcacaagccgactggagagaggtttctgggggaactgtgtgcagaatggggggattgtgggagtgctgggcaggccagtggcaattctgtgctgtttgtcatctcaagcccttatcaggcactcccttcctctgcggagggcatcaaaaactgtctgcaggggtgaggtggcaggaggaaggagggtcccagaatgccgcccctgcccaccccccccccacctcatttttccttttcctctccaaccactccactggctttaaagcctgcaaaggagtgctcctctcctccacccctccagcccagagatgccaaggttccgaggcaaatgtgctttcctaggaggggcctctggagccctgtggtcctcctgtgaagacctgggggcttcgaggcccaggatctgcgctaattctgtgccagcccacagctgggcagaccccggagaaggaagctgtgctgcagagtgtagccagctcagagcagagcgcaggcctgtggggccttctcctcggttcctttttaagggctgggcccgaaggggagcctcgcttttggctcttctctctggtctccgcttcccacctcccacctgacaccaagcccggattccaccttttttctcccttttctctcccacatcccagctggtcagaaacagtatgtcccaagggagctctggcccttagcaatgtaaaaaaacgggtctgttcttagaaatacagtggtcatttggccagccctggggatcagttctgtcctggtaagccaccttcccagggatggccagaaagtggtgcttcctctcctgccagctccctcccagagtcatggctccatctgcttgggctcaaggcattgctggggctgaggtcctgaggcagggagtgacctaccacaagtccctcctgccctgaaggcctgattctcctcatctgtaaaatgagtggggagtggaccccatcatctcggtggttccttctagctaagaaatctctctgtgatgatgctggggattggatagcctcagtggcctgattgataaaaggtggagactaataaaaccattgagatgtgaagtgttgagtgtgaagagtactccctctgtcttttctggaacgaacatggttagcattaaaggaaggagggccctggccagggcatggggcagagtccagccggcacccagggctccccatgcccctcgcccccggctgcccaccctttggggttttgggaggaagccataggaggctctatgtctgggtgctggtccacaggaaaggcttacgcagacactcagagactatcttctgttgaatcatgaggaccggcagcagctatgacaaccagccatggccctgcttgccagggagcagactcagagtccttcttgtgtgacaggaacagggggcctcccaggggctgcctgtgcagaagggttaagccctggtggaagggcctggtcaggcttgggtgagggagagcaagccaccacggagcacacagcagtgggatctgcagaagaggcaagtcgctgggggacataaggagccccaaagccaggtagccacgtctccacagtacaacaagcgatttcttggaatacttgtggagagaaagagggcattgatgagtgcaataggtgcccccaccttagagtctagaagtgaacagctggggtcccggccaaagtccaggcagagggcagttctagactaggaagtccatggggggaaggggaacttccacacacattagtcaccatgctttgtactatgtgactccactgacagggccaaggcagccccctctcccctggggtggtgacccagtttgaggagcagcagagatggagatgcagtccgggagcctggtagggccatgcctgtgtccacgttcccagacctgctgtgtccccattgaccccctttctcatttctggaggaaagggagccccctttccaacagctgtaagattcttagaacatgggagcagaactgaaaagattcttagaatgcagggaacagaactggaaaggcccttaggatgaagggaactgcaggcaccactgcctggggtacccggggcagagtccctccctctgggcttgcctgctgtgagcccggttgcaggacaaggctggccaaaagcggaggtgtgagttcacaatggaacaataatagttccattcagatgttaacctcccagtgttgggtatcatttctgcatcatcctaccaggtctttcatcagcccagggcagcagccaagatagattatttatctccactttacagctgaggaagtgggcttgaacaggttacggaccttcaagtcccagaagctccaaaagtgggatggccaccagggggctgttggccgacacacaggggacagtcaactctccctctgtcttcactcacttttctcaagaccttccacaggtctgactccctgcacacgcagaaggggagcatttcagagaggagctgatcatagcccctggctgtgccacccctcttctgcgcttcctgtgtcctgaaggaactgcctcccagcagctaagccacccaaggggtccccagaacactgccggccccgggccgcccagcagcgggggcctggtgtgtgtggctggggcaccaccaccatcacagatggagcccctcggctcgttgtggcgctctttcatctgtactcagtactgtcaacccgttttctgcacagaatgaagataaatggctttgctctggaaaactgcatttagcatctcattctttttgtggggcagggaagtttccattgacaaagcattcgtattgcagatggcttgccatatgccacattccctctcgctatcaccttataagcagattctggcaggttccaggagtaaaagcttaattaacgagtggtgtgtacaattatgtacttaattatctactgctttcccttctttgttgtttcttggtttgcaaaagtttggtaacaattagaggcaactgttccctaatgcaatttctctctgcttctctctctctctctctctctctctctctctctctctcaattttgccctttggagactgccagtgggatgagaggggggcttcctgcttggacaggcaagctcaacgtggccgcgtcccagacttactgaccaagcttcctggggggcggcccaggcacaggagtttctaagaagggtctctaggatgctgatctgcagtccaggctggaaatccagacctgggcctccctgctgctggctggatgggcagtcaggacctgtcttggtctttctttgtctcaccctattggtccatcctggggagagtgagtgaggctggatcagggtagcaaggagaatgggaggtgcttacagtgggagggtggatggggggcaagagacacacacttctgtctcagggtaaggacaggggcaactttaaggagcagagcacaaaaagtaagaagacttggaatggaagccaaaaggcagcaatgtggagggaatctgctaggctgaaggcagatttgggggttagaaaggagtgattggactcccctggatgtgaacctgcttgcatcccatgtggcccaagggccaggaagcccaggctctcacacaggtcatctatggtaggcatcagggcagcggtgtcctgttttagcaaacttcccttagagttcaaactcacttatcaacacgtggtgacagaaggccacagagccgacagcagaggagtctgaagcattagggaggtagcccatgtggcttttcagagggccaagggccggccctgggctcctcagccgtaagatctccagtgcatcctcctccccaagcccacagatgttggttgaagctgggtgcagtctgaggaggcaggagggggttggtgtgggagaaagggagaaggtgcatgagcagaagaattgcagaaccagggaatcaggacttctctttctccgagtcaagggagaaacatgatggacatttccccaaaatgaagatagacagaggccgtgccggcacctcaaccaggaatcattggatatgccacttctctgcacgtccgtttcctggtctgcaatgaacagcaggggcaggaagagttcttggggctctgctaggtccctcacacgattctgagttctacagacacccccatctcctatttcttagagaagagtctgctgggctccagagggcggtgtgctggcagaaaaaatggtagtggccaggccgggcctctgacctcatggtgtcctggaggcctagaataattccctgcatgtgttaggtgctcagttcatgaaattttgacagacatgccagttgcagctgctccaggctcatgattccttcaaaagatgaccgtcttaccccagagggagagccagagttctctgtaccatgcctggtcccagcctatgggcagccgatcgaggtcggccagcttgagataatagcctgaagaggagagatgacatagggtttgatggattcggcttctcagaaggttgacctggaagcctgaggggttgagcaatgggagtcaaaactgaaaaggatcattagaaggaagaggtagaggtggggtaatggacagctgacacaagggggagatgatgagggagcgggagccgggtgtcagcagtggtcctgcggtgaggggagacagcgtgccctgggctggccgactgggggtgaccaaagaactcttcaaatgcatggctagggagcctgaggaaaaatcacagtggggttgtgaacaggaaggagggctcttccgctgatcccacctcagggccagggaccaggccccaaggccttctcggtgcctttcagccacagataaacctgcatacatcactgtatcccacaagtcccatctagccctctcccttaccccatcacactcctccccagggtggggaagctgccacatggctgccggccaccttcatggatcagcactggtggtacagggcagctcttctcccgagcctgcacccctggccgcagctcagggccacatcaggtcccagagtacccagccctcccgcatctgtcccaagtcattcctcagaagaacttcaagaagaccctgactatttgctgcccatgtatgccgtgggcacctcagatgcggtggggatgcggctagggaggtcagaatgatgttcatcacccctgctgagagggatggtccatgacactctggggactgctggaaaaggtttggaactctgtcctccttgcagaggcggagctcaacttgcgtcactcatggggtcaggctggggcttggggactgtgtgctcagctggccttggggtgagtgatcagtgctcttaaacctggtgtcactgaggatgaagagcaggggaggaagccccatgtaactactcactcttgtgggtgattgtcatttctacccctccaccagaagttcactcctttagccatcacccccaccctcaccccaggcagattcaccttgtcatgtgtaatccctccccaggtgtgcacgtagcacctccgggtggggaatggtttccacctgagctcaccagcccctcccaccaccctaccttacaagctggtccccagcagccccagtctgagctttgttgccatggcgacatcagggtcgctgggaagaaagaagggcccacagggagaggggggcagccctctgaacatcaacgaaagtgcgaaagtgcgtgttctggcctctccggctttgtggctgatactccatccaggccactcttgggccagaggacagctccacgaggcatcgcgtgaagccctgccacctccccaggcaggatcggctcttgtccagctgatccaccacgtgacttcccacctggtcactgcttgtctgctaccccgtgctcagttcaaggtctgggcccgtctccctggccagagtggatgcactctttccagcctcttctgatgctcctgcccctgctggggctctctgctgaggcttctggacagaccccaccttttgtgaagcccgtccatgaggcccacacttggcatcccaccgctcctctcagctcaagcatcatcttcccacgtgctcttccctgaacccaccggcctctgtgtggctacagaacactctgctccccactgagaaatcctaccacattctctcatttttaattgtttacaggtttgtcctccgcagaagtcttagtactggtcacctctgtgctgacattgttcatgtccaaaaagggcttgtcttgcgggtgtggggtggtgttggtgagtcagggctggggcacatgggtccaggtggggcagccagtgggatgaagaatgggatggctggctttcctgccgccttgctgatgagaggcccttgggctcttgagcagttttacccactaagaacttgagtgttcagagaaaataaacacctggatcttgtggcttcaacacgtgccatgttccatgtggttggatcaggttatcctgaggacgtttcacatggagaagggacaaggggaccatgtgttacaatgtgcccaatggacgccagtgtgtggaggaagcccggctcgttctacaaggccagggatggaggccactaggaagcagagggtgatcagatgcgtccggcttcagacctggctctcaatcagagctgcgtgcaggtgatggtgcagggctctaatggagaggaaatgcaggctagacagactcagatttctttctgtcccctccccccacttgggggccaggtggggcctctgtgggtgattctgactacatgattcttcatggaatttactcaaaacatgatgaatgtgtccccagtgttcttaaagcttagaatatctgagccaaagaggactctgggaaagttctagaacagaacccagaggaaaccaaagcttggatgcagcatgtaactgctcacccactcacagcagagctggaactgggccctgggccttgcctttttcccactccactaagacgagaacatgcatttcctgacaagcaatctgccaatatcttgtcgggttgtgtgcatgaatgttccaggatgccagaattaatgtaatgtctcattacgttactcttatcaccaaggagtggctcacagcatcccactcagggccagctgattcccccttgagtggaaagacgatggtgttgaggcaaggaccatgtgggcaggtgggaaaaaaaggagagaggaaacatttcaggggaccaaagacaagttaaagatgaggaagtagctaccttttgcgccccctcctcctccctacccatcagctagaatgttgcctttggttaaatgcctgtttggggtatgtgcaaaaatcaagaactctgccaggacgattccaaagtctgccacatggaggccaggagggaatcctggcagttaggagggaactgttatggagctgctttgtgaaccatgaagtgagacaagtgtcccttgtctggacacccaaagggcccactttgtgagcctgcagctacttactggccaggtgccagcgagaagactaccctctcaaggccatgcttggctagcttcacttcacagggccttgggtggtggcaacaaggaatcataacttacattcagtccttcatcatttttttttaaacaggttttaaaggactttcttatattattttaagcctccacttaagtatggataaagaagagcaaggagcaaaaaagtcttccctaggcaaatgcagacatgtgttccttcagttctggaatggggtagaaagactcctaggtcaatctgtatctcagtaccacatggtgactcctttccccttgggggaccacagatttgctcactttcatccctccaaatagctgtttctcgcttcccatcaagatctccatcccaactccagagaggctcctctgtgcccgggctcgcactccaactcactgtcactctccccagcacccccatcaggcctgcccctggagtcctggcacttgagaagcttcagtcagctatgccctctggcccccagaatgagcagtgagcatgttcagcagaaatgctcctcggctagcagagatcaatacgtcgatagaaacgtcaagctgaacataaacagagggaggctgagagaagcaggggcagggggctaagtaggttctggaaggaaaagagccagacagccttgtctagggaacagttccattcagttaagcacctcatctgcattgtcaatgaaaagaaaaagactcatttattcaggccccactaattaggaacccaccatgacacccctccggcctagaccaaagcccatttgtatcctaggtccaatgagaagggttttcaggagggacaacctgctgctgagctcaatccctgcaggcaggctttgcagctgggccttgcaggggcatcctgcaccatttctagccaggtctttcttagggatgtcttagtgtctcatgtccctcaccagattgtaagctccatgaggacagcaatcgggaccggggggccccctgagccaagcatgctctgtgccacaagtacccagaaaacacctgaggacctgccttggctagagcaactgggccaggcagcagtctggcacagtctgtccttttccttgggagagtttggaaaaatacacccaaaccaatgagaaatggtttaggacagggcacctctgcggaggtgcgactaagtgggtctgggtgggttctccatcatgagtccttgatcatgtttttgaaaaggaagtaggaagaagctagcaggctgggttaaacatggcagagcttagccaaagagaccaccaggtttttttttttttaaatccctctggaggtccttgcagtgctcagattccttgtgtaaattaaaacttgatttctttgtactgttatgtagctcgtgtcaatgcactcatggaatggaagccttgtgggagacaggggtgttatggagtgagagagaagaaagaggagcacttttggagactagtagggtagggctggatgtttaagagtgcagcaggaagggactggggtggctggagagcaaggacaagttattgctcaagaccctggcagtggcagccgtatccctgaaaagtcacttttgagattctgcactctgggtgacaaagaattgtcctcttgaacatcaacagattcaagggttcgctgggctaaaggggactagtcatgtaggagaatctggagttcttgaagtggttcagaaaaattatcccactggagagagatttggggcagctaatgccaagcctggtagtcagacggtcttcaaggattcagggatgggcttccgcccagctgctgggctgagcagcctcaagcagagacccttgtggaggatgctgggtgatggtgcagacaccagttctcgaaagtgagtgatcaggacagtttgagctcgaggtggataagctgggtggagtccagtgctctgagtggatggcccccgccttcccctgtgggatcatgggaggatggatgagtgaaaagaaaagatgctggtggggaatggggtcattgtagggggatattctggatcagtgaccctcagattctccaccttggcccgatatggagttgctttgctttccctaattttaggcttgccttgggtgggaaggtatatgagaatgttttggaccctggtgtggtggggacatggtggcaccaatgggcctggggataggaccagaaatggcctcgagagtgatgcctgatggcaacctctttgctcagccggcaatagttacagcctgtcacaactcaaggatcttgaggatttataaagtcctgtggtatccaggctctcactggagctttccacagccactttgaggtaggaaagcagaggcaactgagtttcagagaggtgacctgtctgagggtatgtggcggcttagtggtagaaccaacaccaacaccagtggtagaaccaactccagccccagagtgctcatctctggccctttgtattcttgcccccttcccatctatcaagatggaagggggtccccaagtcaccccaagaaaataatccctggaatgtgagcatgtgcggtgctctctcggcttccaggaacctcctcatattcagctttccaaacccccttggaaggatgtgatagggacattctcactaattgctacctgccttgtctttgaactttgcagattgggagtgggagggggcataggacaggaggtgttccccacccagcagaccactaagaatgattcacacctggcagttcagtgggaaaggggctgccttagtctcttggtgtacctgacaagtgctggtagcgagccaactgagcccctcagagcaggggcagcccacgagctccagaaacccagggaccagcagatgaccccaatcaagggagtggggtgaagcctggtatatctgacattgggagatttgtcagcttccctctggagctgcctccttccaccgtgcagctcataggcccagttaaagtgagtctcctctggcctaggcctgggttccagcctttggggccttctgtgggggaggaggctggtagtggcctagagccctcacttattcctggaatttcagaatcttctgctccctgcagcggaaatgggtctgggtttgagaaagactttgatcttgaatagatagtcctgcatccagtcttggattgccactgactagctgtgtgaccttgagccagtcatatctctggagaagaccctcacagagtttctgtaaggatcaaatgnnnnnnnnnnnnnnnnnnnnnnnnnnnnnnnnnnnnnnnnnnnnnnnnnnnnnnnnnnnnnnnnnnnnnnnnnnnnnnnnnnnnnnnnnnnnnnnnnnnnnnnnnnnnnnnnnnnnnnnnnnnnnnnnnnnnnnnnnnnnnnnnnnnnnnnnnnnnnnnnnnnnnnnnnnnnnnnnnnnnnnnnnnnnnnnnnnnnnnnnnnnnnnnnnnnnnnnnnnnnnnnnnnnnnnnnnnnnnnnnnnnnnnnnnnnnnnnnnnnnnnnnnnnnnnnnnnnnnnnnnnnnnnnnnnnnnnnnnnnnnnnnnnnnnnnnnnnnnnnnnnnnnnnnnnnnnnnnnnnnnnnnnnnnnnnnnnnnnnnnnnnnnnnnnnnnnnnnnnnnnnnnnnnnnnnnnnnnnnnnnnnnnnnnnnnnnnnnnnnnnnnnnnnnnnnnnnnnnnnnnnnnnnnnnnnnnnnnnnnnnnnnnnnnnnnnnnnnnnnnnnnnnnnnnnnnnnnnnnnnnnnnnnnnnnnnnnnnnnnnnnnnnnnnnnnnnnnnnnnnnnnnnnnnnnnnnnnnnnnnnnnnnnnnnnnnnnnnnnnnnnnnnnnnnnnnnnnnnnnnnnnnnnnnnnnnnnnnnnnnnnnnnnnnnnnnnnnnnnnnnnnnnnnnnnnnnnnnnnnnnnnnnnnnnnnnnnnnnnnnnnnnnnnnnnnnnnnnnnnnnnnnnnnnnnnnnnnnnnnnnnnnnnnnnnnnnnnnnnnnnnnnnnnnnnnnnnnnnnnnnnnnnnnnnnnnnnnnnnnnnnnnnnnnnnnnnnnnnnnnnnnnnnnnnnnnnnnnnnnnnnnnnnnnnnnnnnnnnnnnnnnnnnnnnnnnnnnnnnnnnnnnnnnnnnnnnnnnnnnnnnnnnnnnnnnnnnnnnnnnnnnnnnnnnnnnnnnnnnnnnnnnnnnnnnnnnnnnnnnnnnnnnnnnnnnnnnnnnnnnnnnnnnnnnnnnnnnnnnnnnnnnnnnnnnnnnnnnnnnnnnnnnnnnnnnnnnnnnnnnnnnnnnnnnnnnnnnnnnnnnnnnnnnnnnnnnnnnnnnnnnnnnnnnnnnnnnnnnnnnnnnnnnnnnnnnnnnnnnnnnnnnnnnnnnnnnnnnnnnnnnnnnnnnnnnnnnnnnnnnnnnnnnnnnnnnnnnnnnnnnnnnnnnnnnnnnnnnnnnnnnnnnnnnnnnnnnnnnnnnnnnnnnnnnnnnnnnnnnnnnnnnnnnnnnnnnnnnnnnnnnnnnnnnnnnnnnnnnnnnnnnnnnnnnnnnnnnnnnnnnnnnnnnnnnnnnnnnnnnnnnnnnnnnnnnnnnnnnnnnnnnnnnnnnnnnnnnnnnnnnnnnnnnnnnnnnnnnnnnnnnnnnnnnnnnnnnnnnnnnnnnnnnnnnnnnnnnnnnnnnnnnnnnnnnnnnnnnnnnnnnnnnnnnnnnnnnnnnnnnnnnnnnnnnnnnnnnnnnnnnnnnnnnnnnnnnnnnnnnnnnnnnnnnnnnnnnnnnnnnnnnnnnnnnnnnnnnnnnnnnnnnnnnnnnnnnnnnnnnnnnnnnnnnnnnnnnnnnnnnnnnnnnnnnnnnnnnnnnnnnnnnnnnnnnnnnnnnnnnnnnnnnnnnnnnnnnnnnnnnnnnnnnnnnnnnnnnnnnnnnnnnnnnnnnnnnnnnnnnnnnnnnnnnnnnnnnnnnnnnnnnnnnnnnnnnnnnnnnnnnnnnnnnnnnnnnnnnnnnnnnnnnnnnnnnnnnnnnnnnnnnnnnnnnnnnnnnnnnnnnnnnnnnnnnnnnnnnnnnnnnnnnnnnnnnnnnnnnnnnnnnnnnnnnnnnnnnnnnnnnnnnnnnnnnnnnnnnnnnnnnnnnnnnnnnnnnnnnnnnnnnnnnnnnnnnnnnnnnnnnnnnnnnnnnnnnnnnnnnnnnnnnnnnnnnnnnnnnnnnnnnnnnnnnnnnnnnnnnnnnnnnnnnnnnnnnnnnnnnnnnnnnnnnnnnnnnnnnnnnnnnnnnnnnnnnnnnnnnnnnnnnnnnnnnnnnnnnnnnnnnnnnnnnnnnnnnnnnnnnnnnnnnnnnnnnnnnnnnnnnnnnnnnnnnnnnnnnnnnnnnnnnnnnnnnnnnnnnnnnnnnnnnnnnnnnnnnnnnnnnnnnnnnnnnnnnnnnnnnnnnnnnnnnnnnnnnnnnnnnnnnnnnnnnnnnnnnnnnnnnnnnnnnnnnnnnnnnnnnnnnnnnnnnnnnnnnnnnnnnnnnnnnnnnnnnnnnnnnnnnnnnnnnnnnnnnnnnnnnnnnnnnnnnnnnnnnnnnnnnnnnnnnnnnnnnnnnnnnnnnnnnnnnnnnnnnnnnnnnnnnnnnnnnnnnnnnnnnnnnnnnnnnnnnnnnnnnnnnnnnnnnnnnnnnnnnnnnnnnnnnnnnnnnnnnnnnnnnnnnnnnnnnnnnnnnnnnnnnnnnnnnnnnnnnnnnnnnnnnnnnnnnnnnnnnnnnnnnnnnnnnnnnnnnnnnnnnnnnnnnnnnnnnnnnnnnnnnnnnnnnnnnnnnnnnnnnnnnnnnnnnnnnnnnngtggggacaagacatgcgtggagacatttccagttaccaaggtaagcgcacaggtccctctgttttgaaacctgcaaagcactcagagcttcttaaattaggaagcatcgttcttatggaccccctgaggcaaagctattgctaaaagaacaatctgaatcagtgaaaccaggctgggtggctccaatgttggctgagtccagggtcagcacccactcaggtgttcagcttcgagacagcatgccttggctgaagcatggactgggagcgaaatgggtgctccttggcaaagcctggtcccgtcagccccaactcagaaggcgagtttcctgttgccatgctgagcgcccagtactaaacgcctagttaaaactctgggtctgttgttcggacttcctcccctttcagcaacctgccttgctttaggccttctgagtttggcagagaataatctattctaatcaaagatgtacagaaaatgataccatcttccatttgtagagcatttcacccactctgagttcatacacatatctaattagacaacgttaattctaaatagaatgaactagctcactaagccaacaagctccatttcctgagaattctggaaggaagcttcaagcactgtgagatcagttcctttagcctacagagggtctaagagaatcccattagaattagaaaaaaaaaataaactgagatttggaagatttgagtttgcaaatatatcatctaagacaaatggttttaaataaaattcaacttagggtgccaggccctgagcgaagtgctataaggaacagaaagtaagacagagccccagctcctgaggggcaaacagtctagctggcgtggccagacagtatatacgcaaattcatgggacaaatcaaagaaaggagagattaaactacgctccaccgtgatccaggttctcacttgccaggcccactttctttcctttgtccctcctggcactggccagatgtctgtgcaaattctctgttcctgggtttttcttattgggccatgaggtctacccccagggatatccccagggactttctgtactttaaagcccccagactaccccatttctgccgacacccctctaagccactacttctttctacagcaagccccaagggttcaatctttctcatttctctgaaagggatctggctctattcaagactaatgcttaagaagcacagttttcttgctcctcactttcttgctgtgttttaggggtttaactacagagaaagaaagtggaccaaaatagaaacattcagaaatgacgagatacagactcttcaaaagattccatgaggcctggctcctagtttatagcttctgatttccttctggaagcaccattggagtttggctctctgcttttaataccaagggtgtgctaataaaaaaacaaaaacaaaaaacaaagctgtccctgtgcagatgctgctcctccaggaggttgggtagagggcttcagaggggaatcacagtcaactgcaaatgcttctggcattctgaagtcctcccggtatgactgaggcattgcacattctacggcctcacctctgcaccatcccaagcttgcttacccagtgctgatgcctggttagccctcccaccaggcttcagtccctttccgagaattaccaaggttttcaaggacactctcatttgggatttaacataaccgagcccagagcccatcggtaggtgatctgaaattggttttctgagagaagaatctgagtgtgtgaatatccccttatcaaacctcagcctccctctccagctccccatgaagcttggttcacacacacacacacacacacacacacacacacacacacacagccaatgaaggtgaaagcacagcacagctgggagccccttctagatgcactgctataactaccacttccaccagagacaagctgcacttccctctagtctgagactcctctttgctgtggggcagagcagctctggcttccgctggggatcaccttaacctagttgtcatgggccacagggaagaattctccaccttgtcttcctttatatccatggattcgattcttcagtatctccccccttcagaccatcacaacacacatctgcatttttaagtccctctaagcttttgctactttataaagtccaagctctaattaaaaacagatttccctcccactttgggggcacagtgacttgcaatttaccatgactttctttgagaataatagtcatagatggattgggtgggagggccaggaggagtttactgcaaagtagttggattggggtcatcaatgacaatgagaacaattataaactttttattttaatgaacttatatactaacaaatggtataattctagagccaccttttgtttgcctcaagaaatagccaattcactttacattttgtaaaagttcttcaggcatttaaaagcaatgatgggggggggggtgatgaggtggaagcatgcaagggattggtggcaaccactttcagtttattaattctacttcctccaggtttctcttaggacctgttagactgaaaggaaatgacttttcaccccctctcttttcagtcactgctttatctcctcactagagttggaatctcagtggggaggaaagacggagtggggaggaaggacctgattatccaggactctgtctaaaatagggagagagatgtagtctgcctgctccttctggcaagaaggtgctttgtagaaactgaggcctgaatttttcttgaagaagctaaaaaagatcctttgatttcagggtggatggggaggaagtaggacttgacagcaccccaaacctgtgggcagggcctcagtctcactgggtaagatgagcccaccctacccccacctccgtcctgctctctccagctccctcaaagtccttggcctctggcctcggcactgcccagtcctccaagcccaaagacttgggaaggcgatgtctgctgccccccgccccgcaaacagacattccggaccccagagacaatgtggtggatcaagcctgaacatgggaaccctccatcacttctattcagttcaatctgagaccctttaggaagcgaacgcatgggctattctccaaagcgcacggaaaggggctccgtctgacaaccggacaggatatttgaaatcagggatgtctcgggaaaccctctaagttggtcctcgccccctccccacggaggttggaacagaaaaccgggctgtcgagcgtctgagttcggaggggcgcagggccacaggcgcgaaccgccaggaacccccgcgccagcgccagcgccagcgcccccgcccgcgggaggagcgcgcggcggggcggggcggggcggggcggggcggggcggggcggggcggggccctgccggctccgcccaccccggcgagcttctctctccgccgctggccgttggctgggcgaggccccgccccgaggctccgccccccgcgagcgccgaggctcccggaaaacggcagttcccaactgctgcgcgcgtcccggcggcgcgcagagcctcgtgcgctctcggggcgggatcggggcgggacgccagaagggtccgaggccgggtgcgcggggggcgccgtcctggaggctggggagctgcgggagaggagacgcgctcctgcgccttcagcccgcctgagcctggagccccccgtagtgggtcgctgcgggtcccagaccggcggaaggcggaggctgggacaaaagatggggccgccgcgcatctgagtgtaggggaggcattgcaggggcttcaagtgggatagaggatgttgggctggaggccgccccgcccaggggtgcaggatttgggccccaaatggaaggcaagcaactgttccccacccccgccccaggtcataatattgtctgggtactttaggatctgccaaatctcccttttcaagttgcacttccaagtctagatagcatggcctacaacttggtgcctgtgaagtgagcttcacatgaagtgcctctttgggggccactgtgggccctttgaagaaattctggcctggagggtctggggggcgggtgcacaaaggagcaggtgtgattcggggagtgggctggagcgtgctcttacggagcagaagtcagtgacagctcgttgtacataggccctgggctgggacctgtggaaaagaatttttttttaaaagatttatttagtcatgaaagacacacacacacacagacacaggcagagggagaagcaggctccatgcagagagcccaaggtgggactcgatcccccggtctccaggaccacgccctgggccgaaggcggcgctaaaccgctgcgccacccgggctgccccggacctgtggaaaattaatggacttcaggcagcgaacacgactgggaactccaggggtgggcaggtgccagccagggttattaaatgaggactagggtgtcctaaaagggctcggaggggaagtaggtgaggtgctcccggttgcccagcattagccttttgctatcagtcctcagctacctttgggagacatctcctgatggaatctgtaccgtcagtgcagtagggatggaggaagagaagtttgggaccttaactggctccccactaagatactcagagaaatatctttctttcacagacctggagtccaggaaaatcttttgactgatccaaagttccaaaggttctgggtatccaggctttgaatccatcaggcacgactattcatgacttagttgttaaaaacattatgggcctctggaaaggagctctttccatcgcaatattctcttctccagctagaacccaggggtgataaactctcatgacagcctcccgggagggagagaaggaggtttggcaatggcctcggagttggcttccatccttgggtctttgggaggatcacaaggcgtcaggtcaggattcaggttagccatggttcaagacttgcccaggtggcatatgtggatgaaggcaagttcaccggggcacaatgcccttacattcatctgattttccaacctgaggcagactcgtaggcagggagtgcctcattcactctgggcccctatggcctgggttttgaactggcacagagttggcatcagtggtgcacatacaggatcttgaaggcccaaaccataggcacatttagaagatccacatcagcgggatgggggaggagctggagaatcaagtaaaatcatgtaaaagtatctgaagaaatagatcaatttaactaccggagaatggaacctgagcaggccccacttgctcacactctgtaagttggacgtgccttctggaaacagaaaagccactaggaagttccattctcactgaaacatgaaggatttctgggtgcacactgggttgtctatgggccatggcagtaaatacttccctacctccaaggtaccttcccgctccctaaaaaaaagaagtatggagactacgtatcctagcctgtctgatcaccctgggctaacttcctgaaggaaaggggatcaaggaagcactaggcctacccacctgcctggcccaaaaaggttagagttgaaagggaaacatcttcgaggtgggtgggactctggtcctgccggtgcatcgagtcagagctgggaaggaaggaaaggcccattaccctggctggtgatatgagctctgactttgaggagcgaccaccaccgcatcagtgctctctggagcccctctctccccagggctggtgggccacgattggcctcccaggtcacatcctctgctgtactggtcttgcttggtcttgttctcactggctgtggcagagtgtttggtccctaaagcccaggaagctgagtccccctgcccccacatgaacatctctgagaggacaggagtcagctagctgctccaggacatggggacgcctctgtgtgtgagggcttgaaaggccatggagtgtgaaattctcagatgtgcatcatggctgcaggcactgatgtcaccataagttacacctaatggccctgtgaacacaagtgctttccagaccgtcttctgaggcaaactcccttgcctgctctgcaaagtttactgcggagacacaaggactcaggaggctttctggacttagggtacccccagcctacagggcccaggccttgcactgaggctccctgctttgctcagacagaaatcccccaaaagatgagctggagctgtctggcaagaagagcagataagaacagcaggattgggcctcaacaccccccacccccacactccaaagaaaaaccacacacacacacacactcacacacacacacacacacacacacacacacacacacaaaccagcttgagagctatcagaattctggacagtggttcctgtcaggatctgtgttgggagctgagagcaggagctcatctcacagggacgtctgcaaatggcaagtgaccactgtcaaatattgaacaaggccaatggggacggtcatgtctgaggtcctattcatggttacttcagccagaggcagagcccccagcccagcctggttcctgccaaactttgcctagagtgaagcagggaagcttggcttctctcctctgctctgggaccaccaaccccccttttgggaggcacagtaaagcatcggatcaaatggaacctaggcatccgctacttgaagtggtttactcctctgtgtggtccttgtatgtcctctgctcccaagacaccagtccctgcatggagcccttactggctgcatcatatggctagtacacccacatctccagtattgcaaagtttccctccctccctggacacatctctaatattaatggtggggccctcagatgagctttagccacaaattcaagacagtgaggaatccacccaaaaagtcctgagagagtgatccccctgggagtccaggcagaagcaaaagcaaaccttctcttgggcttccccctcccccaggcctcctaagtaaagatgggcaggaggagaggctcccaccctaagccgctagaacctgaggctacagaaccatcagagaagtctggaccatggctctggatgggagtaaggttggagacttggaaagatgagtagtggggcagaggcagttcaccagccatgacttacctgcccttgggcctgtgtctgccctttagaccatctctcttcgggtggcagcccccctgcacgcccagggagcagccgctggaggaccaaacggggggtggggggttatggtagccgagggaatcctcgtgaacttcagaaacacctcagtttctccctgccaggggcagttccagaacccagagtggctctgagctggggggcaggtgcaagggaagacagaagagtcactcggggcagagcttgctttccccccttcactctgatggggcagaaaaacaagaccataaattctctcagagagcagggcctttctttgcctgttgggagcccctcaccccaatattttaagttacccccagcatttagcaggcccgccaaggagtttgctgtaaacttcggagctgagaggcaagtctgccttaacttcctctgactgccccagtgagaggagccacggggcgggggcacagatggggtcattgagtcctgcagcccttcttcgttagaattccgggctgacttcttgatcccgggtatgttgaatggcatgacctgggaaaatttggcttgatgcctgggggaggcatgcccagatctcactgagtcaccattcagtccaaagcaaaaactgatgcttgtcttttctggttggagggagagttgagggacggataacactctttctccagatcaaatcaaaatcccaataggaggagataccttggtcaggatgggggtggagagcaaaagagcaatcagcaggcttggggcaggctagaaatattcatgacacagagcataggcttcccgtggccgagaaatctccaatttggcttgtagtaaatatgtaaacctgttaaaatacattgattagcaaaggatctccactcaacactctttaaacaccaacatctgttcccaataaataattcacatagtagatattaattagaaggcacgggaggagggaatggcagctttaaaaggacactgagatacctctttgccaagaaaggcaaaaacccacagccagatgtggaggaaaaagcaccgcgagaggcccgcttccctcttcctgttttggaccacgcacatcactctacccctgcccccagaaggcaggcagtgccacagctgcttcccacccctaggacaacagtgcccctggagacagctgtccaagcacagctggctgctgcccacagccatgagaggggtggccctggattcctagagctacaagccgtggagggcagctctcctgacccacccctccacacatcccctctggcaccagcaggcagaggactggttgctcagacatccactgaggatgggagaaagcatcatgtcctgaaggcagcctggaggctctgctgattaattaaaccagggccgtcagagacccccatctctgataaggagcagaagtcaggggccagtgatcttaaaccatcccagaggatgcagctcctacctggggttttggtgggggggtgggggtgcggggcttccaagccccttgcctccttttctcagcagtttccttgggagttttggcttctttagcagatcatcattgctttcaactttgggaggaggagggcttctgggaccccaccaaggggccttgtatttacactcctggacagagtgggtggtggggctgacttctctaggcaggataacccagttcatttccacggagcaggagggaagctggccccaccagctcctgggaggcaccggggtgaagtatattcatccagtcttctctgaatgaatagtttgtgccaatcattgagaccacctgggtgggaattgagatggtgcatgggggaaaagtactttatgccctcggacatctactctctatcaagtatttgaagagtctgaggcctgaagttgagaagctgctagaggtggcctgggccctacacctgccagcaagtgctgcccttgtggggctcttcatttgcacagaagagggttccccaatttgtgttggagagccgaggtcactgagtactgtctctgccagcactgtagcccactgagcccctaagctagcatgtaccctgggccaggaagccatcacacctggcacagggaccaaacagcaggtgggacagctctggtgggagccacatatctgcccaggtgaaaggagtcccaaagtcacccacatgtcttttgctccaggaatgaactgtgtttaattcctgaaagctttgttcttctaaagggcttggcttcattcattctttgttccagaatcccctggtgttattattgcaatgaccattttccttctgattggaggaggtatttgagatggaatgcaactacactgaggtgtctcaggatgagaagggaaagagctgggttgagaagggacagagccacactttcagaaccaaaatccagaaagaaagggaggtgtcaccctatggagaacccctccccactccattacaagtccaaaaagtcagagacccggccctgggcaggtgccatggcaactcctgagggtgaggctcagtggttggtaatcagtgtggacaggcaccagggtgaactcaagtgaggtcacagtgggactgcctcatgtttgtagggctgttgtagaaagggggtggcagctggctggccagtttcttggagaacttttaagtcctcacaccatcggctgcaggctgcagagaagaggctggggtggccaggaaagtaagccagaccttagcatttcttgtgttaaccgagggggtttgaggcatcaagtacaggattggccaggtgctgtgaaaagaaccaccacctaacatttcaaacttcattggaggtggggcagcagagggtaaatctcctgagtggtggaagcagggcatccctactacggagacaaatgggagtccctttggctggaggtcagtgtggcctctctgggcaaagagtgggtggttcttggctgataggctaaagggtggagctcgagactctgtcacctttcctttcatttaggatggtgcccgtggaagcctctgagtagtcagatagggcagccaatgatcagaccaccatctggagggatttaagttagatggatgatggggccactggccaagttaagtggctttgttttatccacaaggatcagcatttcttagtcttaactcagaggtgcccagattgcaaaagcagaaaataagagtgaatgaaaaactagaacaccgcccccccttcccaccccgcccccaagagaaagcattggccggcacagatccccagagttgcgaaaagcatgcctctggaagccagaggtggtcttcacagaatagtagattgatcggccaaagccaacctcccattcttcccccaccccacccccccaccacccttgctgtggctcagatgctaacatgctttttccaatgactcgtaggaagcttttgagtgtccagccaaggggaaggattatatcagcaaaggcagagtatagggatagaataaagacaatcagtgaaagacagggtgaagatctctgcttcctgcttcctgcttctctcccataagtccatcctaaatctgaggtcccgtggtctgggagggggcaaagcaaggggaacaagtgttttctgctacttccttcttttcctatttcctgagaaattcaggcaaggtcaagagcaggaatctcacaaagcacacatcttatttaccccactgcctgctgctctgccctaagtcttcccaagcccccagccatatatccaactccgtcctcatttcttgaggtccctggaatgtgccttactcccctctggccaggccttctgttccagtgtggagagcttttccccgacctgtttcatctgctcaaagcctgctcatcattcagatcgcaggtctaatgtcattccctggggagcaccttcccaggccccttggacctggcagctgtcctatgaatcactcccttgtggcgtttagcacagtttgaactcatacatttatttgtgtgattatttgactcacgtccttcccccatcccacaaggctgaccttgcctgatttagctcaccatttcccccagcttctcttacaatgccccagcatttaataggttctcaataaatatttgtagaatgcatgaatgaaagggggtgatatgagttctccttttcctcacactcacctgtgcaaccctcattcattgggcagttcacttgaatcactcggcttcccagctccttgaggcacagggaaagaagaggtgtggagctgcaggggctggttagagacccatgtgaggcccactagcataaagatgagacaggaggccattcaaaaagcaaacacaggaaactcaggagacaacattcaagagggatggcggggaggatggccagtgtagaggggtgggggaagaaggtatgaggaaatgtctcataagaagaaatccaacagcagaagcatggggtagaaccgtgctacagatgtcgtgagggaatggttatcaggcaccagccaggaaacaggcaggtgcaccctctggtgttgtgggcaggcaggggagctgggacagcctctttggaagaccattttttaacataaaaagcataaaatctttagcagtctctccaacagacatgcttgagtaacaaaggaggatatgcatgcaaggatagtagtggtaacctcggaatnnnnnnnnnnnnnnnnnnnnnnnnnnnnnnnnnnnnnnnnnnnnnnnnnnnnnnnnnnnnnnnnnnnnnnnnnnnnnnnnnnnnnnnnnnnnnnnnnnnnnnnnnnnnnnnnnnnnnnnnnnnnnnnnnnnnnnnnnnnnnnnnnnnnnnnnnnnnnnnnnnnnnnnnnnnnnnnnnnnnnnnnnnnnnnnnnnnnnnnnnnnnnnnnnnnnnnnnnnnnnnnnnnnnnnnnnnnnnnnnnnnnnnnnnnnnnnnnnnnnnnnnnnnnnnnnnnnnnnnnnnnnnnnnnnnnnnnnnnnnnnnnnnnnnnnnnnnnnnnnnnnnnnnnnnnnnnnnnnnnnnnnnnnnnnnnnnnnnnnnnnnnnnnnnnnnnnnnnnnnnnnnnnnnnnnnnnnnnnnnnnnnnnnnnnnnnnnnnnnnnnnnnnnnnnnnnnnnnnnnnnnnnnnnnnnnnnnnnnnnnnnnnnnnnnnnnnnnnnnnnnnnnnnnnnnnnnnnnnnnnnnnnnnnnnnnnnnnnnnnnnnnnnnnnnnnnnnnnnnnnnnnnnnnnnnnnnnnnnnnnnnnnnnnnnnnnnnnnnnnnnnnnnnnnnnnnnnnnnnnnnnnnnnnnnnnnnnnnnnnnnnnnnnnnnnnnnnnnnnnnnnnnnnnnnnnnnnnnnnnnnnnnnnnnnnnnnnnnnnnnnnnnnnnnnnnnnnnnnnnnnnnnnnnnnnnnnnnnnnnnnnnnnnnnnnnnnnnnnnnnnnnnnnnnnnnnnnnnnnnnnnnnnnnnnnnnnnnnnnnnnnnnnnnnnnnnnnnnnnnnnnnnnnnnnnnnnnnnnnnnnnnnnnnnnnnnnnnnnnnnnnnnnnnnnnnnnnnnnnnnnnnnnnnnnnnnnnnnnnnnnnnnnnnnnnnnnnnnnnnnnnnnnnnnnnnnnnnnnnnnnnnnnnnnnnnnnnnnnnnnnnnnnnnnnnnnnnnnnnnnnnnnnnnnnnnnnnnnnnnnnnnnnnnnnnnnnnnnnnnnnnnnnnnnnnnnnnnnnnnnnnnnnnnnnnnnnnnnnnnnnnnnnnnnnnnnnnnnnnnnnnnnnnnnnnnnnnnnnnnnnnnnnnnnnnnnnnnnnnnnnnnnnnnnnnnnnnnnnnnnnnnnnnnnnnnnnnnnnnnnnnnnnnnnnnnnnnnnnnnnnnnnnnnnnnnnnnnnnnnnnnnnnnnnnnnnnnnnnnnnnnnnnnnnnnnnnnnnnnnnnnnnnnnnnnnnnnnnnnnnnnnnnnnnnnnnnnnnnnnnnnnnnnnnnnnnnnnnnnnnnnnnnnnnnnnnnnnnnnnnnnnnnnnnnnnnnnnnnnnnnnnnnnnnnnnnnnnnnnnnnnnnnnnnnnnnnnnnnnnnnggttgtctcccgtgggagttgttaaaattttctaggtggcagcaggattgaggaaaagatgaaacctgggagcctgaggccagagctctcaattcattcattcgacaaatatttattgagcacctactatgtgccaggcactcttcccagccctggcagggagggtggatcccctgggctgctgatagatgaagatgggaagaagaggctcacatggcgtggggctgtgggggctccaagaggagaaagcgtcactaaggaaggagctagaatagaatggtcagaaagatgaggcaggaagtcaggagggcgctgctggcctgggatggataggaagagaagctgcttctctagaagagccgggagaggagccatccgggaaaggcaggcttcagatgggctgcaggcaggaagctagcacattttacagcttcctcctggcagcctgccctgctttccttgcacctcacaccccgggtctcagaatggcacagggctggtggcagaggagagaggcaagtcctcaggcaccacgaagctccacccagggactgtgacacacttttctgtgacttcagctctggattccggccctcagccactgtgcaatggtggagagaaacaagaagggtgggtgaggcatggtaaggccagatgcagtggtaggagagacaagggtgaaaatggaggaggagccagatgatcctcccacacagaggtggtaggaatggcctggagggaggcggtcaagcacagagccaaatgggaccaaaaggaagagagggtgttatgggatgaccaccaggcacatgtggttctaccgcgttctcgggagccagcaaacgtccttcagtggcttttttctgtccttcaggccaccttgaagtcaggagaaggagagggctggggggcagtggtgagggccaggagcgcaggaaaaggcctggagagagggggacggggatgccccaaaggcctgggttcgctcccatcctcagggaggatgcccttccttctatctgcacccttctaccttctacctggccctctgccattacgccaccttccagatggagccccacttcctagggttgcctgcttttattctgtcccattctctacactactgaccttgtcatttgacttgagcatcctggtctttattcccacctcttgggaaacggggcctgcccattggcagggcatggacaatcgagttgggctctctcagattccagataaagctgtgaggtacggtgatttagggctttcggcttcccctaaaggccaaggaggctttgtggaggaggagggccattctgagcccggaagggtctgtctggaagagatggaggcagaagccattagagggagggagggaggaaaggggaggggagggggaaaaaggggagggggagagctgaattcctgaggtctttttcctccttttgccattgaaatctgaagtctcacccacagggggtcaggctgctctttgggctcctggctcccatctcagcaactgctacttctagagaaagaaaacaaaaaagcatttcggggaagggacagcaggaagtgtggtggggaatccacccttgcaatccgcaggggccacctgagagtagcagcagataattctagggaagaataataggagaggttaaaaaacaacaacaacaacttgaaactgcttagaagatgggccgaggcagaagtgtggcgaacaaagtgccacaaacagagccccttctggggctgatggggtgggaggggaagagggtacacactcacttccacccacagtgaagccctgttcctaggggtgggggaggacggggcatgtaaggcaggctccttcccacagaggctcccaggagcataccagggtccctttgccctttcacttcccagaatggcctgccagccagtgccaacatttcctctgcttctgccctggggtccctacctcgccaccccccaccccacccccatctctgtggagactgtcaggctgatgactgcttggaaaccactctggtccttatagaccaaactttttccccccgcctttctttcaccatacacaggaagagctcacagatgccaatgcatgcaactgccacaatggcagggaatgttaagagatgccgccctgggctccctgtccagagcagaggcgcttcaggctgacttgtggcaaggagcagaacatgggccccctgggacctgggggctgggaccactgttagggctcccagagcgctccccccataacttttgtggggctccctcatgctctccatgtgttagactctactttaaatgtattttcagcttaacaaactctcctgggagcaccacgaagctacctgctttgttaaatgggtccttacagctccaaggcgggtcctgctccgcgtaaggcatggtctcatgaactgattcatgatctctgccgacaaaatccttatgcacagaccctaaggatttgtagacagccctcttctttatagaacccctggagcttcctggctccctccttgggactagaagaagcctcgtattgtcttgcttgaggtagagtgaacaggacttcgagtgggtcccaggtgtggaagccccttgtgttagggtcagatgagcttctactgtgctttctgctggtggtctcacccttccactggcttcacatgagcctcgtccttattgcaaggcggtcttggaagccacacttcccccacaggcactgtcatggtctcccctgaagttcaagtctgccattctccgccaccccccccccaatggaggcttctgccctcctccacgctgtggcccaaattctctttggagtgccctgtttccccaggaaacaaactgtcccagcgatcgatcccagctcggctcctcagaccaccctggtgctgacggttctcaattcagaaacctatatgttcagttctgcttttgagctttgcttttggtgatccgtttctcttctctatacacatgtttgatgatacatcctgtgtctcagatttcttcgtccttaaaatccagtccctaggggcatgcctgtttcatctttaaccaactgcctgcctccaccagctttctaacttgggtagcactttccaaagacccaaatcctagaggcaggatcctgccttcctccccatcctcccacgctggtgaagggtttggttggtaactgttccaggcaatacaaaaggaggactacaaggtgggggggcgaggctctggtgatgtcaatgcctgccccctcccagttttactcccactcacattcttctctagcgcacgctccaaccccccaacccctgctgaggcccctctgttctactctggaccacacgaggctccctgaatggactgcagcgatgtctcccagggagagctgagaggaggagaatgaggctggagagaagactggcgatgtccctggcgggaggccacagctccagcaggctgccctctgcacacagctgccctctctgggtctcctaatggtgtgattcccctgctctagggtcctctatgtcttaccgaagcatgttctaaatcctgtcattgtagagagttggatcactgagctttacttaagctacccggggtggcggggccttcgtccctgctggctccctggctgagacagcccttctctccagtggtttctcagcttctgtttcctttcggcagcacgcatccggctctccaccaggcattctgatgcacctcttgggtgggaagcccccaccccacacgattaggcaccatggatgttcaagagggacagactgtttgctcggcacctcacatgccaagattttgctgggcttcacgtggtgtggtttgtgctgcaaaaacactagatggtttgttttccaatctgaacgtgcttttatttgaaaggtatctttctgaggcttctgggaccttcagatggaatggctgggtaggaagcctgaactctgggtgggtagtggggagggtgggagcaggggtgatggggggagagtgtggaggggtccccatagttggtgttgctgagaggaggaggctgaaaactgagattgtcccagatctctgggtcaagttgacacttcagggggagttgcaggaagagacccaggcaaggaggactctgaaggggtggggaggtggagagaaagagattaggaaaaattgctgtcccagaacttaagagaagcgtttcaacagagagagctccgcctgtgacctatgtcaaacgtggcctagaggttccattttgaaggtgccagctgtatcctgtggacttagtaaggctggtagtgagcttggctcctgtggtggagtggaggggctatgtgtcccccgcagaggaagaagggactgccctgttagcagcttgaaggggcaatgccctctgagtgggggagggagaagactgagggccaagtcctggtgggttggggaggggctcggacccggaggagggtgcctggatctgagagaccctgggagccaggccagagctgccagtgatcacaccggaagttgaaagcctgccaagtgggagatggtcagggttcaaggtctccaaggaggctgaggcaaacgggcaagagcccatggggctgagtattggtgagacagggtctaagcagtgtctaagcagaaggaagaaagtgaatcctggatgctgagaaccccccccccaacaatgggactccgggacctggagttctccatgagattgaaaaatagaaacatgttttaagatgaatccttgtttatctttgtaatcagcaaaaaaacaaaaaaaaaaaaaaaaaagagaagtcaatttaaaaagccatgttgcctgaatgcccattaactgtataatggataaataaattgtggtgtatttctgcaggggaatacattacaattccatgcgatagcatagatacaccccaaaaacatataactgttgagcaaaagaggtgagacataaaagacaggtgctatttgcaatcctttctgtaaagttcgacaaacagcaaaagtaagctgtgatgttaggtttcaggatagtgatcactcttggggaaagaggtccctaggaaggggtaccagtcgctccctgggggctgctactgttctactcaccaatctcaaggccagctccacgggtccattcagtcagtgaaatgcgttgcctgtacattgatgacctgggcatttttctgtgtgtttattctacttcaataaaaagttcactttaaaaagagactatctaatgtgaagtatttcccttgggctccaaggcctggctgcttctgagatggtctcctgtagaagctggacatcttcctggccagctgaaacaaaagttattaaagtagcagtgattcttcctctccagtgctctgggtgaagagcccaccctgttcgtcttctccccctgacctcgtcagttatggtgagacacattccagacgtccaaacacatcataaatactaaaggccattttccctctggaatcctccctgccttgcgtccagtgtctcctgcagcaagacctacaaccatcgtatcacagttcctttgcctgaaattgaggagctgtgagggctgtggtggggggcctctccccctgctggcatgtgccagcttcccccaacaggctggacagggtccagctgccctggattcacctgagatgggaggtgggaagaggggatgcctttttctaatttgtccaaaaggtgcccaagagatcctcagtatccctgctagaagttgttgggccaacattgtcgaggtcttacaatggcagggccagaaaggagggagtgtgagggttgaaccgtggcattacaccaacagtagtggtggagtatagaaccttttattcagagcgctcaaaggggcgttacctgtggccagggctttgtttgcccaagtcctggcaagaaaggttggagcttctctcccggccacagttgctctggctccctgggagctggctgggtggccatggacagtgggcacggcaggctttcttaaacctctgtgtgttgtgtgcagacagggaggacgcctggccttcatttgtaagacatgtgtctggggttccccgtgtcctgctgtcattctatcgctgatggaatcctcctgcaacctgatcgatggttctctagttcttacttttgatgtgtgctggggtcgggggtacatgaagagcccagggctgcccttcccagcgccctcccccagggggccttctgctcgtggcagctttgtagtaggcattcagtggcatctggtcacagcccaagacatttttgctctgcgagacacctttttttttcttctcctgttttcaagcattctccaaggctttctacgggggtttttgcgctttagatagtttttttgatgttttttccccccttattgatggccacatttcatcctaggtcctttcccggaaatcgagtacctgtgggggcacagctagggccggccctctgccaccagagcgtgaaatatcacacgggcattaagagcctcgctgccaccctgaggacgcctcccactccggctgtgtccatttggagaatgaacccagcccttttcctatctttatggatgagaaaactctgtatttgaggaagcagccatttatcttcactaagagcctcacctccacgcctcgtcctgatgaggcagtcagcagctggagccaggagaagggagtttcattctgaggagtgaaatgacaactgactgatgggaatcacatatggaactcatcatccagaaaagtggtgcaactggaaaagatgaaagttctagaaagctttggggacatctcagggcaattagcaaaatgaggtttagctatgaaacccagtgcgatacagcaacgtgacgatcgtttgcttatctatgtacagtggagtcgagtgagcagctcctgccaccttcttcctccctgtagaatttctcgtcagtcagagccgctgccatccatccagctgccttccaccaattaattctctttcgctggctcctgcaccaagcaccccatctgattcctccacttgtgatacgtatgtagatacagttacacgtttgtctttgcttttccgccactccctgggcccaccagtggtcggattctgtgggtaaatgtccttactattttcttccaacccttgagcatttcttcgtgcctactgactggccctgggtaggtaccaactggaatcccagtagagtctgatgccagttgtcctttttcttagttgggaaaccaccctgattccatttgaaccccactcccagcaacttagagccctccatccagcccatgcttttggtctcagaggccctgcctgacttgtttcctgcattggaacaaaaccctcagaggagaattagcggaagatgaatccagcagacagagtgggagtgctggcacgaaatggtgaaccagcctgcaataggccgggccacagagggtggcggcaaggaatcgctatgtgcggactgacctggagatcagaggttccagaatccagggccagttaagccatacatggagtatgaggcccggggagatgaagaggataaggcagagagggtgggtgaagaagacccccaaggtataaggtgaaagggagaggtgcgaggattcatgctggggcaggatgctctgtggaaattgagtggctgggaggacaggcattctgggccttgggagcagggaagggaggaggggaaataaatgatggcccttttggaccacatctaagcaaatgattggcaatgtgatgggaacctctcttctgcagccagacttgcgctgcttggtgggccgcctcacgcctcctttgaagggcttgtctctggcagttgccgcagcgcctgccccctacccccaaacccctcggaccctccacctgtaccaacaacagagcctgctgtcagtccactttcagccaggttgaaagggcctttttcctgggcatggaggtggccgcatcctgcctgtctcctcctcctgcatgcccccaaatctaaagtactgaagcaccccccacccccaccccaaggcctttccctctttgcttcttcatccccagcaaactctccagaactacccagccctcagccaatgtgtcctctgggacccatcaaagaaagacaagaccagccgctcaggcctccccgctgggccccacatgccttcatcgaaacaacagggaagcagcaggaagcaggcctccaagggcttctcctccttcctattctggggattcattctataatgtcactaaagagtatctgactttttggaggggggctggaggggagcgtatctaaatacctgcagcttcccacccccctcctcgcttctagcactctcagcctgctttccaaggcctgcccggggccctttccctccactctagacaaccaccatcgccccaggcctctgataacagagagattttattgtctgcatcccatattttatttagcattttatgatactccatgtatggcttaacttgcttttaatctctaagactatagcaaggtctagctagataatattgaagacaggcctgaccctgcactttttgtaaagcttcccccacccaccaccactccctgggaataaatgaggagcttcagggaagctgggtggccccgagtaatggtggctgatggtctagtatgaaaaggtattgagtacgcctgggcactggccatagacagcaatgacattggctctgacaactgatgacatttcagtgagggtggaagagaggagttcaaggacaatgaagaattaaacctggtgctggggacatgctcaggagcaaaggaatgtaggaaaagctcaggtgggtgcagtagaagggaggtcatgggggtaaggagagggagcaggaaagatctgctcaggaaggatgtggactcagacgctgggctgaggggacagaccttaggagccagccctttgtctagtggacaggctgggccctgggaccagagggctccataatcagtcatggcccaggcagggcagctcagagggagggtagtggaggggacctgcagggtttggggcacaggggagggaaagtaggagttccttcccagggcagagctggggtccccagccagggtccaggatggctgcagcagggcacagcccaggtgggccacgaatgcaggccaacctgaactgaacagtggaaacgataaaccacgcttcagatgtccttgcatttttgggagggcccaacagagtggggagtgggagagagggactctgatatggtttcattcttggctgtggttgccctttctcttcagtaacagctggttagaagtgagggggcaggggaggctcctggtggggtgccgggaaaagggtttacatcccagacaagcacagtagacgctaagcagaggggcccccaggggaggcctggacagccagtggcttttctccagggagcagatcttgctttcctccatcccctgactggttcctggaattgaaacctcctgacttctcctgaaacactttctattcttctgtgcatagctggctcatcttcctccctctagctcagctaatgtcctctcagaaaagccttctctgatacctctcagctccagtgcccaccccacccctaagactgtcctgtcaccctgttggtcctgttttcttgacattctctggattgatcttgtccatctctgtttccttgttggttcctccctagagggtaaattccatgaaggtggggttctggtcattcttggctgcagctataccttcagcttctagaatggggcctgccacagatgggcactcaatgagtatttgttgaatggatgaatgggtggatgacaacacatggacgaacaccaggtctctggggtgggagtcctatcaaatctccttgatgctcatcccgtggaggcagggaaacaccccccacccccagatgcaggagttctagatggacactgtaaactgggcttcttctcagctttaacataggcagttccagtcctgttctccttcctagccaattgcactgtcaccactgcctctgagaccccagcgtggacaatgcaaggagaaggaacagaaggcaccttgagatttccccttgctctgcaggttctgaccacctcagagttcagggactgtctgacagtgggatagggaagctcagagagaaactttgaacttcactgaaggtgggttctagaataggttgatgatgcctttttctctcttctcaggggctccttccctctttgtatacttgtgagggaattcaaatcttttatttttaagagataaaatatctgggtttggaaagaggaaccccaaactgacaccagtttgggttgggtatatttggggctggacaaaactattcaaagagcaagaatcagggggaatattgcccttaaccccatccatgtcctcttggcctgtttggctttggccaggtccctcacccctatggaaagtctggaagcatcctatagcctccccaaagagtgttcaagcctgagccttggagaccctctagggctcggtgtctgggccaaggagccgtcgagtgaggcatggccttgaactctccacacttgcccattggggaccaatctgatgagcctctgcagcctccccatgctgccgatcccacagagcaacatgccccattggcatttcctctgcagggacccaccatctcacacatctgctccccccatgtcaccctcacctcccaaccctgctcacttcccactccttatcccaatcctctgtttgtagtagggctcttgctgtgaaagccctgtcctgctccctggtcttgggtccgtccctgtgggtccctctgttgcttgagccacagggtctcagggcagtatcctctttccttcacagctgcaaccacctgccctatctttgcaggctcttcttcctggtctcggcagtggccttggagcggtgctccagctgcctggccagtcacctcctggtcaggcacggagtcctgtccattttatatgcttctctgccaggaatagtgaggttaacagcttaaataaagatgtccaagaaatctcagaaatgacacgaagcatttgtccctaaccaaacagaagtgctggtggctggcggagcgggtgctcatcctctggttggttctttgtggtccccacttcactttcatacctctttggattttcttgagtctcccaaaggtcagctgtgacccgggcttgttctggatattgtatgtgcattcacaggctataggaagtcaggggcaatgatgggaggccagaaacagccagctggagcagcacaggaagatcccattgaaagcagggccaccatgccagatggtgtaagctgagacaggctgagatcgatggggaccatgacagatccctgcaccggtcgctaggccttcctggcagcacctggactcccgctggtcagagaagaccaagcaaagggtcttatgccacaggaagaaggaatttctaggcaggacacccacactaaagaacttcaaagaaagtagtcctctttgggactgaccctgcctgatagtctggttcataagccaaggtaatggaatccaagttgggacagcttgttgcaaaggtttttgggaatgtcacttttgtaaggatcaggtattagagtttctggggtttgatctcactgctgttctgatttcaggggaaacacagatttaggaggttagaataaataaagttaaggggacaaagggctaagggttagccccaaatagccaccaaagcagaaacctgtgtgtagcactggggatcctgccagtagagaaggtgcaggagtggctgtggaagctctgaggtgccgttactagcaggaaggggcagccgagagagtgggaggattgcttcctaagggcctgggtggggaccaggaagtgctttagtgcttaagcaaggtccctggttgaagggcttggaagtgcagaggtgctggtggcagggccctgtgtcagtactatccttggggccaggcctctctggctggtggcctggccttgaacttggtctggatagccagagactcttcctctacaggggacttgcattctaccagcctcaacttttcaggaagagaatatatacaagaacagggatgggggtggtttggagatggggatgaagctttgggctcgtgatggactagggtgacaccaagtctcatgatggactggccagtttccatgccccaaaaaaacatccaggagcaagggagccaggaataaagcccagatagagaagcggccagcattacagtgaaagctggcatatgggagcattccaataggttctaggaagaacaaaagaggctgtggaaataaccaccagtgtctggttctatagcaatacattagctacaatactgggagttagcaaactagggtttagttctgaaagaagagtgtctaactctccagtccccttcagtagtatgttgagggccaggctgagtgagtgagccagactatggaatttttacttaagtgaggttcagctagaaaaggaagggacaaagccaaccctgcctacccaggagattctgggaaggagaagagagaagagaaagccttctctggggttcagccccagagcatctggaagagagcattcttagctgagtactgccaaaacaaagggcgagtgtcccacggacctggccctgggcagactgaggggtcacagagtctgagctttcttgagctgtcctggttcccatgtgctttaggaaagacccagaagaggctggctattcagtcagaggtgcctggtatagtggcacctctagtgctgacaccacactagaccacatggaggctgcagccggtgcagagggccagcaggagcactgctcagaccacagaaggagccacgacgctgctcctggggtggggtggggttgggggagaggggtgggcagagagcctcaccctgaaaaccagagcaggccacacatggggcctcagagagactctccattattgaatgggactgaactttaaaccagattgaacatatgggcagggttttttgttttgttttgttttgtttttgtattttaatttttttgtttttcttaagctatagaccaaataaagagatttcattttctctgcccaattgtcatgttggttaaatgtcacagctgcggggaggtggggggggagttggggtgactggatgatgggcactgagggaggcacttggcaggatgagcattgggtgttatgctatatgttggcaaactgaactccaataaaaatataaatttaaaaaaatgtcacagctgccccatcagcccatttttgtcaggggatgtggccctcctgccttcaagaggactccttggctgtcagcattctctggtctttcccaaggtgtttactgggtcattagtgtggagagccagagaacaaagcgctcatactgactgatcccatgtgtggccttgggctaaacatcctgtgtcccacagattattctgtgtccagagtctgtgcttggatcccagagacatgggcctggctgctttgcctgatgatccgtggaggctgggtcaggggagtgcctcctgagtgtcccctaatagaccctccaggaaaaggggacaggcctgcagggccaggggtttctggcagccacaattacggtagatgggggagccagagaggccagagttagagaccaggctgtatgttagcccttcctccaggggcaaggaggactaagacctcagctcagatggaggattaaaacatagtatcataaaagcttgtaagcctgggaacatcctcactgggctcatgggccaggaatatgcctggagcagggtctcttgaccatgggtgatggtatggtggcaggaaaagaaggtgccttcagtccccagtgggcagccagtacaactgaggagggcgggaggagtctccccaggtcttggtcagtggcccaggcatagcacccacatagcacccactatgctatgagacgaaatgtggaagttgtccagctggggctgggacccaggccatcaggaccttgtccatctttttgccatccgcagcatgtcccctctaccctcgtgctcacaagatgctagagcttctccggataccatgcctagagggaagggacagaggcctgatggggcagatggggcccttttgggcctatcaccttcacttacatctcatcagccggaaccacctcacgcatcatccctaggtgcagtcactgatgatggccacggaggaggaaggaccttggggtgcacaccagcaccccagtcaactgtgttctggcatagctccctccctatctcctcctccatcctgccaaggtccctcacattgagggcagagtcctggcttcaccagccttcctgctggcccctaaagaatagattaggattttatggcaattcggcaaaaaacaagaatggatatggcctctgccaccacagaatgggcagtggtgcgagaagtgtaggttggagacagcacaacaggttggaaggcatacagaagaagtgtgactctcagtctagagggaacaacgggcacggagagcgtccaggaggtagagttgtcctggctaaagcctaaaggatggaaaggagcaagccaggggaaggaaggcgagagggtggcaagatgacacagctaaggaacagggaggaattccgctggaggcccgggaagagctgcggcaggagaagcagcaggcccaggccagagcacatggggccacatcgagaggagtgagcagagatggcacccagtgcaggctggagagaggtcttagccagccagcagcacaggccaggctggggggtgggggccagttaggagaccatggcagttaggcaggcagggccaatgctcagggagggacagaggtatggagaaagagtgcggagacagaccatacaaggcttacagaccgacaaaggggtagacgtggctgtttggagagagagtgagaaaccaggtgtgtggaggcggccttcagtgagggggaggggacacaagggaggggccactgtagacagaagggaccatgtccggttggagaggctgggttcaagcacatgggggaggagatggaagatgtgggtatctagtctaggtgctcagcagagttctggcctgggatccagttatactacctgccgggggccaacaccagggatgaaactttcctgctactggcaaccagggaaacaaaggcaagggatgtacaaatgggtctttgctttcctttgggccaccatccaacataggcagctggccttgggtgggcacctgggagagttcccagggatctccctcccctgctcccactcatcccaccccatcccatgccatctcattgcatcccctagaccccagcctctctcctgtctcctggcaccccaagggctccagctccccatgtagggagactcatattgcaaggttttgagggtagcagtggggcatacctttgggctttctggactgttcccaagggatgccaaaggggcacagccctgcctccatcagagtggactttggtgcacaccacactttcccatgcggggacctatcacagacgccttcccctctaggatgagaatggggttatttcccttgttaggagttcagtgatccctatcatgaatccagagacttctcatcatgggctcctggagaggtggtggaggcagtgacataggcttttgtcaccagatgtgctgctgtgaggctgcttgggaagttccatcttccagaaaatgaggagcctttgagcttttgggagactgagtagggcttctggcatccagctctagtgtcccagctgccaagtggggagaagggtgtggttagccagctcagacgtaggtatggctgagcgctgcttctggctcagtagtacctcatggcctgtcctgagacactctgctggcctggcctgagagcatgtgagctactgggcatccatagtaaatcccctcatctcttgaaccaacccaaggggctttggtgaagaacctcgcacaagaacgggagtggggggaggaagaaccccagctggccccacagagaaggggcttgagatgagccaggcagagacagaggtaggaaaggatcccaggatggaaaatggggtgctgggccaaagctggaagacttgggaggccccaggaggggagtagctgatttaagttccccatttgtagaattgggatgagaacagtcactcattcattcattcattgaacaaatattttcaggccacaatcacatggccaaggcctcaggaatccatctatgaacaagacagacaagtaccccacctttctggagctaatgttccagctgaaagggtgggaggaacaaaaagaatgccaaacaaatgaagtctgagggctgtggtggtggggcaggaaacaaacccaagggtggtacaacccccctgacccagcctgggagccacatgaggagcagtctcttggtgccgggggtcctcgagaggctgggtgagatgacgggcctcggcagagcacctgcactgaaggccttaggtgttatgatggcgaagacaagaaggatgcttagcatttctttagtgcctactatatgccctctcttccctggttggcagcaacagcccctttccacccccgccccccacccccccggcccaccaagttccctgccaccccgagtgagacagcttagtgggctcaggggagagcctctgaacatgctctttgcccaaaggaatatcctgcctgtgctagggccaggaatggaggcacagccctggggacctccccccttctgacagcctagcctcccccttctgaccaccttctgagccctgagtagtgggagaaggtaaagtttcatttgccaaggaggtaggatggcggcggggggaggtcagcgggagccggagggagcctgggtgaagcgatgctagaagacagaagggtgagcacagccaggagaattgaggctgagtggggggtagggcagggggagataagaaatagcccttggggagacggtcccaggttctgcagggctgtatgacaccctactttctggggttaccctccatggcacttccccttgggtttcacggcaaggtcccttagcccctgagctggacatgccagcaggtgactcggcagtgaatgaatagcagcctcttgaatgaatagctcacggcctccccaaatacctaacctcgctgagccttggtaatctccccaggtaaaatggggcagcatgtctctcataggatctctgggaggaaaagaaaaacatgatagagcatttctgattctcaaaaggatgtctgacccacagcaagtgcttgggaaaaaactgagcactcacggtaggattcaggagacctgtgacacgatgcgtgaccctaagcgctctccagcccagccccgtgctcagccccagcttctggccccaccaaaccgccaacctctctccaaatggcctctggcccctttgtggcccctgctttttgttcaggttcgtgtgttgtgacacccctctgatcctttccagagggctgtggggtgtggcagctggcagctccggtccatccaggatcagggatccccccaccctcacagacctgaccgtgctgactgtccccatgcgacggaggactgtccctccacatccagccctgcctttctgatagagccctgcctgtgacgtggaagtgaggtggttgcatgaccccgtggccctccttggcagcccggtgtggccctgtgaacagacacaccaacaatcgccacatgtgggttttgggaagcccctcaaggggacttgcctgctgcccctggctggaaggcatacaagcaacgactgccataccgaccaggagacagaggccatgttgtgaggatggaagaggaatggctaaccctggcgcccctgagaaccagccctggatggcctctgctaaagtgagggagagacatctgtcctatttgacacccctgttttgtgcaggcaagcctgatccccatagacaaaagtgtagctcctcccaccttttctccctgccttgccctttctctccatgggcgctgatgaagcatctactgcggggagagcagaggaggaatatggaagcagctagaggtgatttagaaagggtcggattccaagaaacaaggcaacggacgtagcgccagaagaggaggacagagcctggggaggattcgtcaccgcaggggtggtgagacaaaccttccagaagagcaggggaaggcaacagggacttcctacccatccatgcctaccccagttctcccctgggggggccggtgcactgcctcacctccccactggcccatgaagacccagtgccccttcctgatgaggcagtaggtggggaggtgggggtgccagttgggtgagagggtgtttagtgagggcctggggccggcaatagaggagaagggtatccccagacctacacattcttcccaaatcaagacaataggtgtagagttgaccacggagatcccacctcatgcctgagccccccatgctgtccgtgtggcttgcctctcagagcgggcttcctctgggtccctgcggagctccgctcagtaaacatataggagtcctaccgtgtgtactacatgtacatggggccaagtgctgaggacatcccctcgcagaggtccctgccccgcagcctccagcacacgctgccctgacaggccggcccaggatggaagcgtgctgctacacgattaacagccgctcctctgacgaaatcacgtcctgttctgtagcctttgtagacctctgtggcctgactcctccagcctggcaacttctgagctctcagcgtgaagcaccaaagggctgagcggggtaacgggggaccagccctcaggagtggagctcacatgccacagccaggggcttctcgtccatcccctactcctgtgtctgggcccctgagcctccccaccggtctgtaccttgtccccgggggacagggggctgcagggggggcctctgtcaatgggtagagaagaacaaggagacagcccctggagcaccctcttgaggtgctcaaccttccttgacatctgcccccgcccccaccaggccttttctttctctttcctggctttgcctcacctccaagctctcctcctcctcctcagaagggactattccccagcatttggagaccgcgtctcccccagcgcccccaccaagccggctccctaacccaggcttgccccgcccccacacagtgctcacgcagctgtctccctcccggcccatcccctcagtctgaggccccgctgccaaccccctgcctgtcccagagaggcctccacagacacttgctgcgcccggaagcctgcggttctatcagctctccagtggctgccacaaactgctgtcttggagaaagggtggctcatccccctcagcctccccgcctgcacccccatcccagccccaagcctcccggcatcatctgctccacctccaggcagctcggagccaggcccccatctgccctggcagcctggggcactggggctttaggaccccagggtaggacagagatccgggcccccagcccccaggcccctgcaggggagctgcttaatgaccttgtgagcagtaattacaccccaggacccgctcttaataaccacgtattctccctgtcaatgtgccttaattgaaaatgagtaggcgatacaagttgctgtgaagttggctgccaagcccttaacgtgatattaattgtagtaattagtagtcactttgtgttggagtcatctataaatagggggtctattagtttagcaaaagagcgtgatttaaaatgcaaataaaagcccaattagacagataaatcattcgtctttcccagcaaattatcatcttgggggaagatgggggcagcagccactttgaggatgattggtcagttccggggctctgggttattacaccacgtgagtggcccacttgggacactgttctttaaacaagtctgttcagggtccctcaggaggctgtcactccaggggctttgaccaggctctttgtaggcaggactcttggccaggctcctcccccatctgcttgattggtttcctttggggacaccggagcactttttttgtttgtttgttttttttgtttttgttttttgtttgttttttttcggagcactttttaaaggcacagtagcagagcgtgcctctgggtcctggggaatgggctggggtgtgggaggagtcccatctttaaatgtagctcttcaccttcctgagggaacccacagatgccatatattgttctgtgaccctaaagagttaaaaaacaaatagacccacaacattggtcctggggtagacaacttactctccatttcctactcccttccacaaaacctatggaggttattggagtcgcgcacgtgcacgcgcgcatgcgcacacacacacacacacacccgcagtatttctcacaggctttgggggaacattggaggtagaaatgactggatgaagaagaggccagttagggacgtgttaaggccagagggacgtttgatcatctagttcagccttctcaaaaccttctcccaggcctgtgtttcccaatctcacaactagggaggtggtgagaagtgtctgggcacgtgggtccttccctcttggtcagtgcagttgccagaaacctgatgttcagagcccagatcggagttcttcccacccccacatctgcctcccaccatcccctctgggagtccatcactcccttttggacaatcaagcctgactttttcaccgaatctgcattttaatgagtcaaagctgtgagatgaggcagccaggcccaagcccaggtaagaacagtccattccaagaggactttcccatcattgtccaagaaaccaggggagtgaaggcagtttgagagcattatcctttatttgatctatcatcctttcttttattacacagtgcttgcaacaggtggtagtacttgtgatttttaatgtcctatttgacaaaataaattgttggcaatcctatgtggatcccaagaaatgttttagaaaatttttccaggtataaaatccaaatgtctggtcacaaagaagttgagacttgaggccagatgagtcagctgttttgggggcagggagagagtgaaggaaggggaatgtgtgtgtgtgtgtgtgtgtgtgtgtgtgtgtctcggggtgggggggatgaaataggcacgtgtatcagcaaagatttccctctctctgaaatagcataagaagactgctatatcctagataaggaactggaaggagagccaggcactgtccatcccatctccctgcatgacagatgaggaaatcaagcctcagggaaggagtgactgggccaagccacacggtgagtcagtggttcagaccctggctagtacacaccttccgtgcctgccccttgtccttgtgttggccccaaaagcaagcctgagagttgatgtcataggatacatgggctctgccttggttggctgttgaccctctagttctgcatggggactgcttgttgactcccagaaaatagaaaacagccctgctgacagaccaagaagttccgcgaggaataaagaccatgctcagaagagcacacagataaggccactccaccccagccactctgagtgaaggtgcttctccaccagtgacagctctggccctactttaatcttcatgcctctaagatataaacagagatccccatcactgagttgcccccacttcttgtggcacccaatcccagcctgccggtgctttgccaatctctcctcaaatcactcagcacaaacctcaaccctttacgaggacttactctcagaatcttccttctgagatcctctggagatcccgtagggtgtgttctcctttacctgcagcaagccaactaaacttaacttttttgattacagatgtgttcctggtggcatttggtggttgggctctgaacatccaacagataatgtcaacaggcagtgtttcaggcaatgcggtggtgacaaaaagcaacagaattcacaacagtgtatggtggggacgcctgggtggctcagtggttgagcgtgtgcctttggcccagggtgtgatcctggagtcccgggatcgagtcctgtatcaggctccctgcatggagcctacttctccctctgcctatgtctctgcctctctctgtgtgtctctcatgaataaataaagtctaaaaaaacaaacaaacaaacaaacaaaaaaacagtgtgtggtgatagacttaccggtaactagacttaccatggagatcattttataatatataacaatattgaatcactatgacttatacctaaagctaggaggatattgtatgccagttattcttcaattaaaaaaaagaattcaggacgcctgggtggctcagtggttggccgtctacctttggctcaggtcctgatctcagggtcttgggatggagccccacattgagctccctgctcagcgaggagtctgctccctctccctctgctgctccctctgtttgtgctgtctctcaatctcaaataaaatctttaaaaaaagaacaaaaattataaaattcttgaaagaaaacatagggataaatctttataccctcagatttggcaatgcattcttagatatgacaccaaaagcataagcaacaaaaggaaaaagtaaattggacttcttgaaagtgaaaaacttgtgtgtttcagagaacactatcaaggaagcaaaaagacaacctaaagaatggaaaatatttgcaaatcggatatctgataagggacttgtccctagaagaacccttaccactcaatagtaaaaagacaacctgatttttaaatgggcaaaagatctgaatagatatttccctgagggagatatacaaatggtcaataagcacaggagaagatgcttgacagccttagtcatacgggaatggaaataaaaaccatgagatgggggcgcctgggtggcacagttggttaagcacctgactttcggttgcgactcaggttgtgatatcaggtcatgatttcacagtcatgagatggagactcatgtcaggctctgcactcagctcagagtctgcttgagtttctctctctccctccgcccctccccgccttggtgtgccacacacacctgtatgtgctctttctctcaaataaatcttaaaaaaaacaaaaacaaaaactgtgagacagcacttgacagtaggacagccatgatcaaagaatcagataaaaactttggggagggcatggggataactgacccctcaaactcttctggtggccatgtaaaatggtacatccacattgaaagtagtctggcataaaaagttaaacatagagttgccatatgacctagctgttctactcctaggtatatacctaagagaaatgaaaacctatatccacacaaaaatgtgtgcataaatatttatagccgcattattcataatggccaaaggtggaaacaacccaactgtcttaactgatgaatgaacggataagcaaaatgtgatatagccatacaatggaatattattcagccataaaaaggaatgaaatgctattatatactgttacaacatggatgaaccttgaaaatgttatgctaataagcaaaggaattcaaccactaaagactgcatattatgtccagaattggcaaatctgtaaagacaaagaagattagtggttgcttaggtagagggatggtggggtggaaagagtgagtgatagctaatgggtatggttcttttcaaaatgatgaaaatgttctaaaattgactctacagttgggatgcctgggtggctcagtggttgagtgtctgcctttggcctcaggggtcgtgatcccgcagtcccaggatcaagcccctccttnnnnnnnnnnnnnnnnnnnnnnnnnnnnnnnnnnnnnnnnnnnntagaatgtatctttttcccttggaaactcacttagcattcgtaaattgtcaagttttatcaacagattccttagtcaaacggtgatattgctctcctatggatcaggaaagcatacggagtagcgttagcttaaaaatgaggttacaacatttgttttaatacgtatcaagaaagtacccctgttaagatgtgaagcatatatatcaggaggcagagacacaggcagagggagaagcaggctccacgcagggagcctaacgtgggactcgatcccaggtctccaggatcacgccctgggctgcaggctgcgctaaaccgttgaaccacccgggctgcctgagtcaatgatgattgtacttatccctgaatatattaattatactactgaattgtatactttaactgggtgaacatttggtatgtaaattctagctgcttaagagaaaatagacccaggcccttccccatggaggctccattctagaggagaaagtcggcatgaaactaatcacctcacaaaggtatagtttctcccaacacaagggctgtcatggcaaaacaaaggactatgagacatggcgaggaccactgcatttagcagggaacaggtatccgggaaagctactctgggaaagtaactctttttttttttttaatttatttatttattcatgagagacacagacagagagagaggcagggacataggcagagggagaagcaggctcctcacagggagcccgacgtaggactcgatcctgaatcccaggatcaagacctgagctgaaggcaggcgcccaaccgctgagccacccaggtgtcccagaaagtaactctttaaaatatctttttctgtgcatgtcttttgcccatttcatgattggattgtttgtttctttggtgttgagtttgataagttctttatagatcttggaaactagccctttatctgatatgtcatttgcaaataccttctcccattctgtagcttgtctttgagttttgttgactgtatcctttgctgtgcaaaagcttcttatcttgatgaagtcccaatagttcatttttgcttttgtttcttttgccttcgtggatgtatcttgcaagaagttactatggccgagttcaaaaagggtgttgcctgtgttcttctctaggattttgatggactcttgtctcacatttagatctttcatccattttgagtttatctttgtgtctggtgcaagagagtggtctagtttcattcttctgcatgtggatgtccaattttcccagcaccatttattgaagagactgtctttcttccaatggatagtctttcctcctttatcgaatattagttgcccataaagttcagggtccacttctggattctctattctgttccactgatctatgtgtctgtttttgtgccagtaccactctaatgagttacattttatatatccaaaattcattcatttgaaagggacaattcaatatttagtaaattgtgttgtgcatccatcaccataatccagttttagatcattttcatcacccagtaagattctttaaatgcatatacagttaatccaatccctggcaaccactaatctactctctgtttctgtagatttgcctttcatggaaatttcatataagtggaatcatacggtatgtgatgtccctcgtctggcttctttcaactaagcatgtcttgaagatccacattcacaaaactttttactactgaacggtactggactgtatgagtagatcacattttgttcctccattcaccaggtgatggacaagtaatttgcttccaattttttggcttttatgaacaaagctgctccgaacatttcacagcaagccttgtgtggatggatgtcttcgtgtctcttgggtagattcctaggagtggaattgctgggtcctgtggtaaatttcactttttaaaaaactgccacactgttttccaatgcctcaccaccttatattctgtgggaaagtgacatttaagctgagacctagcagatgacaaggagccagccatgcagtgagtagaggagcgtcctggcatggcagatgggactggtgtcccctgtgaaggccctggggcctgagaaagagaaagcccacctggagagaggagctggatcccttggggtcgttggggaagattttgtatactgactcacctgcaaaagtacagaaaggagtctgtcggagagaacgaggtaagagcaggctgactgaggagggacaaatcctgaggtggctgcagtgatcctggcaaggtgacaagagcccagtggcggcagagggaggagaggttaggagggtggaggggccgcccggtaactggactgggaggggtgtgatggagtccagcatgtctccaggcatctgactggctgaacacacagcagaagaccaaagactggagacagcaagggggagtgagctttactggacacttgggtgtgaggggcctgtggagagcaccaactggcctcctggcagatttccagaagagaggatcctgcttctgggagacgtggactcgggtgtcctcgggagtgctccctcaggtgccttggcaccaacatgcctgctgccacagaccaagaaggggctgctctccttcctcatccatcttgttccaagcatgggaaaaagttttccctgattccccacctctctggaaagtcccaggtgtggcttcaacaagtccctgaagatttggggaataattctatcgcatgatcacagcaaaagatctcttccgaggccagctccccacggtactcctggccttgccctctgtttccctccaagtggccacaggcctctcacccctacctctccaaacctggggtctgggacaaagtgattcttgtacccagaaagcaaggattcctcttaccacagagtctgctagtgtctccaatatccactctcctctatgagcttttttttttttttttttttaagattttatttgagatagcaagagccagggagagggaaagagacaagcagaccccctggtgagaggaagcccagatgatgcagggctgggtcccaggatcccggatcgtgacctgagctgaaggcagacacttaaccgactgagccgaccgttcctcctccctgagctcctgattgagctaggcacattgccatccagcatagccttacttcctgttgcatatggtcatgtgattaagcctggctaatggggtataaggaaaagtgtcattttcaagcagggaggagacgtggccttcatcattcttctcaacagctggaatacagatgtaatatctggggctccagccgtgaccttggatcacgaggcggggtgaccctgggaatggaagccgcacgcaatggaacagtctggcatactctgcatggcttaactccaggtggcggcaccctttacattgtgttctatggcaaatagattacagaatataatgtgaagggcgtccctggagtttggagcctgggcccttgataccggagcaccacatcagcctcaaccgctaaaggattctgcacccaatttcaacatggggtgtgtgttttccccaacattgccaagcaattctccaacaccagcggggtggcctacccagcttaattctagaactgcctacctggagagatcatcagattccacaggtgaggggctcagtcccacaaaatttctcccacttcagatgccaatcacaagtccaggctattacctgttcttccaaccaattaaatcagagcttcacatgaccccctccttgggttgtattaagttgcttcggcaactcgtgaaactcggagaaacatttacttactagatcaccagtttactctaaaaggatacaactcaggaactggcagatggaagagatacacatgtcgaagtatgggaagggggcttcaagctgccataccctccaagtgcgccgttctcccagaagctccgcatagccagcaatctggaagctctctggaccccatccttttgtttgtttgtttgtttgtttgttttaagatttatttatttattcattcagagagagagagagaggcaggcagagacacaggcagagggagaagcaggccccatgcagggagccctatgcgggactggatcctgggactccagaatcacgccctgggctgcaggcggcgctaaaccgctgcgccacgggggttgcccccttttggggtttttatacagaggcttcatgacctagctggggttgattaaatccttggccatttggtgactgaaatccagctccctcctccccagggttcgggggtgggggatgggacagaaagttcaaccgttccatcacatggtaggttctccaggcaaccagcgcccaagctggggggatccaaaagtcacctcaattacctaacaaaagacactgtttggagcttcatgccaggaacagtggacaaagacaatatatatttcttattctaaattacaactacctacctccggacatcacgtaagagagaaacatacttccgtcatgaccacctgccatttgagaattttctgttatctgcagttggatctactcctaatcccatgtcctcctttcctctgcccagatccactgtgcctaggacaagtgactgtcggctcccctcggaggagagctcgccctaccctaacagtggccctacaacatgacccacagaaatgccaacagccaggattcctcaaagtccaggctattctaccttaggtctcatccaaattcatcttgggtttgattatcgattgccaattattccaaacagtagcttcctacatgatttctgtctcatgggttttctgggctcaccaggcatttctagcttagggtcccacatgaggttacaatcaggggatggttagggcaagagtcatctgtaggctcgactaggctggaacgctggcaggtggcgcgggctgggagctcagcaagggctgtgggttcctcgtggcgtggaggctggattccaaggagtgtcctggcactgaggcttccaatgccccagccttctaagccatgcagagtcacttctgccaccaaccgaggttcaagaataggggactagacaggatgtgaataccaggaggtggtgcactggagtccactctatcacacagctaagggtctggagcttggagagacaccagaccagacacaagacttcggcatcagcagcatttacatgctaattcaaagcccaggaatggatgggtgctgtgtgcacttgagtgtgcctgtggcctgtgtgggtgtgtgtgttgtgtgttgtgtgtatatatgtggggggggttaatgtggcatgtgctgtgtggtaggtgtagtgaggaggtggtgtatgtgcctgcacatggttgggagttggaggctggcagagaaaagatggaagtcaggggaggggtgtgtccttaaattagagtctttatggactggattcccttttctgctgcctcccactctcctccttcaaagctcctgcctccttcggacccaccccggccactgccaggcagggaagaagtttccagagatcactttgagggaggagcctggtccagggcccctggggcagcacatctggtcccatcgtgcccacgctcccacccaccccccactccctgagtacagcaggtacaggtgaaggccccgtggtgaggtgggcaggacttactgatgtccctaccttgccagcagctcccagagggcaccgttatcatacctctgccccatgccaggaggcctccagggaggtgtggggtgccacccacctgcccaggccctaaggtctgatacatgaaggtaacggaactgaaatcaggagtcctggactccacccctaccatgtgactgcaggtaggtcatttgcatcctttgagccaaataaaaaagactgaattaagatcaatttagattccatccggagtcccaggactgaacacnnnnnnnnnnnnnnnnnnnnnnnnnnnnnnnnnnnnnnnnnnnnnnnnnnnnnnnnnnnnnnnnnnnnnnnnnnnnnnnnnnnnnnnnnnnnnnnnnnnnnnnnnnnnnnnnnnnnnnnnnnnnnnnnnnnnnnnnnnnnnnnnnnnnnnnnnnnnnnnnnnnnnnnnnnnnnnnnnnnnnnnnnnnnnnnnnnnnnnnnnnnnnnnnnnnnnnnnnnnnnnnnnnnnnnnnnnnnnnnnnnnnnnnnnnnnnnnnnnnnnnnnnnnnnnnnnnnnnnnnnnnnnnnnnnnnnnnnnnnnnnnnnnnnnnnnnnnnnnnnnnnnnnnnnnnnnnnnnnnnnnnnnnnnnnnnnnnnnnnnnnnnnnnnnnnnnnnnnnnnnnnnnnnnnnnnnnnnnnnnnnnnnnnnnnnnnnnnnnnnnnnnnnnnnnnnnnnnnnnnnnnnnnnnnnnnnnnnnnnnnnnnnnnnnnnnnnnnnnnnnnnnnnnnnnnnnnnnnnnnnnnnnnnnnnnnnnnnnnnnnnnnnnnnnnnnnnnnnnnnnnnnnnnnnnnnnnnnnnnnnnnnnnnnnnnnnnnnnnnnnnnnnnnnnnnnnnnnnnnnnnnnnnnnnnnnnnnnnnnnnnnnnnnnnnnnnnnnnnnnnnnnnnnnnnnnnnnnnnnnnnnnnnnnnnnnnnnnnnnnnnnnnnnnnnnnnnnnnnnnnnnnnnnnnnnnnnnnnnnnnnnnnnnnnnnnnnnnnnnnnnnnnnnnnnnnnntttgccactctcataggtgaggagagaggctgtgctgcgagtctcttgggacaagacaaggccatgtgcagccaggccatcagcgaccaggtccttgtctgagaccagatgcaactcagggcaggggccagagaagtcaccaggagacggcaaggggtgcaaaagaaatcccaggcaagccttgatcaaaggcccgggcagtgaccaagttaccagttacctcttccagtgcccacattaccgatggggaaactgaggctaggagtggtgaggggccaggccaacctctcaggcctaggcacgttgggctggagctgcatgtgagaatgtgcagagtgctggggtaggaggtattccttcccgaatcatccagtgtgtgtgctcacaggtgtgtgagaatgtatgcacctgcgcgggtgtgtgtgcagggtacacatgcctctgtgtgtgtatgtgtgtgtgtgtgcaggggtgtgcgcacgggtctgcaggcatgagggatgcgcgcatgccctgagcccatctcggggcctggcccacacaccatcccaggtccccaagggcatcagggtacactggccattggctccccaggaaagccatcgctcagaggaggggtcatttagcccgccggcactccgcttggttatttaagccaccaccgggacggggttaggaagctgagattaaccactggccctgtgactagaagcaatacatatttccctctcttttgccttttttgttcaccaaattgaatcaatttattgaagttgctcacaatcaacttatgctgattccccaacagtaaagaagagaaatgaggcgttggggccccagggccaaatttcactcattgaagtgaactccggctggccctagggggcgcagccagcctgtcacatgccattcccaccccacccactgagctgccccatctcccaagctggaggccactttggccaccctgctcccaagatggggcacacccacacccaggtgctcggctctccggcctcagacatctcaaattgaaaccaaatcctgaccccacctgcctctgcggagcatgtcacaccccttgtagctcagtgagccgtgctttctggggcagaaccccacaggatgtgggagcacagagtgtaatagatgcctcacccccaacatggtgccacagtgcttcagatgccaccatcagagctattgatcatcagggtaataatactggctgacatttgttgagaggttcccacctaccaggtgctatgaactcacctaatggtttgggcattacagttatccccatttcactgatggagacattgaggctgggacagttaagtgacctgcccaaggtttcaccagcagcaagtggttgcggcccacatagtgaatgagccatccaaaagctatcatcaagctcactttctccatttcagagtctgcctcatgggaacccagcccatgacatgagagctggaaagatctgagacgtgtgggccggagaggccccatcatccatgaacagagatgaggagcaagaacttggaacagtgagaggcagatgtgagaccacacagcccatgagcagtaagatgaagtctgtgtctgtgctgattcctgacattgcccaacccctgaggaagccctcgggttctgtgagacacccccggttctgcataatacaccctccctttgttgagctagcttgagtggatttctacttcttgccatcagagtgtcccggaataagacatgctgttattccgtgttttatgaataagaaacccaagtccagagcaaaggggccttccctgaggtcacagctggttagtgaaagagctggctcttcaccatttatttatgtaatgaatagctattgaggtcctactgtgtgccatgaattttgtcgatttgagggttataacttgttggggtttttttaaagattttatttatttatttgagagagagaaggagcaagagctggggggggggaagcagagggagacacacacacacacacacacacacacacacacacaccgctgagctggaagcctgactaggagttccatcccaggaccctgggatcatgacttaatccaaaggcagacgcttaaccaactgagccacccaggcacctctccggttataatttgtaagcaaggcaaacataatcccctttattgttgactcacaatcccgtgagagaaaaagacaagtaaagaaacaatgacaatgcaggatgacaaatgctatggaaccacttagggggtcacttaccctgggtgtggaacctcacagaaacttcctgggggtagtgacatttatgcctaggcctgcagaagagcagagccctataagaagatgggatagaatgccaaaggctcggaactgaaagggagttttggaatcagtctggttttatctgctcagcatcttctgggtggtcaggggaggtggaggcacagcttctctggctctgcgtcgcttctgggagatgcccaatcacatctctgtgtccctcaccatagggctaggtccatgacccagtctagtccaatcagcacctctctcaagaatctgcatctctaatggagacacaaggttggaaggtggtatgagctgaggtacctcgtggcggtacgccagagagaatacctatgctcctcagacccccagagctgccccagcttccatccatcccaagacccgtggtctagcttttccttctgctctgtgacctgctttgctgcctcttcaataaatcacctgctcttgtttctcattttcagaatcaacttttgatgcttgcaaccaaataatcctgattcagaaattagtaccaggagtgagattcatgaaaacccctggaggatgtatgagctacttagaattggttttcataactcaccaaggcccaaatcaggaagcctcgggttcaaattattggacagaaaagaggttaacccaggggacacagtggtgaacagctaatcatgttctaccctccagtcacccgggaccatgtaccaactgaacgtgagagaactggcagctgccatggccagtgcataaaggatgaggaatgctgaactcatacgctgggtgcttgtccctaacactggataatttaaagcaagaaaatgacaggttcaaatcaaaacatttgccccaaggcacagaataaaatttagggccattaagataactgtgctgaaggaatcttttattgaggatagccatggagttgaaattgcagaagactaacttacggattgattctgaagtcactgagtgacagttgaattcccaaccttaccagtccccctctgcaggagggcgggcatcggtcaggaagcactcaaatcctattggaatggtgatatctggaaggattatgaggacttggaggaccctaagcccccaggtggctcactgtccaacctgtgacttccctcgtgacatccttcagtttttcccagaatactggggatctgggctccctgtggtccagatgaaacaaagtagaatcagggggctggaaaagttatatccaaaatgatctgcaggaagtcactagtttgtgtttctaaggtatgagggatacatgtgggaatgaactttgagggtgcctccatcaagcggagcaggatggaagcgtggatttgactacatttatggagatgggtgtagtcaccagaaattccgcattcacgacgctcgggcaattggcacaagttctgacattttgcagaagtcactagtgcaaacctgggccaaacggtgatcctcatgaattgggtaaaaagatctgaaaaatccccggcataattagagggatggaggcaaaacaagacaagaatgctgtctagatctatcaatccccatcactgccgggatgctcccttcctgcttcccaggaggatactgccagtgagaggggatcataacctttcttttttaatcaaaatcagtaacatatttcagacaaaaggtataaagaataatgtaacaaacatccataaacctctttatccaacctaacacatgaaacatgtgaatttgagtcctccaggaaagtagacatgaggacgggacctggaaacatctgtgaaggagaatggggagggcaacggaggggtgggcagggccggcagggccagcaggtcacagcacagctggacgcctgggaagggcagtgcagagggagggaggctcactgggaagaatcccagacagcagcgcagttctgatatagttcatcaaggccagtgggaggtcctggagccaaagtcactcacaagaggcgcgagccctgcatgtggcacaggacagggtgtccctgccaggcatagttgggctgggtacagcctggggatgtgcggccttaacacaaatccagtggaggactcagcgcagtagcaagggccacgggtcattatgaatcatgcagtaggccctgtgcggcgttttcatggccacacatgaaacgtggccgataccaatcaaactccttatcaactgttaaccttccaagtctaaaatgggctcagctacctcctctctgtagttgaggaattctggcagaggggctgcttttgcaagggggtttctaatcttagagtgggtggaaggaaggagctctggtggcccagtccagtcaaatcatgggaaggtggtaggcatggtcatcccgaagaggcagagggcctctgggaggcagaggtacttgctcgagggtcccttgggaagggatgagcaaggagaccactggggccttcttcacctctgggtttgccaagtaatgggctcccttgggggtagggttcccaatccaggagtgggccagacccaggacctctcaaatgtaggggtgggcagtgcctctgagcaaggaccttatgagagcacgcagaaaacatgatgaatcttgcatccagcttccccccaaaggaaattactgccctttacctgcactgctgagcccagaatgaggggcagtaagatgaacatctggctaagtctcacctctggggacaggaataccacatggtctggagatcagagctgcccttttggagttcagggggcactgtgttccctgctgaattcaccctatgctaggtcattggggcctcaacccccttcacgggttatgtctccagttcccgagaggaaataaaggtcctgtgggtgacagtaaacccacaccagtgtcctgcacagaagactgggatctcataggaagagggcccaggaggaagccactgcactcccattacctacagacacagtgaacccaagcaacaccacgaccctgaggagacagcagagctaagtgccaccctcaaacactggaaagacagagctgtgatgatcctgatcacgccctcactagagtgaggccacccaccaccagccagtgcggaaacagctagatcacggcaaaccgcaacggctcacggtagttattcgggtggtgactccatttgcagctgctggttccagatgtggtctccttggtagagcaaattaatgtggccccagcacttggtattcagctgctgatttggaaaatggaacacactctgtctcggaaacagagacccccccaagagcagtctgcttgcccctgagcggggcagtaggagaatgtcactggcctgccccagggatgctggccttccagctcctccctggatgccctcccccttccgcggggcaccctctgcccaaggccttgtgctctgaatggagagcaacacactgatggcatccaacacgaaggaagtcacaggtgccctagacctctcggtaagatgcatgtgacagagacgggggcataattcagggcacgccaccacagtgaggatcctgcaggtccatggtctgggatatgctggaatatgctggaatactctcttcaaagtgaaggagaatttgctgcaacttgaaccccgctacctctgaaaaggagacacaatgcttggtggacttctttggatcttggaagcagccctgaggccaaatctgctgacacaacttgtaagcaggctggaaagcatccagctttgagtggggtcccgagcaagtggagcaagtggggtctcgagcagctttgagtggggtcccaagcaagtggggtcctctgcaggtggcctgggctgtggcacaagcctctgacctcggagcttgcccagcagcgctcagagtatccggggcagggcacggtgcctcgtggagcctgtggcaggcaaaacttctccagtggagtccgtagagcttctgaataagaaactattcttctttgaggaaatgggttcttgcctcgggctccagagagatgagaatacctaaccccgagtcactaagcagttgacagcctgaactctccatcttgaagcagatagcattgatgcctccagccctatgtggggtgtgcccagcagagctccatctccagtaaccccatgagtaaccctgtgtcagggcctctcctttttgtcccacatgggagtgaccctctatgctctcttaaaaagtaggactcacacaatttttaaaaatacaaagtacttagctgcttcaggtgaggctggatccagcagcccagtgatatcactaaagaccttatttctgccatgcctcttctgcctcctgtggtattgacctcatgctaacattaccctctcgggcccccacagaatggctgtcagcattttgcacactcccttcaagtctgctggcagagagcacagccctgctggccactcttaggaaagcagagagtctcctttcctggaatcccccagcatccttgtgtcaccttggcttaaattgggtcatgtatcccttgtagaccaattgctgtggctggggagcttcactgatttgttgcagacacctaggcccacccccactgcaccgcccacccagggggaggtggtctgaggggagccaatcctatccaagcagcatgaccaaaggtagagggggtggtcctctaaaggaagtaagaggcccttattgccatcaagtggggggaatggttgctgggcctcaacatgggggtggggtgaagagaggaatcaggtttgcccctctccacatgattatagaatcacagcccggtgttttggctggaatcttagaagctcagactccagccatgttcatgaggggggacccgtgttcatgtgtcctcagctagctgcttggaggggatggagctgtggttccccccacccccaccccggccggggagggcggaagggaaaacccacgtgcttcggacctagctctgtttctcctgaattcccagacggacccccctccactaccccgagggctggcttctcctctcaaatccccccagtctggtgggtgcctggggggcgtaggagccacctaccaataaggcggggtctctgggagccgagtcctgggaagatatagccctttgcctcaggttctacacttggagactgtgccctaatggctcttaaacagggtacacagcttttcagacaactcctcccttttgtcgtgataaaagcatttcacccccaaacccaataatcaaatcaactctaagaaagtgatagttagaaaaaaaaaaagtgatagttctgcatgctgttttcagacaaagacactgtcaccatctgtttagtcatccctgcagtcccgaggcagaggtcatcctatggaataatacatcagagtcaccggccatgtctacacagaccggaccggttcgttttgtgagcgtgcactgagcagagcagaggtgggaggtgccttcctccgcttctctggctgctgcccgcgctgccctgtccacttgtttgcaggtgctctggggcaagccttgactttggcctgaagttcacttcctctaactacttctcagtgcaagataaccacgagccccaaaaggcactgcctggaggtgggtcccgcccctgctgccttccttccctcccagcgggaaagagaagccttcgtcccagtacattttagttacagaccagtgtttaatttcaggtcgctgtttattccttccataaacatgtctccccatgtacaatcgctgtgtttttctgtctgtgagaaattgagtgtcttggtatgggatggaacacaggtaattttttcattaaaattaatgaaaacattttttcatctttatggctttgcagccgggggcagggcttttagaaattaattaaagtcaccgagtgagagataggtgtgtttgccctggagctttgcctcctccctgcacctctctcctgaccaaaaagaaaaacctccactgatgcttacgaggcctcttggagaggcaggggctgtccccagtggggcctccaggccccacattttctcctcctgtcaccagagtgttggtcgtcccccaccttcgtctccccctcacccctccaccgccaccccagaccccgcactccccggcctcaggagtagggaggtaggtgtgggccaacaaggttcagccaaatctagccagcactgggcagagtgggatgttctggacagttccacctttcaggggatccttccatctccctccaccagaggctctacccacggcctttcctgtctcccaggcaccgggaaccaggatcttcccagagtttccccatctcccccatcagggccatttggagcagtcctgcccagccccagcaccccacctggacattagagaccaaagagtctgtcccaaacacacctgtgctcagaacgaggcgctggcaggtaccaggaatgggtgggaagagggcagacctaggttgggagagagaacaagcgggtgctagctcgggagcaggtggcagcgggaagtggaggaagccagagcacaagggcgggccttcctgggcgggggtgctgggctgggaggggctggggggtgcccagagtggccaaggagacagagggctacaggggaggcaggcgcggatgtactgaatttgggatgtgtagcaggtggggtgggtatgaggctgtttaagcaggctcgtccggcgggaagctagggggagcgtgcagctctggagccccgagggaggtccaggcagaggtagagtggatctggggttcagcagtgaatcggatggaggatggagccagctgcccaggctcactggagaggccaggcccattctaaatactctaatatattcctttccttagcttattcctttagggcttaaatacatctccacctccagagctctttctatttaaatccaaagacccatggagaggtgacatcctaaacccttgtagtaatcaagctgtaagtcatagaaactgtattcattttgtttaaaagattttattttatttatttattcatgagagacacagaaatagagaggcagagacacagacagagggagaccgggagcccgatgcaggactggattccaggactctgggatcacgacctgagccgaaggcagacgctaaaccaccgaaccacccaggtgtgtcccaaaaacttttagctcaagcaaaataaaaagggaggaggtggatttatttccttaaaccaatataaagtctggaatttcaggtacagctggatccagatgctcaagcaatgtcatcaggattgtcttgactcctgtgagctggcttcactcgcgggcaggcagggaaggctggcagcccagcttttccttctactagagggaaaacccccacgggaagggaaaatgtcttcaaagccctggtatcgatgggtttggtgaggctggggtcatgtggccgcctgagccaggagtggggtccattcaatccacacagactaaaaggagggagatccccaagtaaaaggtagaaattggcagctggagctgaggctggaagcaaggcccttaccctagcacataagttctcagagggcaggaactttgtgtctgctgtgtcttcctggcctagaacacattgttggatggatgaatgaatgaatgaatgaatcaatcaatcagtcagtcaatcaatcaaccaagctaagctatcagacaaggtctggaaacctggtctggaaacctgggaaaaaacagattttccttgaggccagcctctgtggggcacttagtgtgaagaataaagaaggcaaagatgtggcctgttggggggttgaggagccactgaagataagcttagctttgaggtcagccaggtcgtgagaggagaaggtgggatgtggggcctctgtgggcaaggtaggaggggggtgactagcccagggccttcaggcccaggatcagagtcccattgagtcctctatgttccctgcagtgacatgtagactccttctctaactcgccaagaggctccttaagctcctttgcacccccagcacctgccgggtgccgagtactttggaaatactgaccactcaaaagaaagacaggtggtggccctgtcctcaccagaagttgcccccctggagctgaacacagagatatggagacagagcccatgaagcctggaggcttccctctggccggttggctcttgggctcagcaggccttcctggctcaggctgtcccatccccactccccgctgccctggaccaggggatgccatggcagacagactagcactgcctctctctcgggttatgtccacagagaggctagacaaggacacactcccagcctgtgtccccctggggactcaggaacagtggaaagagagaatgcactgaatgcaggagctgacccctggggaaaaatctgctactgatgccccaatatctctttaccccgtcttctagttggccatatggagtgtcaggatgttttccttgcagctaggaggggtcatctgactaagttctggccaatgggacatatgtggagcttccaggaattttgcttaaagacagttggcatatacacactttgcctcttcttcttcatcccttcttttctgatgatggaatgaagatgagatggctagagctgtggcaactatgttgggtcatgaggtgaccctagagcggagaccatagatagcaaagcaataagaaagagctcaggtctccaaggactgtagagcagaactgccatgtcatccttagacttttccatgagagagaaatgcacatttatattatataatttattgatattctgtccctattactccctgtcaaacctaatcctattgaattcatgcttcagtcctatgactctcctagtgggcccagtatgaaagcctggggggcagtgggtgctggggctacactgagctccaggacctgaggtcattcctcaaagacacagcttccccacctcaccatcccctaactactgattctcacctcctcccacatatacatgcccacatcaggatcccatagccagagcagacctcagggagcaccttgtgccacctcacccccttggcaaataggtactgtgcacgactccatgtaggtcttgggggtagatagccaacatggcatggctcctctggaagttctgtatcgggggggtgatggcaggcacagagtgccaagatggggcggatgcacggtttctaaagagaggtttctaaagagagggctgtctaactatggacagccctgaagttcggtcacgtgtttatcagaggttcccaggacacatgagccctagatgtgcagagctgccccccaccatcggccagcccaccctgctttcaggcagagaggcgcatcggaggaatacagctcgcttcatcctttgtccttactcccagttgcctgcccggcccggcccagggacaggtacacagtgctgcccctgccttgctgggccacagcaggttacctgaggagctggagccagcgaggaagaccactgggcctcgtggaagccgtgccattcgggagaagggcctgtccaggcccctaggcccaagggtcagggttgactcctgctctgatcaggtaccagagtatcaggcatgagctgtagaactgtccctgtcagctcctccgtggtgccagatcctggccagggacatggggataagtaaagccctgtccctgtcctcaggagctcacagcccagaggagaaactggacctgtagacaactgcagatggaggcacttcctagtacaagaatggtcacatcgactgttaggcctctgcttgttgccggccccccatcagctcagtgagtctctcagcgtctcacggaggccccatccccagggagaccccagggctggcccatataggctgcaggcagcatcttctcaagtcctggcaacttgggaccgtgttttctatgtgcacactgtagtggcatcaacaagacacacgtgtcccccgggtaaaggtgcagaacggtccctctctgacctggcttcttccacatgcagatactctcatgtccctcactgaagcagctccttcactatctggcacgacggctgaacaagggcaggccctgtcctgtttccactgtggtccctactgcccccttgcctccctcccccatgaaaagagactaaacagagcctcgaggggtgtatgggaggcgtttgggcagaggggagcagcacagagcagttgatctgtaagcaaggccccggggtactgagggtcctgtgcctggagcacagggtacgttagaggaggctgcgggaggagccgggccctgggggggcggggtggcaggcagagagcagaccctgctcagatatcgccagggcttaaatgtgagcccaagaccctggtaatgcggaaccactgcctgctattcagaacagtgtgtgtgggcctcacactggcccagagcctcccactgcagcccctcccacccaggcagcaccccctgctccagcccccacctgttacaaagctgtccttgctgccctagcccagtggtagagacctggtaaccacaggagtgtgggtgtaacagagcttcccctaaggacaaagataggagctccagaggctctagcaggtggagcagagcacacatgtgcacttgtgtatgcgcctgcaggagggtgtgaggccatatgaactatcggcccttgtgccccaagaacagagtccctggccctctggcctcccacagcaccccacagcgacctctgtccttgtcctaacgttactttttggtctgatctcatctggtctgcaatttccaccagggcaatgacagaatactatggtatctcagggagtgcagcacctggcatatagtaggtgctcaagaaatgcccagtgactgaatgcatgtgctctgggacagcacaggaggtgtctgtgggtctgtgtacacctgtgggggggcacgtgggggggcacgtgggtgtgcacgcgggtgtgcagtgcccaatgtggccaggtctgcatctcacctcacccacagaactttctggcagggccaggaggaggggctggttttctttcccactccatttgtgtgacaggtgttggcagtttatctaactgtgataataaagaggatggggggggtgctaattccttctcactttattgaatccaccaatccttcacagcctcagggccctgagagggggtgattaaaagacacttcagcgcactgcttattgccaattaacagacttcaatataaacaattaataaagccaccatgggaggcgagaggaagggattcaatgccccagcctgggcaagctccacctattcccgaataccctctctccccgcaggctctaccactcagagggctctgccctgggagtaggtggttaggggtaaacacctgggaagggtagggggatgcgagggcgggtgctgctggcagggtctccccagtctcaaaactggagggggggaggctgcaagttcaccccagtgataccaatagaccccagtcccagaaaggacaggggctcacccaaaatcccagccacccctcagtgctctttaaaccacacccttcttcccctgcctgcccccttggccaggtggtggcccaccctgatgggtctcctttcctatccaaggccagttattgaacctctgaggagaagccagttgactgcccctgcttatcaggctggcaccgccatggtcccaccatggcctctggtagccactctctagtataaaatgggccccccctagctctatttttttaaagattttatttatttatttgaaggagagaaggaggggaggggtagaaggagaagcaagactccccagggaacctgatgtggggctccatcccagaaccctaggatcatgacctgagccgtaggcagacacctaatccactgagccacctgggcgtcctgcacacttagcctcttcaggacaactttcaggggttgctttgtgagcttctgctctgtgcccccttagtgccagatgacacccaaacccatctcatgaaatcctcaaacagaccttagctggaggtatggattacatgggaaaacacatgcctccaagggtgagggagcttggttacgtgacccaagcactctgtcagccagcaggtggggggcaggggcaggggcctggacgtgaccccaggttcaggctccacaggccacaggctctaggccaggggtctgcagacttgctctgtagagggccagatataaatatttcaggttcacagaccacataccgtctgtcacagccacccagctctgcagacgtggtacaaaagctgccataaacaatatgtaaacaaaggaacatggctgtgtgccaacaaaactttatttatggacagtgaaattttaattccatgtaattttcacaccacaatatattttctttattttgattctttttcacatatttaaatatgtaaaaaccattcttagctcacagaccgtccaaaaacaggtggtgagccagactgggcctacaggccatgttggccaacccctgatctaggctttaggaaccttccagattccctgagtatcccaaagggcatgttcctgggatatgatccctcctggggcagggagtttgaagtcccacgatacggtcttattggcggagagctgggagggcaaaaaatgaggtgccagaccctgtttcaccagagaaccacatgcatggtcacaagcatggccacaatgagggacagagacgggctgataggcaggatgtgatgcagaggcagacagaggaaggggtgtaagtgtagagagacagacaaggagtggtaccaccagttcttctgccatccagctgacttcagggcaaggcatggacaatccacaatggtggtcaagcttcagcactgatgttctgggacttcaaggtaaacgagagagaacagactcagaaggggctgagaaggtggctttctctcctcatcattcacctcattcattccatcaacaagcatgttctgagcatctactaagagtgccttgtttttcagtttgggacaaagccttgcagctgtctttggaaatgaccctggcgggtgtgtgtgtgtgtgtgtgtgtgtgtgtgtgtgtgtgtgtgtgtttgaggacgtttctgagctgcctggaaaataagagtaaatagaggacatccgtgtcaacagagcagataagtaatctcttgaagaaatccctgggtgttggcaaagcaagtaatttagcaaagccagtactaggtagaggaagcaggaaggtgtcctcaaagacttctgtaaaaggcaatactgattgatgggagagggagaacattagctttggaacagcgaagtgagtttgcaatctggcccctggcaggggctccccccttgtccctgcctcctgcctcagcttccacaggaggctttgaggggcaggggacaggtggtgggaccggagctccaacaccgcatctttgcagctgggtgaaacaacccaagcctcggctgtcccgccagccctccgggtggggtcagggagtaagacccaagtgcctctcctctcactctgatctgcaatcctcagaactgccagctctgcctgaaaagtgtgcccccaaatccaaccactcctcccaccctatggctgccacacaggactggaggctggaggaatgcaataggttgcatgcagccagagcgcccctgtgagagcattggtcagactgcctgcctccatggtctcacagccctgccattcctagggtgaatccacatttttagcatggctcaaaataccacaacctcatgtccgctgctctctacacactcaggcacccccaacctcactggcctcctccctgttccctctgatccctcttcccccagatgcccccaggcaccccccctcacttccagcaggggtccccctggctccctccctgacctcttcctcactgattttccctgcttttcaccccctggctagtctccctttgcccccagcaactcgagagggcctcaggtctagggattaacatggctccctgaggattcagggggtcagtgaaggtgaatgggaaaaaaaaatcacgtctttattttactcattttgggctgaaatttaacacttgcttccattgtgtctgttagcaacagaccatagcagttgtcacgaaaccctgtggctctgtcacacatagaaagcacagataatttcaaatcgtattataattgcagaaccagttttgaaataccatttatgctcaaccctacttcaaagtgatggtagttttattaggcccactgctcaattgtattatttagtgcattaataaagaagctcatgtattactccatcccaatttcttaatattttgataactgcattttatataatcagtgtcctctgaatcctataacttttattgtgtggacgtataaatgttattctgaaaagaggtccttaggcttcttcagatgccagagagtccacagcgtagtgacagtgaagggccaccgttctagaaggtaaactctgtgcagagagggcccaacgcaaagcaagatatatggatggaaggaagaaagtgcggaggaagaagggagggaaggaggaagggtgagagggaaggagggagtgaatacagcacgaaagtgaatatagcttaggggcaggagcagggcctgagtcaaagtgccctgggtgagccctgctcactagcatgctcagcacagagacttggtttgtcatgaaccggccagagcctcgatttcttcatctgtaagatgcacagtcatacctgcttcatagggtcattgtggagataaaatagtgtgcttggtacatggcctggcacatggtaaatgctcagtaaattataacatattttagtcaatgttgtggcttccctagttctaggcttttgcctgagggtctggctcctcagccaggaaggcaaaggcattccacagagctctcccctccaccctgcagatgtctgagagcgggccagggctgggccatgggcagggtgtccattgagggtgggctgggggtcgtgcctacacgggtactcttgtctgggggagtggggtggaattctaatcatgcccctagaaggggaaatcctccaaaaccccaactggtgagtctggaggcaattatgagagcagccaagccaggaaggcatctggggcaaaccagtaggacaggggctcctgagctccctccttgctgccctgcagcctgggtttccattttacactacaactgctgtctgagaggacaaaatccttgcccttcctgctcagggaagcctggattggtctctcagctcccttgcccgaggccctgcttcctgaccttctgcccattataacacacacaggaaacgatgaccatgggcagaggctccaacgtggagccacatgtttgactctggacttgttaatcctcacacatctaggaataggcgcagctgtcccatgcagagaggaggaagccagcgccgggaggagtgaaggctggtgttcgtgatgtggaagtctgtgctccctcccgaagcacgaagcacgcctggcagagaaggggaggcgaggacagagaggagggcgtgaagaggaaagagagtgccgtcttgaagaaacttgaagtctggagagtcgggcacaccggaggggaggcagactggggtgccgattcgggagacagagctctagccaggaaaagcaagctggcagccactccggagcaacccaggaagcctcagctgggccgaggaagaaggtaactgccagcacatgcacatctgcactctggagagcccaagaggcactcaaagccggagtgaggaggaggctcctagggacaccggggagatgcagagtcatgaaccccactactcaccatccttgctccgccagggatctcagcccatcctgactcacaccattctcccctgagtccagagttaagacccagggataatcggatgcattagagtaggtgtgagggtagacaggtaggtgtaagtctctgagggttggttccctgatgttgggtagctggagagcacaaggcaagagggtgccttgtcacttttggtggctgggtgtgcgtgtgtatgtgtgcaccaagtgtgtggttctgtgcatgtcttcgtgcacgggccccctcctgtgtttgcatgtacatgtgcatgtgctatgcgcatgagcaagtattgagtgtggacagtcgtgcaagtgtgcatgtacacgcggtggcaggaggggtgtgggcgtgtgtgctgtgtcaatgcacgcgtacgcacgcatgtgtgcccgtgctaaagagctccgcagagagtactcacggaatggggagaggatccccgctttcccatcatcccccactgaagctggctgaggaggctgagcggggaagggaggcctgggaagccatctcccaaaggtgccaccatcagcaggggagggagggagagagggaggaagcagcaccttatttaaatgcaaatgactgaaatacaactttctgtattaacatgcaaattgcacttcagtctcacacctcccagtgccaaagccacggaacactttcaggaatcaaagctgcaggacccccaatcacctgggatggtgagaggccccacttggtggatctaggaagaaacaggggacagaagatgggccctgggtgggcttgagatgctgagccagatgttcatcctgcctccagggcttcagggcgaggccagaagtggggggccggaggtctggattgctgcccccatagtagaccaggctggagcttgctgtgggtcgtccactggctctctgcctggctggggcaacatgctttgtggtttcctaatgagccgggctccggtgagcctggagccctcctttgggagatggtaagaatcgtttgtctacttgccaacccggttcaacagatcatgtcttggatggttgaatccggctgcagggagcagagcgtcgcggcccacccagagccgcctccagccctgagctcaggccccaaggcgggcttgactctctctttggccctggagcaggctgccggcacagctgtccgggtcaccaggggggctgcgatagggcccgctccccgagctgggtcacctggcaccagatcctctgggaagaagggcgtcttcctcttcacacgcagacgcgctggacttacaccctctcctaatccaatcctcccacagagggcgccttttcctaatttgcacacagtcgcggtacaggtgtgggttggggggtgccccgagacctcggccttctctccagcccttctacacctgcctctctggtcttcccttccctccctgctccttggtttcccaccacccccatgtctccactcggttccctgcaccccctccttgctctgcgtcttccagacattacccaccacctctcgtaccctctctccataccctctctccgtgggtctcttttgtttgtcccctgccctccctcatcccccccccctccccgggaatcagcgtgacctggagtccttacctgctggggcctgggcaggtgcaggcagccgagggagggcgggccaggccctggctggctcagggccctcctggcacgtgcagggagcccagggcgtgggggagggtcccggctgcttccatctgccaagctccgcatttaggcagtggcagccggggcgctgcgggggaagcagaagacatcttggagctgcagggggagagggctgcatttcatccacataaataggcccgtctgtctccctgggggcgggcgactttctgggacacttctgatgtcctgggcttcccaggagagctccaccggtggagcagggggcctgtgatgaaaccctccaccccaaccccccacccccaccccaccccaccccaccccaggccacgtgcctcggggccaatgccttgggcagtcctggcctctttcaagcatccccttggttgtcagagacccagcaccacaggccccgtgggtcacggcgtgagcccctcttccttgatgtcacccccaaattactcccccctgatctcaccaagcccagggctcaggaaggctgctcttgggggactttgaggacacttgctgcctcatggagatccccacctctctgtgagctggggccaggcacaagaaatgacaaaaaattttagcgagagacacagatggctcctggctcttgccatgctggcctcaccctcctcggcatggctctgcctggacccggctctgtccactcggggggcggggggaagaccctcatgcataccacgccacgccaccccccttttgccaagctgctgtctactatttcttttttttttttttcctgtctactatttctgagtgtcagtgcgggcttcgtcagaccctgctaccctgtcaacacggcagaggaaggagaccacctgggagctcccagagaacagggactgctcctcccatcaagctcgtggaggttccctgcctctgtcctgagagtggagttgccttcatagaaggtggtcctgctggcccgctgatggtgtcccttgggattctgtctcaagagcctgatctgtccttgagagtccggggcttggaggggacaggacgcctggatggctcagtggttgagtgtctgccttcagctcagggagtgatcctggggtcctgggatcgagttcacatcgggctcccagcagagagcctgcttctccctctgcctgtgtctctgcctctctctcgttctctctcggtgcctctcgtgaataaataaataaaagaaagaaagaaagaaagaaagaaagaaagaaagaaagaaagaaagaaagaaagaaagaaagaaagagaaagaaagaaagaaagaaagaaagaaagaaagaaagaaagaaagaaagaaagaagaaagaaagaaaaaagaaagaaagaaagaaaaaagaagaaagaagaaagagaaaaaaaagaagagaaaaagaaagaaagaaagaagaaagaagaaagagaaaaaagaagaagaaagaaagagagaaagaaagaaagaaagaaagaaagaaagaaagaaagaaagaaagaaagaaagaaaaaaagaaagaaagaaagaagagaaaggctctggggggcccttgagggctctgggggctggtggtgttcacccagaccctgagacctcaggcctagaatgttcttaggagggttttgcttaggagagaggcactgggaggccagagcctgttccccacccccacttccagccactggcgtcagtcgggtgtgaagggaagaccagccaggcagtgaccgggggccctccctcaccctggggaaataggttcaaacatccacagaggaggaggcgggaagtcttgggacaagctgacaagaggctgaggatccctctgtgcccggtgggtgtggaacagtgtggatcatgtaggacagagagcttgggctctggagccactggactttgcactcactagctctgtgatgatggaaaaggcacttaacccctctgagcctctcttcctctgaggggactcataagaggacctgcatcatggggatgacatcatacagcaaggactgtccctaggcagaagcccctggggctcctctttggatgattcttgggctggaagaggccccgctggcctcgtagggtgctcctgctaagcagcgagaaggtgctttgctatgggttgaccgtaccccccaggccctttccactctgcacctgcccactccgtgtcaagccagggacctctgagcactattgacagggcagcgccatcctcctacttggccgccctgctcagcccggccagccaggactagaagcccccggtggggcaactgcgggcttgctcagcacctctcccagaggcccctagagggctcaagccctgacggcccacggcaccacctgccagcctcccagcctcccagcctctcctgggatcccctctcaactaaaattgagcgtaattggatttgaattcttatctcagggtctgcctctgggggagcccaaactaagagtttcacatggttgtgagccagctctccctacaaccaagtgactcagaggctggaactgggacagagagctcctccttcaggggctctgaggggcccgagggggggggggctttaaggagatgctttgtgaccaggctctgcagattcctgctgcctttggtgctgcgtcaagagctatcttctctcatgttctcgcttcacatgtcaacattcttttatcagcccttgtaaaggaggctgccagcagcatgcggtagcagcgaagtcatgctcagttcttgaggaggtagagtcagaaaactggaggattactaacatacattaggtgtgatgtcttattactctcatgacaaccccggaagcaaggctgccacatacagttgggcaggttgttcactgcacaagagcatctggccaagaggagagcagatgctcttcctatcaagcagcatacctggcccatatctgtgacccttcgggtggtgaggggaagaagaggaaagcttttcataatttggaaactgaggcacagagcccttaagtaatttgcccaagattctcagcatgtaagaggcctagttaactaaaactctaattccaggaattctgacttcagagccttcactccttactatactacttcacacagccttggcaggctgagccagtaggacagctggaaagttggggggaggggtttgactcttgggggccaagtcagtcctgagacatggggtctccaaagaaccaaggaaagacagtcctctcccctcagctgaccagggctctgggggccgagcctgagctccctgccacgagggatgaggccatagcgaaaagcaaggagactggacttctgtggctttgtgatcctgagcaagtcacctcacctcacacagcctcaattttctcactgtaaaatggagtctagatgttccatcctgcctgtcttgctggctaggattaagccagatgtttgaaggatttcagagggaaggaggtatcctccatgcctaaaatcacaccgagaattgcctaagttaaagctcaatacatatttgccatctgcttaatacaaccatttttcccgggtctgtctgtggggacccccccagtccctgcacgcactgcctgagagcccgtcgttccacggctgccttctccgacacggagtagcagagcctgaatgccagggtgctcctggctaatgactcagcctccgtaacgagtccaaacatctggctgacaaagggcacggctggctcccaaagcgactgcttctgcacaaatatgttcttaatattcaattagtatttatccaccacgaacaacaattatgccactgactctcaatgaagtgcctggttaattaattaacggcgtctttaacgtgctggcagtatttctctgtgagtgcaacagttaatagcgcagtgacgccaggaggacctggggggctggcggggggcgccctgggttccccgggccccagatgtgaatctggagttgagcatgtgtcacacaagccatcttctggtgttaacacacacacacacacacacacatacacacacacacactgggatgtgcagcaagccacttaagcccttcccacccagcctgtctcttcagtagcaggtgggccagggggtcaccaaggctccctggagtcctgaacgcatgggtcccgtctgtgctgctcagatctgcattgatccgcatatctccatctccacacacaaggaccgcttcagtccactcggccccacctcagaggccggggggggtgggggggggggggctgctaaccacaccccttgcacctctttcccctccacccatcccctgcccatgctccctccgtgcgtgttccccagagctatgtcccccttctgcttctgtttctgtcctctggtttctcccagcctcctggtccagcccctccgctagccgtctccaggtccctactgcctcctctctggccccaccttcctcagagtctactgagggcacagagtgtgcagaccgagctgcctgaattcatcctggcactccacttactagctgtgtgaccccaagcctccgtgcctcagtttccctacttccagaaagcagatactcacgtgggaatgaccatagcctccactgcattagtcgggggtgggactaaactgccataatcgacccaaaatgtaatgggtcaaactccacagctgctccagcatgcgggatgtgttcttaaactaacagctctcatgttggccttgggatcccccacctgccccgtcatgcagaggcgccgctctcctgggccagttctgcggtgagtgtgggtgtcattcccaccagctcttccaaagacagggtcagcacctgaaggcccgagataggggagccagcaggggggcttcgggagtggtctaggcaagagatagctaacagcttgaaccagggctgtggcacaggctgcagatttgacaatagatttggaagacaattctgaagagtccacttggctcactgatctcctggtggtagatgaggcgattaaaaatgaccctaaatatcctagtctgcatggctgggagaagacggagcaagccactggtcaagatagggaagaaggaaggaagagcaggaatagggaggaaggtaaagattttgagttggcccactggcttgaggacctgggggggcattcagatggaggtgtcaccagtaggcaggtgcagactggagtctggagtgtaggggggaagactgggaggtgctggcccagaggtggggattccagccttggggtggggagtgggagatggatgggaggctgtaggctgagggaagaaggaggtcccaggataaactctgacaaaccctgacatttaaggggcagatggtgggaaagcaactcaaggagaggtctgagaagacaggaagggaatgggatgtcacctcacagtgatagcagcagggtcatggaaagccaccagcagtgttagactgggtcagatggtgttagacgcctctaggaagtcaaggaagtcacaggcaccgggacaaaccttcccatcctattaagaggctacttgtagccagcagcctcctgcatacaaggcttcaggggaagcgaaatgttaccattatctcagtttcctcaagggtttacttacaaattaggctcttcggtgggcttcttgagaaaattgtcaatataagatagagagcagaggccatttgagggacggaggagcgggtgggagtcctggattggagagaaagctgctctttctccaagtgtgcagggtatggggaaggggagagagtaggaacgggaggcagggccaaaagccaggcaccgctttctcctggtggggaggaggatgagagaagaactagagaccaggaggagggggagactgaggaggtactccctcccctccactcctaccatcacccagactggggacaaccacgctggccagtctccctctcccagtgcaccctggaggcaaatcagagtgagctcaagcccaccacaccacacctctccctgactccgaatcactcactggctctccatggcccaaaacaaggcccctggctccttgcactcccccactcagagcccaccccaatctccccactgcctaacttcccaaccatttgccctgctccttcctaactgaaaagcacactgctgcagccaaaccactctggcttgatttcctccagaaaggccagtccctcatgcctgtgaagaagctatttttgactcctgaacacttgtttgagttcccctgatagttttagaaatgtggggaagcaaaaaggtttgaccctttgagaagccaaacagttacacccacccaacaactatagggcacccaccttctgctgagggggctcagggaaggaaccctcttctcctgaagccaaaaccaatcacagctagcccattgcttcccttcgattaaaaggtgagcatgtgacccagtttaggccaataagtcatgaaaagaagtttgtggagggattctgggaaaggtttggctccctgatgaaaagaaagccctgtgctagaagaggaactctgcttttctgcttttggatagagagttgtgagcatgtgatgtggcagccactttgtgaccgtgaggggaaacagctgacacacagagagtagctgaatggaacaatgagcagaaatgagggccaagataatgtgctgagccactgtactaccctggatctgctcaacctcctgatatcttgttaagcaagctactttggcctcctttgtcaaattcagaagaaagagaaggagaagacccatctcatagggttgctatgcagagaaaagcaaacccttagctatacatgcctgcaaatacacctggaaatatcggtgttaaataaataaaaatagtaaaaaaaaatgagcccctttgaattggcttttctgacacttggatggtgaagaatgagctccttcaacagaaggcaggagctaaaaagctgacacagaggaacctatatggggtggagggtaaatgtgcagacttggaaggatctggagcctcagagcctctggcttatctaggggaatggctggcatctgtgtggtctggtggggggcacaccccctcatctctagcagtgccatcaccccacacacactatcttggctcaaagggccaaatgtaagtccgttacagagggaatcaagtgtgaacagggagcagagcaggatgtcctgtcgccgaagagcacctggaggtgaggctctgtgcaccgcaactccccttggggactatctaagggccagttctataactagacatgccctccccaatcgtgctgtgaagatccacacctatcccctggtaaaactgtagtgttggtggttgaagtgttgagcacttcagtgtcttgataccagctgtctgaaggccaggtggcatccctgactctcctagactttgagtctcctgccctgattctgtgagccaaagcttacccttcccaggctggcttcacagccctgtgacctgggcagtgtcccaggccccacacccagcctaatgtcctgctgttgctgccttgaaattactgattttccaacaagggaccccatcaggtcctataaataatggagccagccctgcccttcatccaggctgcctgcactggggtttctgttcttgccaccacggacccagtgcacagacgtccttcccctggttccagcaggtgctgccctcagtcgtggccacctgaacacctcccctcccccgccctggcacagcctcgcaagcacccctccccaccgccacctcctgggttcagattcccgtcctggcctggagcactggctgtaatcgtccctaaccagtatcctggcttcaggcctcttccccttctgcgcagcagccaccaagatctttctaaattacaaatcggatcatgtccctcacctgcttatagcatctcaggggctcccagcagcttaagctataaattccaagcccctgtggcctaaggcacaaagcatttcctggtccagcccctgactctgtatcgagaaatcatcccaagccatgcgctcccggctcccgcaagcctccctccacccgtactcgcagcatctcttttgatgcccagaaggggcccttcgtgcctgtgtctctgcacacgctgtttctgctgctgagcgctctgtctccagttctgcatccagctaactcctgacaccttcagaactcaagtgccacctcctccagaaagcctccccctgtgcccacagcccggagggcctctccgcatggtggccttaatgatccacttgtctcctccccgtgtccttggcatccagcacaaaacctctgggtgcagcggtggggggtgtggcgcgagggagggctaacccccggggcaccaaaagccactcctcctctctgggcctcagtcctcctgttccttccttcagcaacatgccctgagcactctctgtgccaggcgctgagcaggcacctgccctgcagccaacatccaaccagacccaaaccccagcctcagggagggagatgggcaggaggggtgacaagcatgaatgatgcacagtgaatgaacacccatgacaacatcccctggaagcatgcagagaagacagtccatggcaggtcagagagggatgggggtgctgcctcatagcggtgcccaggaaggcctctctagcaaggagactctcctgaagcaagtgaggggcgtagggggggttccaaatagaaggccagggagggcaaagggtgagtcccagcagtgtggccagggcagcacgagtgagggggaggatggaagatggatgaggtcaaggaggaacatgggggtgggtcaggggtcggataggctgtagcggaaaccccgcccaagtccccccaccctcgctttgccctgaagcccacctcccactcccatccacctactctggcttctctctctctccttcaatgaacagcttcatccttccaggcctcctgccccttaccccttggcttttccatcacccccagaccccctcaacacagcatctccttccttccccctggggcaacccccagtgatcccctcacctccctgcctgttgactgaccccctccatccctgtaatgatggtttgagcaccctgctccatcccccaccggccctcctgggattctagctgcagccagctccacactgaagcatcccactggagcccatccgctctctgggccagggggcaggggtgggactcaggcagcccacagacatagcgtccgaaggggtggaggtcaataccccagaggcaaccttgttcatgggagatgggggtagagggataactgtccctgcgagagacagtactgagatacattctacgtgttcctctggggttcccgaaggagctacctcccattgcccacagccagtgaccagctcaataatcctgtcccaccttagctctcactccttccactccctcattcttatttatttcctgggatcgcctcacagacaaactagtctccaagctaaacttggagtttaacttgtaccaagtcttgtctcgggctctgctttcatggaacacaaatgaagccagtttttgtggttacgtaatggagaaggggtccttcctcccggccaagggcacacgtgccaccagccacccatgcagtataatttctccccttttctggagactctccacaatccagctgccagtcgctcccctacgttcacttattctctctctcccatcatttatgtttaaatacagccgagtttcctgtccaaaggaaaaatgaaacattcttcaaccccatttccctctggcttctaaggactcatcttgctccacctctcaggtgggtttggcaccactgctcactccctacaccttgagacacactctctgctggcttccctccttcagatacctcttctcagcctcctctgccaggtcctgctcctagaggagaggtcctggtcctcctatcctcacactgtgctgtctggaggaccccgcaaacatctgcacctgtgtgtgtccagcccagactgctctctcaggcacacacccagagatagccaagcacctgccttttgcccccactatcatgtctcaaaggtacaaaaaatcagtacatcccaaactgcccactgtatctcaacccactccttctaggttccccatcttagcgagggtgctagtctccatccaatgatgcacagatcacatgctgccctggagccatcgtgactccattctctctctcaatcaggtcccattcattaccacatcctctagatttcacctcctaaatctttatggatcagtctacttgcatgtgtttcatcactaccacccttcatcctgagcaccttcactaaaaataacatcctaaccaaggttaccagataaaaatgcaggatgcccaataaaatttgaatttcatattttttaaaaaatatttttaaagtataaatatttcccaatattgcatgggacatacttacaatgaacaatttttcattgcttatttgaaattcaaatgtatttttaaatgttcttttttagttaacattctatgaaattctcatagtatttcaaggatcatcttgtatttttatttgctaaatctggcaatcctaatcttcactgatctccctgtaaccccacactgtggccagatgaccttgttcaaacaaaatttgctgagtagtcaaaatgttaagtatatgtatgtaattgctagatccaccactttaaaaatatatatatgtggtatgcctgggtggctccgtggttgaggtctgcctttggcttgggtcattatcctggggtcctgggatcaagtcccacagtggactccttacagggagcctgcttctccctctgcctacatttctgcctgtctctctgtgtctctcatgagtaaataaataaagtctaaaaatatatatatgtaatgtacagcatagtgactatagttaataatactggattgtatatttgaaggttactagagagtacattttaaaaattctcatcacaagaaaaaatttgtagggatccctgggtggctcaggcactggtttagtgcctgccttcagcccagcgtgtgatcctggagtccagggatcaagtcccacatcaggctccctgaatggagcctgcttctccctcttcctgtgtctctgcctctctctctttctctctctgtctgtcatgaataaataaatacaatctttaaaaaaaaaaaaacaagaaaaaattcgtgagtatgcatggtgactatgcatggtgacggatgttaactagatttattgtggtgatcacttcccaatatatacaaatattgaatcaatatgttgtacacctgatactaatattacatataaatcatatttccatttttaaaaataataattaaaataaaattttctttttgagaaaaaaatctaagtacaggaaattctgttaaagaagaaaatgttattaatggcaacaacttaaattagttaatattatattgagtgggggatccctgggtggctcagcagtttagcgcctgcctttggcccagggtgtgatcctggagtcccaggatcgagtcccatatgaggctccctgcatggagcctacttctccctctgtctttgcctctgcctctctctctctgtgtctctcatgaataaataaataaaatcaatataatatatattatattgagtgcccattgtgtgccagaaatgcctggaaaatgttctgtttaaccaaatagtctgattagtcaaattatcatatataatatatatctacttgacatcactatttgcaaggatataacaatataagcagcactaagattgaattcagcacatgagaccatatgatgtttcagagttaccaccataaaatattttaggagcacataaacattagcatagaatctggaaagtacatatgactgaatgccaaggacacaagagtcaggtcctggtctcattcttaccttgttgttggatttgagcaaatcattttacttctctctgttgcagtttcctcctctatgaaatgaggggctacactaaatgaactctaaaagctcttctggctctgattcaatcaccttatagtgtgatagattgaagaagtgctgcctcatggtgtttctgttgagaaaatgctgaatatactagtttctactatagttctataaaaatgaaaaacctgtaacttcgtatctttgagggaaaaagatttatcatcattggacctgagaaaatacagtcaatttattttgattctggaagaatggaaatgaattaagagatttttatagggcccaagaaatccaagtatagagcagatattagatgtcattaattccaagggcataggtccctaaagaaaaatcttcaggatctactgaagccaacatctatgagatgggatgccagagtctgaagaagaagttttaagcagagcaccttcttcctagttcagagaaactcaggtggatccagttccttgaaggcatgcacatagtaaaatattacaatgtgttttcaagtggtaacttctgtttctctcaaaagtctaaaaaaatgagactcttgacagattatttattagatttagcttgaattatctcaaggagtttgtgaaaacttgggaaaataatttagaatctactcagtcttcctaaggtaaaagggggaaaaaagtataccaggagataacagtaaaaaaataaacataacaaatcctcaataaataaaatagaatacagaaaaatagtcaaatgatccactgaaagcataaaaggggaaatagaggaactaataacatagggaacaaatggaaagcaaattataaaatggaagttctaggggtggtgcagttggttgaatggctgactcttggtttcaactcaggttgtgatctcagggccattggaccaagctccttgttgggctctgcactcagcaagtagtctgcttaagattttctctccctctccctttgcccctccccattgtgctcacactctctctcttctctctaaaataaataaataaataaataaatcttcttttaaaaaggaagttctaatccaattatatcaataattacattaaatgcatacgatctaaatatatcaattaaaaatcagagattatcagaatgaataaaaaactagcaagagtcaacaatatgttgtctctaaaaaacccactttataatagatatttaatagtaaaagggtgtaaaaagatatatcttgtaaacagtaagcaaaagaaaactacagtggttattttaataacaggcaagatggatttcagagtaaggaaaattatcagcaataaagagaggcattttatactgataaaatggtcaattcatcaagaagacataacactcctaaatgtgtatgcacctaacaacaaagctttaaaatacacgaagcagggagatccctgggtggctcagtggtttagcacctgcctttggcccagagcgtgatcctggagtcccaggatcgagtcccacattgggctccctgcatggagcctgcttctccctctgtctatgtctctgcctctctctctgtgtgtctctcatgaataaataaataaaatatatttaaaaaaatacatgaagcaaaaactaacagaatggaacaaaaaaatagaaaaatttgggtggagatttcaacaattctcacagcatttgatagaaaaagtatacagattaataaggatgtagaactgaacaacaccatcaacaaactggatctaattaacatttttaggacccaaccatcaacaaccaaatatgcattcttttcaagtgcacatagaacattcaccagtatagaccataccctgggtcacaaaacaaatgttaacaaattttaaaagttgaagttatacaaagtatatttattctccagccataatgaaattaaattaaagtcaataacaaaaagacaactggtaaatttccaaacactggaaataaaacaacacacttataaataatctacaagtcaaagagaatgtctcaagaacattcgaactgaacaaaaattaaattacaagtcaaaatttgtgacatgtggctaaagcagggcatagagggaaagtcatagctttaaaactgtttacattagaagggtctcaaaacatcaatccagttccatcttgagaaactacaagactgggggtgagggcagcagagggcaaaatatacccaaagcaagcagaaggaaggaattaagaacagaaagccatgaaactaaaaatagaaaaagcaatggaaaaaatcagtaaaacaaaaagttgattatttgaaaacatcaatagaattaataaataactagccgaactgacaaggaacaaaggagagggcacaaattatcaatatcagtaatgaaagataaatgtcactacagactctgacattagaaggataatgaaaaaaaaaagaaggataatgagataatactattaccaactctacacacattattacattcaacagggcagatgaaatgactgacttctcaaaagacacaactagcaaaactcactcaagaagaaacagatcagaggaagaagagaaggaagagggggaggaaaaaggagaagaaggaacagattatccaaagagtatctatttaaaaaattgaatttgtaatttaaaatcttccaaaaaagtaaatctcccagcccagatagctccattagcaaatttaaccaagcatttaaagaagacatacctatctcttccagaatatagaacagggaacacttcccaacctatttcatgaagccagcattacctttactatagatagtaaaggaaaaggaaactacagaccaatatccctcatgaacacagatttttaaaaatcctcagaaaaatatttgcaaatagaatcagcaataaatcaattgaataatgtaccataactaagtgaggtatcccaggaatgcaaggctggttcagtatttgaaaaatcaatgaatatagtccaccatattaatagactaaagaagaaaaatcacatgatcatattaattgaaacagaaaaaaatcatttgaccaacttcatcaatctatagtaaaaagctcttggcaaattaggaatagaaaggaattttcttaatctgataagggacatctacaaaaaaacttataattaacatcatacctaataatgaagaacagaatgcttttttcaaaatcaagagcaaggcaagggtgtctactcccatcactcttattcaacatcatgctggaagtcctagcccatgcagtgaagcaagcaaaagagataagaggttggaaaggaggaaataaaatggtcctcacttccctcctcaacaggattgtctttgcagaaaatatggaatctaccccaaaactcctagaactaacaaatgagttgagcaagtttgcagaatataagatcaatttacaaaaatcaattatttttccatatactagcaatgaacacttggagaccaaaattttagaaaaaaaatatcatttataatagttccctaaaacaaaatactcacgtgttaatatagcaaaacataagcagcatctgtaggctgaaaactacaaacacagatgaaagaaagcaaagaagacctaaataaatggagtgacataccatgttcatgaattggaagactcaaggcagtttatttttttttatacaatcatctgatttatagaaagatgcaacaatacttaaaatgatacaaaatactgatttcaaaacataaaaaaatgaatatatttaaccatactcagctcataactgagcaaatgggtaagaagaataattcatactatagcatattgctaatatgaactggcaacagaaaaagttggtataagtagacagaaaaacgatcttttaagaattagaaccgaggggctccataatcatctggcatccgctcaatgttgtacctatggttagaaatgtacatgatgggaactccagggatcttccggatcctttgtttaaggtcccggtcaactgtggccacaatgtaacacttgtgccgagttactctctgtactaagcagtcatctgcataggttcctttgtgtgtgcatggcagtcgttcaaatcttggatccttggcaatccttagagccactcgatacttttgtcccagtttctcaatttcagccattacacagtcagttatacaagggatacacttggcatacagacagtccatcattgactgtactaagtcaagtttggctttaatggaaaagttgataaagttggtatcaaccaggatgtggtaaggtgggcccagctgtgtgttatattggaagaataagcaggaaggatgttgggggacttctctttccttgagtgcactgggatctttcttttctttctttttaggttttaatctatccttttctttaagcctctgatctcggagactaagcattcgcttcatggtcgcatactttcttgctttcttttgcttccccatgttcacgccgcactcttatttcttcactcaagacagtttaatgtcaattctctcctatcataatcctggaaagattttttggcagatacatgcaagctgattctaaaattcatatggaaagacaatgaaactagaatagccaaaacaattttgataaaagaaagtcagatgaatcacaccacccaattttaagacctaataaagctgcaataataaaggtaaggtagtaagcaagggataaacaacaagggaaatggaacagaatagaaagcgcagaagtagacccacataaatgcggccaattgatttttgcaaatgtacaaaggcaattcaaggagaaagggtagcctttttttttttttaagattttatttatttattcatgagagacagagagagagaggcagagacataggcagagggagaagcagggcccccacaaggagcccgatgcaggacttgatcccagaccccaggatcatgccctgagccaaaggcagatgctcaaccactgagccacccaggcttcggtgggtctgcagccccagtcggagcccgcagagttaccatccagtctattaaataattctgtcggggaagaagccggcatacgaggggctgtgctgacgggcctctaaaatgtaattgctgtactaaaggggatcagaaagtgatccttcccaccccacacgctcctccaggccagtcagaccagtctagacacctttccagaaggtgctctgctcttcctagtctgtgctcaactttaactaaggggctgttctcccttcaccaagcaaactccccccacctctcaaaagccctcccagatccccccaggcagagccagtggcccttcctctgaggggtgggacccctgagggaaagatacggctccactatggttctgagaaatgcaaagctgccatgtctgctgcatccgctggataatgatgtgactggatattattttggtgtcttaaaagctcttttttccgatgatctgcctccttgcatttctccttccacttttctctcagctaagtagtcagctctgggcctcactcccctaggaagtagggtctaatgagggccagaaacagggcccctccgttgtgccgccttgccccggtgtcttcctctcacatcatttagagccagaacctcctgccttccggctggctttcccccctaagcaagatttagctcttgccaccctccagaactcctgctgcccctccgtaccaaggcttccctgtctacgcagccactctcttccctccactctcctgctgcaagcccctctctccatttcccccattgaaagatccaagtttctgtgctgaaaaatgaagtcccccatttctcaggacatcatctctgaaaagcaagcacagctccaaagctctgagctccttgatgatacacacatctgtcgagtacctactatgcgccaggcacagtgctgggagcaagagatgcagcagcgaatcaggcagacggggtccccctgccctgtggagcagttgacattctagtgtggagaaacaaaatgctcaatgaaacaagaaagtagggatgcctgggtggctcagtggttgagcgtctgcctttggctcaggtcatgatcccagggacctgggattgagtcctgtattgggcttgctgtgggagcttgctactccctctgcctgtctctgcctctctcatgaataagcaaagaattttttttttaagggaaaaaaaagaaacaggtaagaaacaagacaattgtagaaaacatggcatgtgctatgaagaaaagagaacccaagtgatgaaatgggtggtgatggggcaggggaggctacattggatgtggtggttaggggaagctacctggagaggtgacacctgagctgagacccagactgggaagcagcccactgcataaagctttgcaggaaagaacttccagggaaaggacaaagtgagtgcaaaggtcctgaggtgggagcatgcctagagggggttggagaggcagaccaaagactggagttgctgaaaggtagggagagaaggagtgagtgattagaggtgagcttgatattttgattcctaaaccttcattgaatcaaggccatatctcgggggtgtttggagagggggaccttgagtcttattggtcaggccagatggactctttcttctcttccagaattcccttctggggcctaccaggctttaaggctatttatgggatcacaaagatgcctattggcttcatttctatgttgtgtatctatctgtcttacttattctctgaccttgacacacaaagtgtcaagggtggagaccggctcccatctacccacccttcttttcccaaagcaagtcatcaccatctttgtgtaatctcctgtccgtggcctcttctcccacattatttctcctcaaccacggaccctgctttgaagcctgcatacaaccttctctgaagggccagagcttccccttttatcaccactgactctcctccagacacccccccacccccaccccccacccccacccccacccccgtcccagggaagaaccagccagaatgctccagctgccctagttttatccctgcagctgcagcgaacacgtggagctcttcctcagcctctggccaaactcaccgagcctgtggcctgcgtatcagaagaggcaggggctgtaaatccgaatcccaactccctcaccccacctcactgggaaagagcctgggggtggcagcctaggtcactttgctatggtgacattccagcattttcaacagcagagctcttttctggaatgaaatcaaggtagaagtaggatgggaaaaacagatcaaagtattttgctggtataagtgcacttgatatgctcacacgtttgccatattcttattgtaataagagagaacaattataacaagatcagataagatgagaacaaggttgttttgttgaatataaaataaaagtaagggcttatggatgatgttttctgtccttgcttccaacttgtttcacatttagtgttgtacgcaatttattcacgcagagaagtaattgcaagttaaaagaggcttttctgtttcttctatcatcccttcttgcaataatcttcaattaaacacaggtgcaggggaatctatagccccactcaaagcaaactttctggtgatttcttttttttttataaagattttatttattcattcattcattcattcatgagagacagagagagagggagaagcaggctccatgcatgaatctcaatgtgggacttgatcctgggtctccaggatcaggccctgggctgaaggtggcactaaaccgctgagccacccgggctgcccctctttcttgtgatttcaaatgggctaaaagtcatgtaatctaattgccagcttctatctgtttttaaatactggtttaccataaaatggtatcagaaatgaacttgagtcaaacatttctagactcttcagtgcctccagagtacccaaggctccatgtgcacatgctttggaagctgtagcttcacaaccacatctcactcagcaatccctccacctggggctctgggccctgcccccaaaatccagctgattctgttttccaaagtctaacacagaaggctttgaagcagggggccccagtagagcccatcttctgcaggaattcctccagagtcccccaaacagctactcttccagtctctgcctgaatacctgaagtgatggagagctcgcctccttctgaagctgcctggcctggtccatgatggggccgctctacttgttaaacattgcttcctctctgagcctgtttccttatctacaggatggacataatatttatcaagccgggctgctgtgaagaccaaataagatgacatggagctgacataccaaatgtgcaaaattgcttgtgtccttctctgcccccagagcacccccattttagagggacagacagtcttatgcctgcagggataagtgggcaggggtggggtggggtggggtggggtggggagtgtgcatccccctgggaggtcactaaaggaggactgcctggagagtctgcccacaaagaagactgtagcaaagaagactgtgcaccccccctccccaccatccggtgagcttcgccaactcctccctgcccctgccccctccccccaccgacctcagagtctcatctgtcttccctcctgtcaccagagctggaggcttgtcagggaggcaaggggattaaatcccagggccagcctcgcccccaccaaggagctggccctacattacccacctgcccagctgtctgcggccatcgatcggccctggcctgagtgacctctgattgatgggcagcatgttatttactagattctgtcccaaggcagctgggaagaggggagagggacctagtcagagcccctgtgttcctgaggcagaaagaatcctggggtgggagggtatagagagcaggtggctgggagtgctcccctgggagtgaggggtcctggcccagcacagcagcgtgatcttagctgaggtctctggccttccctgtctctgggcctcagtgtcctctataaaaggatcaggtgctgctggcaaggttcacaaacttagcagccctcagggcagcaggtaatgacaaagtaaggaagcgagttggggctgccaagctgccaaagggggcaccttgctccctccatcttgccccatacctgtctccccccactgtctctgacctaactatagctggggaagcttctttgccctccgtaggtaagctggcccaccccttctctcctccttcctgccatgggccttctttccaagccagcccctgtacctgcagcaggaaaccacaaaaaagttcaccttcttggagagatttatatttgagaagggctttgacagagtggaggacctggggtcatggggacaggattgctgagggtcaccccccctgcccccacggctccgccccagcccctttggaaggtgagcctggtgaggaccacatgatcgcattctagggcagttaatcacttgtgatggaggctgccttgacctatggcttatgctgttatctgctcaggatcttgaccaaaatgcaggagacagggcagttctcagtgcaggatgggcagaggaagtacgaggagaggccacgatgggccccatggactcaaaaccagaggacagcacattctatgagtaatgggtgagcagaaaacctcccggggccacaaagggagtggaccgggcacagacagggggccccagccaggactggagacactcgatgagtaggctctggcccccggccacatatatccttcaacaaacctttgattaaggtaacttgagtttctcttttctttgaagccaaaatacctgaactaggacttgagcgggaaggtcattcccagccctgagcacagtgtaggcaaagatacaaaggcaagacagttaaaagaggtgttcccagcataaggatggtgggtggtccacccaagctagaagagagtgaggtacgggggccacacgtatgttgtccatgtgtgcacaaatgtgcacctgtccctacaaggctcagagatgcagaagatcagaatgtcaaatggggtcagaggccagaagagtgggctggggccagataacggggcggggggtggggagaggcatcagagcatcaggaagtactgtgagcacgtggatgtgtgtcctagacagagctggcccggtggagagaggctggacacagctatggcatggggagctggggggcgggggcagtgggagagtcaggatgagagctggccatgctgggaggacattgccagaagcctggcattggattcctatttccaacttggacaaccaaggcaactatagggctattaacccaggaagagagctcatcttgggtggttggatttgggacctgtgtttttaaggcaaaaccagaccaggcaactggagttactgatcaagagcccaggagagaagtcagtggtttaaagattttattttttatttattcatgatagacatagaaagagagagagagagaggcagagacacaggcagagggagaagcaggctccatgcagggggcccgacgcgggactcgatcccaggactccaggatcgcaccctgggccaaaggcaggcaccaaacagttgagccacccagggatccccgaagtcagtggtttaaaacaatttcagaggcattggcacgcaggggcccatgggagaagagttctccaagagtagacatttgtgcccattagggctcgttaccctatcaccgtccagtctgaacctaattccaatgtttaggatattctgcacaccaagcattctgtgacatcagctgggtgtcctacgagtcatcgcaattggggtactgtcttcctggaagctctctgaacccacatccctttggggttttgtggaggcttcattacacggataggattgatgaaatcatgagccatttggccattggctcaatctcccggctccccaccctggaggtctaggggtgggactggaaattctaaccttctaatcccagggttggtgctcctggcaaccagcctaacgggtttaggtgtggtctccaaattgcctcattaacataacaaaagtcactctgttgctttccaaagggaaactccagagttttaggagccctgtgccagtaatgggaagaacaccagtaaaacaaaccttcccaaccaacctcccttgcagctggtgctggccacgtgacatctgcaggcagctgggccagccctccagacttcttgttatgtgagaaaaaacgaaaggtggccggcagtccaatcttccttgcttgctgctgcggctgcacacattcccgacagattcagggatgcagggagccccctgggacactaggcggcggcgggggggggggggggggggggttgggggttagcaaaagccctgaagctgtggggaggccagcagagtggatgggtgcggacccccgtttggaggcctggcggtgggcggggtgtggacagggtgtgggcttgctgaatggcccaatcctggtcagggtgtccaggagcccctctgcctggggtcagagggagggaaccgcgcggagacgggagggggaggtgggggggtgggggggtgttcagctgcatctgaccatgcagtgtgcatgtgcacacagcaccctaggagggaggagtccctaaaggcttgagtgcggtctggggaaaacagctcaaattgctggtcagatgctttgatctcggttaacctctcacgtggttttctggggctctttttgctgttttggagattcctcaggtctgcaagccttcttgctccactatagatcccaacagttaaaaccagacatagacgggactccctaactcatgctctagcccattgtgtttatgtctgatggtgctttcttgaagcgttgataaagatggtttgtaatgcctggagcttcccaacagccagatcagggaaggccaacagaaagcctagaagagcacatcccacacgtcccctcccctgcccaggatcacatactgaacacacaccctctgcctgctgctctcttgcacatactcccctgaacctctccttttaaactctaggcatccacctgggaggtagagggctcagttgttaaggcttgggcctgctaccaccccctgctgtcaacacccaaaataaatttctccctttctgtcttccaaagccccttctcttgagttactggcttcatttacaacaagtgagtttatccaagtttgtttggcaatggggttggcaaacccagccaggagcttgctttcgatttttccagacccctctggattccccaggccagagcagttgtctgcagcagcacacaggggcttacctgtttctttcctgagtcagtggctattatatatggatcgggaacattcgtatcagcctctgttctagcaacctggacagactcctgtcagccacaggtagctgatttttagggtcacctccttccggaagccctcctggcttgcccttttaccttacagcagtcagtccatctgcctcccacattagccctgggtataacttgcttcttcccaccccacatgtactggaccactagttctcagaccttttgtcgtcagggcccctttacactcttaaaaattatttaaggcccccaaagagtttttgtttatgtaggtttatcaatattttactacatttgaaaataaaactgagaaaattataaatattcatttattaactcatttaaagataaaaattataaactcagtacatgttaatataagtaatatatttttgtgaaagatgactatttgggggaaagagagaacaaaattgttcacattttcacaaatctctttaaatgtctggcttaataggggtgcctattaatagtggttcagtccattaagcgtctgcctttggcttgggtcatgatcgcagggtcctgggatggagccctgcatggggctttctgctcagcagggagcctcttctccctctgcctttgccactccccctgctagtgctcactcactctcctcagataaataaataaaatcttttttaaaaaataaaaataaatggctaaatagaagacagctaaatccttgtatgtgcttctacattccatctcctgccacatgccgttttggttgaagtagataaagaaaatctggtctcacccagataaggagctgagaaagggagaattctagtagcttctcccattactatggatggacattcttctttgatattacaccaaacctcaacatattgtagattctggttttggagtgtgtgtgtgtgttggggggtgcggggtgtgtgtgtgtttaatttagtagaatccatgtctaacatggaacttgaactcatgaccttaagatcaagaattgcatgctctgggagcctgggtggttcagtgttgagcatctttctgcctttggctcaggtcatgatcccagggtcctgggatcgggtccctcatcagcctcacctcactatggggacctgcttctccctctgcctatgtctctgcctctctctgtgtgtctcatgaatgaataaataaaatcttaaaaaaaaaaaaagaagaaaagaaaagaaaagagttgcatgctctactgactgagccagccaggtgcccccacatgttgtatattctttagggtgagttgaagtctggaatctgaaaccttaccaacaaacttttcatactctgttacattaaaatccattggtctatctcatactttgagtggatcttttactcatataagattttgtaacaccacgtattggccattcagaagtaaggtattaggaaggtgtccagctcctggttgcagacaaaagtggtccaaaattcaaacttttgcttgaaagctctgattttatcattggcaacaaatactaacagttgttttccttggggcggtatgctcacttcattcattttcaagaaaatgtatgtcaaaatccaagaaaaatgatgagtttgtccatagttggggtgttctgttttgttttggtttggttccaagtaaaaatggtgctttgtgagaaatggcagctctagcttacaactcaaatgatcacagaagtgcgattctttgaaacgatgtctgtgcttcaggatgctgtggaaatgctttatatgtatttcccacgttattaccagaaaatgaaaaggatgtgtactcaagaatagagttttaataaagttaatgatttttattggcaaatcaaggactcttcgtgaaactggtgatggagttcagggcgtgccacccccaaatatgccgttttgacatatcgattgttttgaattacagttacttgggaaacagccagaacaagaaggacactctgaccctcctttgtccccttgaaagcaggatatgaatgccctgtgtgaaaggtgtcctccctgtagtaggaggtagagaaacatccttatcaccatcagtagggaatttgggaccaagaagactatataaacaaaacctattacttcattgttaatttactattgcaagccctaacttctttgtcttatcaattcttcacaaatttgttgtttcttggcctaaaaggaatgaaagctgcatgttttgggcacttctctgagtctcattttctattttttagagaaagagagagagcatggtggcagaggggggcatgcagagggagagggagagagagaatctcaagcagactccttgctgacggtggagcccaatgcagggccccatctcaggatcctgagatcacaacctgagccaaaatcaagagctggacacttaactgattgagccacccaggcgcccctgggtctcatatttgtaagaactcccatatgtgaaattaaatgtgtttttctcctcttcatctgtcttttgtgaatttaatttttagaccagcagaacaacctagaagagaagggaaacgttttcctgccagaaaagacaaccatggccactgtttgttcagtacagtttcgtgtcaccacctagacatttacagaggcaccagcatttttaagcaccaaggcttgggcaccatccattgcaaatatcagcaccataacaatggcaaacagtgccttagtattattatgaaaatagtcttgaccttgaggtcttcccaccctctttcctgcaaagaatctcaggaccacatcttgagaactgagtccctgaaggcaggagctgtatcatctttttgtttgtttttttgttttgttttgttttgttttttaagatttttacttttaactaatctctgcacccagtgtgggggcttaaactcacaaccccaagatggaggttatgcactaccaactgagccagcaactcttgtccctgtgtccttggcacaaagacagtgaccaataaacatacagagtagtagtcgacactgctgagcactccctgtgagctttcaagggatggattcattccctatgtgacagcccttgaagggggtacttttactatcatgcccattctacaggtgggggcaacaaggcacagaacagtacttctctctgttaaaaagagaatcagccaacctccagaaatgaggctgggaaatgattacactctgtgtttctagttcagttcttcaaagtctacaaagtgctatcaatacaagggaaactcccaggcagtcctcaagatggccagcaggcttcttcatcccagagaaacagagaccccaaatggtgaaggggctgcccgggtctcaagcgcaggtctgctatggtcctggacaccagggctgctacatcagctggaggacagcccctggtctccgaatgcccagtggtgacacagtcccagtccttcaccccaaaatgcttcccctgcggttgggctgtgacctctcctctctggacagtggggtggtggcacagcctcactgatctccacaattccctctggcttgccagcgccgaggcggctgggctgtcaccaaggctgcccagacccggcatgtatgccaagagcccccgggaggtacatcgtccgctgacagaatcagttaacacacagccgcctctccactgtttgctgaggcccctggaggcccctgctcattttctccccctcccagaatcccagaaaagtaaatacctacccagagacgcttcagtgggtaaacaagctagagtttgctctccaaattgcacctgcccccacctccaaaggctaccctgagggctgacaggtttctctgtaattcattgccctggtttctgtgtcacccactgccccccacccccacccgtgtggcctgctttcagggcaggagcagggcgggggtgctctggggtggtgggaaaggcctccctgaggggccggttgctgcacaagctcctcagggcactcaagtctgaatgtggacattcataaactcaaaaggagtgggcaggcctgacggagagtgcaggggacagatgtgacctgcagccatccacgaccagggactctctgacaaagagtgcttcacccaggagccaacccccaaggtcctggccccctggatctctgctggttctctcacggtgtgcaccaggggtcatcttcccgaggctgcccacatccctctgccctgctctaaaatgctcttcgctccgtccccaactttttgtcatcctggcttcttcagatctctgtcccttgccatgctcatgtccacatcactccctgctcttccctcctcatccccaccccactctaaggagcccccgtggctccccctttccccacccctgggtccctctgtgtcagtcaacagaagcgctgattacttgggtcagcatggcagcactgagtaaagtcctggagggccagacccgaggggtccctgccctggagagcctcagagccacacaagaggtcacacataacatgtctctgtgccccatacacactttacaggttcagaacccatgtgggtgaggctaagtttcgcccatggtgatgctccttggcaagtggctgagctggatggactctaggcctgtcccctgactttggaaaggacataatcacagagacacagaacaccttggcctggaatccaacccttgaaagtgtctgttaacatctctgaggctcagtttcttcatctgtaaaagggaagtaaacaatccctgcctcaggagatgataaggatatctgtcacctactaggcattgagaaagcactagatctaggggtgcctgggtggctcagttggttaacatccaactcttgatgttggttcaggtcatgatctcaggctcttgagatcaagccccatgtcaggctccaggctgggtgtacagtctgcttaaaattctctctctctctctgcacccctcacccccctatccacatgcagcgatgcacactctttctctcaaaaaaagcagtagctgtaattagtactactactgagttattattgctgtcaggctagcaatagtctcaaatccaagagtgacttttaagggatagttgtgtcagataaacagcccctgagatggccacctgctatgacttggttgcgggagtgggcgggggtgtggaacggtgacagccaggatcagaagctgaaggccgagagggcagcaggcacagaatccgacagctgcgagtgaggatggcctaagaagattaaaatttggtgtgtgaacatctcctggacctcagcaagagggcaggagtctggctgataacttgctgcagtgccggataaggagagctcgcctccaaatccccaagcccaaagaggagggccctggaggctgagaggctgtctggggacagaaatggtgactcggagccagcccacgagcacaggctgggagctggtccagccccaagatgtggtgctgggaggccccctacattgggaaggctttgctgcaggccggaggggcccctgcccagcgtataggcaggtgtcagagggttcaccacagcatgggccagagcggtacctacatctcctgaaaggcacaatgtcctgtggttaccacaaatgtgaggctcaatggccaggctttgtgttcagaaacggcgctaacacaggatgttgggaggatgggagctggctcacagatctgtgatattggctggctccagtttttacgtgcagagaaatacatttctatcttgttttaagcccctggtagttcgggtctctgctgtgtgacaccaatccgcagttgtcactaatagaaccagctgcagcgccaccatggctctgctgggacgggaagggcagaggacagtctctacagcagagtctctttttatttgttttctgtttactcttatgttacaacttgcttttttggatgggtaatatgggcacataataccacatttaaaaagcacaaaggtttgtcattaagaatagatttgggtgtaaaagagactgtcggttggtagtggctgaaaccaggtggatgtttctctctcacctgtaagtctggagcaagcaatccagagcatttctgcttcctgaagagcaaagggatccaggctccttccagcctactgatcctccacccctgggtgggtccccttctctgtggtccaacatggtggtcatgagagtggtgtcccatgcaacaggaaagaggccagagccaaggacacactagctgtcttttaaggatgattcttacaagcagctgcatgatgcctctacttacactccagagataagaacttaatcacataaccacaccaagctgctggaaagaccaggcaatgtagtcttctccgggcacccatgtgtgcaaggggagaacggatgctggtgaacatcagtcatacagaagaggtgcagtgaagagtctctggcagagattctctgggaagggacatcagggaactttctggggtgatgtcatgttctgtatcttgatggaagttggattacacaggtgtatacattcttcagagctctagaaatgcttcactcaagatttgtgcattttgttttatataaatatctccaaacattaaaaaaacaaacaaacttgtaaacaaatactgaactctagttaatgatgcacacccggcagtgcttaggggtggagtatactggtgcttgcaactactttgaaatgtaccaaaaaaataagatggctggagacatgtgggataaagtaaatctagcagaatgttaattgtagaacacaggtggtagatagaggggtgttctctatttgattctttcaatctttctgtatgcttgaaaattatgataaaatattggggggaaagtcccccttacacccctctatcctcaagccaccaaatcttcctaccaccttctcttggatcccactggcaacagcctagacaggtgctaacataccatctacacagcagtctgtcttatccaattccagcctggtgtgtgggctgtttgcgcctgggtgaagagaaaccctttgatcaaaaccctcctgggagctgctgaccactgagctggcccaggcaatccaaaaaggtggcccctctagagactccccctcatcccctcaaatccctgtggctttctggctgccctccagcctctgtcccaccccccacctgttcccaggagtcctatcagctctggtcctctccctctctcagccccctctctggttatcaccacctcttcaagagccttcctgccaccacaaagccttgtaaaatctaggtaattccttcccagtaccgccaataacccctcctgcaccctccccgcccccaacttccccaacaaaagaggatgaatcctcttttgcttcctgggtctcttggtccagatctctccttcagcctcttggcccctggggtttcctgccccgctttctagctggtcatcccagggacccatcgcacagaggagagcctctgcttggggctctggaagggtgcctcagtgatgagggaacagaggactggctgaggacaaaacacagcccggggcagcacattgacaagttcttgaaacaggcagagggaccttcctctacagactcaactgcctggatattcatactttgctaaggactaaaggcaatctcagcccgacccccaggatcctgtaagtctactttaacatgtaaaaattcctttatctctaaacccccatatacatgttggcaaccatcccccatatccatctgaaggtctcatgactcaagttttattagacggtaataagtgaccttttcccaacaacagctggccccctcaaggttctggaaaccttgcttccaaaatcccttaggcacttaccctatccttaaccacctcccaactcccaggaatataatcagccacctctcatgggctcagggcagcagctcttcctgcccatttctgtccccctgctttaataaaaccaccattttgcaccaaagatgtctcaagaattctttcttggtcgtcggctccagacctcacctatattgcaaaacttcatcactcagggaggtgccattcaggtgagatcttgaaagaagaccaggctgagtggatggcaccagtaaaggctggaagtgcaggaaagggcaggttcaatcagggaacagagatgaggccagccctgccatggtgatgcctataggccgaggagggaaaaacagagggacccaaggccccagagtgtgggaggccagggccttgaggccatgcaaaggaatgggagcttgctcaggcagggagggcagttatggggtggcatctacctcctcagaagctgaagaggacagagccaccccagggccccagagccccaggccttcagggagtggtgggacgtggggatagcggggcgcagaggaaaaggcactttgacttctgaagaaagggctttgccgacttcccctccatggggggcgtggcaacctcaggctgcctccctgtgaggctggaaagacgtgttcttcatggactttcctaacaagaccctcaagccctgggcctagagacccaaccaggtattgatcctcccccagggtttgaagaaaagcctcactccagcttggggtggctgagggcactgctctgaaatcccagccccctacctccctttccctcctcctcccaccccaccagctccccctacccttacccagctcccagctccagcctctgctcttcaccccagaacccctcccccagaaagccctacctgaccctcctcccacacaccaccaccggggagtgggagtgggagccctttctccatgtgctcttctgtgtgagctttgctccacctccacacccacctccgtgtgttgcagctcctagtttaagacagggccctgggatccctggggggttcagcgggttagcatctaccttctgcccagggcgtgatcctggagtcccaggatcgaatccctgcggggagcctgcttctccctctgcctgtgtctctgcctctctctctctctctctctctctctctctctcctgtgtgtgtgtctctcatgaataaataaataaaatcttaaaaaaaaaaaaaaaaagacagggccccattagctgtaagcaagttggtgtgtgcgtggcaggtgtggggggagcggtttttccagcttctgggtggccgtctttcctactgtgccctaaattcactggtagctattcagccatcacttcaggtttgcaccctgctggtaaaatggtctatctctatgcttcctttaaaagaggacacagctggggtgcctgggtggctcagtcggttaagtgcctgccttaggctcaggtcatgatcctgggtcctggggtggagagtccacattgggctccctggtcggtggggagtctgcttctccatctccctctgctcctccccctgcttgtgctctctctctcaaataaataaaatcttttaaaaaataaaataaaagagggcacagctgtcacaagtaggatgtaaagatatggatgggacaagtggttggagttcagtttctcggtgctagattggagtggggggcaaatcctggaactcacaacctgcagatatgactgatctagagagacaatggcagcgtgttactactccacgtttccttataaggagagggggaaaaacacagcggaatattatgagttagagagaagatagtggcaagactcagggaagttagggctcagcaccaaggttatgggcgtgtttgttactacagcataactgcacctatcctgacaattgtgggatcagataggagagcagcctctgtctcccctttatacaaagagaggtggtcacagagacacagggcagcatcttcagcctcacagcactccccaatcaatcattcaatgagtatttactgagcatatactgtgtcaggcatgttctaggcactgagaatgctaagtaacaaacaagagttgaaagtccctgccctcatggaacttacaagtccaatagggaagacatgaacaataaaaaaaaaaaaacaaaaacagatacatatcatgtttttatagcactaatgaaggaagaaaaagcaacaccagaagatggaggcctagggagtgtgtgctattttagatggagtagtcaggggtgcctttctgaggagacaacatgtgagcagaggctagaaggaagtggaagagcatactgcatggttatctggggaaagatgggtccaggcagccatgatagcaggtacaaaggtcctgaggtctgcttagcacttggtatgcatcctggaagctgaagctgggaccaagacctagctcactcgctctcacgctcactctccagcagctaggaaggacaatattggaccaggttcaagagaagcaagtcaggcaggctgccctgggacctccttcctttgaatccccccaaaccccagctctggatgccccctgccagccctggctgccctccctacgtaacaggtagccacataagctgcttcatgccaggaatccagagcatgccttatttgcaaatgccataacgtctgactacctatcatgactctccccaacctggatgcgatgagccgggaaccagacaggggcaagtcctgtccttgcccacccttacttaggcagcctctttattgtacaggtgtgggaggaaggaggaaaccttgttggtatatgtcccacccccaacccctgagagcaactagcaaatgagggccctgcagagagcttggagcttgtggctataggcccagtggaaggttacaaggttacctggaatgccccaggtgcttctaaatgatgctactttgaggccagtgaagctgtattccaagcaggccatcagggctgagccatgaggtcatagggccaggctgtctgggcttgagtcccacctctgtccctcactagctgtccaccttgggtgggttaattaccctataggtacctctcccctataaactggggatggtaacaacagggttagtgcagagctaaatgagataatatgtagcccatgacaagtgctatgaaaatgttttttaaataaaaaggaaagtgcttagtaaagtgtattttaaaatcagtctcttccatgtaattgtatttaaaatgttcagtaagaaaagagtttgccccctttaagaataatctggggagaaactgcttctgtcagcacaaagtcagtgattaggaaccaaagcaagagttgccaatggtttaattagttcttttcagcattaaagccaaaccctcaggtctgcacaggtgggtctgctggagtggtggcagcttggggagagccagcactccccggtttgaaggcacctgctggcagtgacctgccacccgagcctcagccagcgggcagaactgagctgtttgagcccaggacccgtggtccagaagctcagcctataggcatctgaccctcaacagccaaggaggccaaatgtgaaggggactgtaggtgcccgggcttggaagctgagtgatagaataaaatataagtgtatcaagagaatggaaagtctagtgataacaagaggagtatgtcaacaagccaccagggcctggcctgcattatctgttcaaactttctggacagatgtcatctttctttttccagctctttgattacaaaggcactttcagtttgcgcttaatcggaaaaaaagcatgactggagggaggtgggcctgagcctggtcctttctagttctatgcccacactggtggcatcagtcttcccttgaggccgaaacaagcaccaattattatttactcagcatctactgagtgccctgcaatgtatatttttcactcttcacaactgctgctccacactcaggcacactcccattgccatctcacagatagaaagacactgtaaatggctgctctgcaatattgcccacagagcaggttttcctcaagagtggtgttcagaggggatccctgggtggctcagttggttaggcgtctgccttcggcccagggcgtgatcctggggtcccgggatcgagtcccacatcgggctccctgcatggagcctgcttcttcctctgcctgtgtctctgccccccctcccacccccgcctttgtctgtgtctctcatgaataaataaataaaatctttttagaaaaaaaaagagtggtgttagtgatcaggacggtagccagggtcccggctgcccatttctctccttagatctctccatatgtccctttccttctctcagggcctcatccctgggtgtccctcggaggcgctgcagccaggcactgaacttcctttgagcaacagcagtcacagggatggaagttaattcccaccaagtgccaggatgcagtggaatttaagagaagtcaggatgctagaagaaattaaggaagatattcataaatggagagatacaccatgttcctggactggaagtctccatatgggtactgtcaattcttcccaaaatgatctgtagattcagcacaagccgagtcaaaggcccaggtggtttctatggaaatcgacaagcctattgtaaaatgtatatgaaaatgcaaaagacctaagataaccaagagaatcatgaagaagagcaaagatgaacagcttacacaacccggttttaaagttttctataaagctatggctattaagacactgtgatattcatttaagggcagacaaatagactaatataatagagagaatcccaaaatagatccactgatttataacaagggcactgagacatgaccccaaagtatgccactttggcttgaagattttatatatatatatatgaatttatttatttatttgagagagaatgagcaagaaagagatacatgagcaaggggagaggcagagggagaaacagactccccactgagcagggagcctgatatgggactctgggattatgacctgagccaaaggcagacgcctaaccaactgagccacccaggcatccctggcatgtagattatattgaattgaaggcaattaagacacagcggactcaagaaaaacttttacttctcccttaactactggaaaggatttgatagggagcgtgagtcacagagctattaccagagataacttttatctgaaggacctacttctatgtcagggtaaacatctaatcaccaaatatctgccttccttattgccctgtgaattaaccttctccccttcaaagccctgggttcctaaaccattcctaagcacaggacagaatcttagcctcaactgcccaactggcccttgggtctcatatttttataggcctcccacatgtgcacattttttaaagattttatttgtgtatttatttatttgagagagagagagagtgaaagcatgagtgggggtgggagcggcagaaggagaagcagactccccactgagcagggagccagatgcggggctcaaacccaggaccccaggatcatgacctgagctgaagacaggtggttaattgactaagccacccagacctcccaatttgtttttctcttgttaatctgtcttccatcaatttaattactagaccagccaaagaacttacaaggatagaaggaaaatttttcctcctcaatgacaattcagtggagaaaggattgttttcaataagtggtgctggaccagttggcttatttggatcatatagggggataaaagcttgactccctcatactataaacaataattaatctgaaatggatcagagatctaaatgtgcatggtgaaataataaagcttctaggtaaaaatatgagaatatttgcatgaccttgggataggcaaacatttcttacacataacacaaaaaacaactaatcaaaaaagaaacaatggggttcattgaaatttgaaacatctgttcatcaaaagacaaccattagggggcccctgggtggctcggttggttaagcaatgaactcttggtttcaactcaggtcataatctcatgggtctgcatgcagtggggaatcttcttgagattctctccttctgcccctcccccacttgctccctctcacctctctctttctctctaaaataaataaataaatctctccactttactggcagaaaaactgagacccagagaaggcaactagcttactcaagagtgaagccaggactcaaagccaggacctcaacttcatcaggacctcaacttcatcaattaaatatctatttcactcaggccagcaactccccagtcctctactggaaaccgctgagagcttgaggcccttctgcccatctcaacatctttgtccctccaaatagcctcgtcccatgataggcaccagagggaagaaaagggctagagagggggcaactggggacagaggggggactcacctagtttttgatgagaggggctgggtgtgtatgtgccacttgtgtgtgtgttggggctgatcttcctgttgaggcaaggcctggagggctcgcttgctgagtggaaagcctgagggtgctctggccagcctggggagatcctgagacctgaaaaccctcctaaagccttcaaaggcattttttttttccaaaagggaaactgggctgttgccacgtcaggctgagccacacaaaatcaatggtgcttgctaatgaggagccactgtcagtacgagtgttgatctgagcaccccagatccctccagttccatatgtgttttgtccaaaacccaggccagccccattatcctgcttcccagtcccactcgtccactaagggtccctctggagatcagagcagaggcaagagacgtcagaggcagcaagagtgcttgtaggtggaaatgagggaacacaggagctgagggctggggaggccatggcgagtggccatggactggtaacaagaggtgacctccgtgcccacacaggtgttctaatcccaaaagactaaacacagaaggaaatcatgagagactttcttgcaggaggctgggcggtgcggggctggggctgttctcagaggacagagggaacaggagagacagggctggggtcagggccttcctctcacataaaacatggcctaaggtttgaagaacaaaagctgacacttcttgaagactcagtggcacactcttcaagaagagaagactcttcttgaagagtgtgccacccctcttctaagacttcctgtatctagatcagtgaatccctacagcagcgctatgagatcaatacaattattctcttcgtttcccagatgagctaacactggcacagagatgctaactagcattcccaagaccacacagcagtaagtggggaagacaggagtcagacccaagcagccaggctagcctgttctccaatatccaccatggtaggatgtgggggtccctctctcaacactgagcagcccatgcatattaaagtgcacaccactgccactgccgggcaggcatccagccacagtgtgcagcacacagagctcctgccattacacagatcccagtctagggggctccccaatgctgctgtggggggtctcccatcggcatgtaaatatgcctagggtgtctcaccagagcagctcagggttgaagatatatttatctgccgtcacaagcacgattccttctcatcctcagcctcaccccaatcttgcaggaaggaaggaggaaatgaatgaggaccagagggggaagagatttgcccaaagtctccaagccaaaggggcaagcagaaatgtgaaccccacacacaatggatgcggtctctcagaggcaaggctgtcggcttcctcgggctaggctgtgatcacagctggctgaacaggtggtggtgggttgaaagcaagttttggggtgctgttcaatcggtgaaccagccgcctctctcagacaccccccacccccccaccccccccacccccccccgccatggaaaacgctgcccggcgggtgcaggtgagctagcccaggcgggtgcgggcgaagcccagacagcgggggtggggctggggcgctggaaggctttgggggagcagaggtgcagctggagccgagctgggtgcggcggcttctgcggtctccatggcgatgcgggggcggggtgaggggagaaagacggaggagggaggcctctgcgcattgatcttgctccagtcagattcaatcccgagtgaaaatggattttttaatgcgtctattagctgctttgaaacgcaaattgagttcaggagagacggaggccgccagcagaaacaatttggcgtctgaggccctcagtgacaaggaacaccccagcatgggtacccgcagctcagcctcgatcggggggtggggggggggtgggggggggtgatacactggggcttttcctcctctccggtctccaggatttactgggagctgtgactacccagcgcttctacagaaactaccaaactgtggccctggaggaaagccagttccagggaagagcacgatccagggaggcttcctggatgaggcaggattctaagaggcctttgaagacacacactccacccatcctggggtcaggtaaaaaaataatgcccagcaacctttggcccagcactctacaacttataaaacgctccctcacttgctcttagcatagtcgtcttaaggactgcagagggcgggtgtgcaaactcattttgaagtaaggaaatctgggttggggaagaatgtcgttgccaagatcactcaggtagagccaaaattagacttccccatggctgctttgtgagcctggcctctctgcgtgccaaaggagctgcaggagctggtgtggggcaacgggcatggagagcaggggtcctgattggcggcgctgctggctggcagcagggctggcatctcaatccgctttctagagaggtttaggagggggctggaggaagcaggatgctgtggggagagatggaggtgccggtcagatacacaattacttctctccattgtcatttgctgtgtagggagacttctttgcatatgcaaatgagttcatcctcctacaattacacagtaatcagaagcaaattaccttcttgctgtttacttttagcgtccttaattaatctggttattagacgattaatgaagcttgtttggtgagaaattcatagaaaaagtgtgtgtgtgtgtgtgtgtgtgtgtgtgtgaaggggtgggtgacactgcatttatccagaaatagaggcggtccctgggcttcccctcaaccttctgagcctctctactgtcctctctcctttcctgcacacaccctaggcccacctctccccagtcctgccacgctcgtgttccttcaccacacctatgtggattggagagatgaccccaggatcctccagagtcccttgagggcatgggtcccaaataggcctggaggcaaggcagtgaattcccagagccactccagatccccttaattcacactccttgtattcactgccacccctgggctgtgcccaggcagtgttcccaaggtggccctctctcctctcaaggtacaagcaacctcctgcagcctgtgggccaggctctgcccaggtattacttagtgtgccccaaacacccacatactaggctgtgcaaccaccagaccctggctaaggggatactaggattatatttctttttttttttttaagattttatttatttattcatgagagacacagagagagggggcgggggcagagggagaagcaggctccatgcagggagcctgacgtgggactccatcccaggactccaggatcaggccctggactgaaggcagaagcttaaccgctgagccacccgggctgcccctatttcttttaatatttgaaccataaggccctacccactcatgttggtggcagttggacattcctcccaaggtacccttcccttggtagtctttgggcatcccaaggccaaatgtccatgtcccataattctatcctggaccctttgtgatctgactgttcctatctggctacttttaaggtcttctcttccctttggagttctgcactttttttttttttaagatttttatttattttttcatgagagaaagagagagaggcagagacacaggcagagggagaagcaggcttcgtgcagggatcccgaggtgggactcgatcccgggtctccaggatcatgccccggaccaaaggtggtgctaaaccgctgagccaccagggctggcctagttctgcactttcacatgatgtttctaggtctgggtttctccttatcgatctgcttgaattcatgcttcattcccagcttttgtctttttttttcatttttggaaaattcctaatcaatatattgttaaatatcacttccccagttctcccagttgttgctgcaagaatgcctagatgacatttgttaaatttcccattctatatcccatgtctttttcccacttgttcatattgttctttgtgtgccccataatagctaacaaattctttatatctattttccagttcactaactatatcttcaacagtatctaatctgttgtttaacctgtccattgagttttaactttcaacattatcactttcatttctgagtctttgttcattttcatgtttgcctgattttcctggaggcatctttatttctctaaacattttaaacaattttttaaaatattttaaaaaaatttttttaatattcaccctaatcaccccaatctccccaatatcttaagccttgaaggctaattctatcatttgttgttttccactgactcatgtatgattatttcctcatgtgctttgtaattctgtattgtaaggtcaagtttggttgagtactatccatgggaatcctgtacagcaggagtcaagggtatgtccttctcaggagaatttgcttttgcttctgccgaatgccccaggtactaccagcatacttcggcttaaattcatcatttggagtttcctggaacacatgggtaatgcaaatgcttaccctaaacatttgtgtgggtaggcatgtagttacaaatggaaaagctttttttaattcctgaagcatgtgctgaaatagacaattatcatttctctttgccactggatgggtattttccctctctatcctttcacccaagcgcagccctggcttttggcagaggtctcaattacaacttcccaccatgagtgcccacagactgtttctttcttcctctagacctttatttctggacctggaaaactttgttccacatgagacatatctggttgtcacagctggaggagggagttgctattggtatctcccgggtagaggccaagattgctgccaaacatctacaatgcacaggacaggcctcaccccaacaaaaaacaatccagcccaaaatatcaacggtgctactactgagaaactctgatataggtcatggagatgtatgtgcaaataacctgaggtctccttgcagctttggagctccctaacacccaggcttccagcatcctctttatgtttgacattctaaaggttttcctttcattcattcatttgaaagaatagttgtcattttagggagcacttctgggtgttctgtaaactacttgtcactcctgcctcattccatctatccacctctctaacatttgctgctctggctcacctctcattgtctggtaaccaccttctctatttctccccctctccctgtacctgtgtgcacctggaagccccaagaatgttactgaaggcttgggagaccatcaagaccatcctgagagggtgtgacatgcccaccagccccagtgactcttggggctcaagcccctaaatcctaccctcatggctcctgcctgattccataatgctgaggcctgatcccccagacttccaggtctcttcacccaccctgacccacagagagtgccctttcctcttcccaggccaaggcccaagcagttcccatagcaggaatattcatcttgtccttggagtctgtgttggtcttgtccactctggtgcctggtgcctggcccacagaaggcactcagtatggacctgtcaaatggatgaatgaatgaatgaatgaatgagtgaatgaatgaatgaaaggggcctagtttctggcccaggcaaggtagtcatagtaactgagcatagatttcccctagtctggattattcaatatctacatgacactgttgggaaagccacagtttagctgagttccccaaacacacatttagggaaaatggttctctaatgctttaagggcacaaccaggctagaaatgctcccaatttacacaacttagcacacttaacctgataaactgccacatctgcactccaatttgtggtgactttatagtttccttcgagaacaaatagaggtgggctctggcttgtttgtaaccacagggcccagcctgggatgaggagaaagtaaacgaagccagttccaaagccattagttcaccacctccgaaaacccaaactgcacacaatggcctcttcctggatgaaacaaaacaaggtctctgttgccctagcagtccttggaattccaaggtcattcacgccattcattcattcaacaaatgaatagaacatcttccgtgtggggggcactctttctggcattcaaagtttcatagaaaacagtgtagagtccctgcccactcagtgcttttgtccgcctccctgcccccaaggggagagacacaatcagtgtattgtgtgatgccagagagtgatggtgtccctgagggaaaatgaagtggggtggcgaggagcgatgggtgtgctgttgaggggcaatctggaaacacttctctgtgaagacaacttagttgaggggagctcaccagcattagggagaagaaggttccatggtgaaagagcagtacttaaagctggatactgagacatcctgagctagccaacaggatttgctgacacaccggatgaagggtagggattaggggtcaaggttgaagccaaggcttcttctgaccacgaggatggtggggtcctctattgagagggcagaggaggaaggtgcaggttgacagatgctcaaaggtctggctctgcacacgccgaggtggaggtacttggtaatggggttcaggacatactaccccaaaatatggcatattgaatattttaaactgaatccctttgagaaaaccgctttcttccctgaaagagatcataaaactctcatgtgagaggcactttcccacctggaggaaaggagcttccttatccctgaagacaaagcaatgaccagaagaaccttgttacgttcccatggtttgctgtacttccctcgcactttctaacccatcacatttctgtaggactgcccactcttcatcaaacctagcataaaaatactccggtctaactgtctctctgggtcttcattttttatgaagcctcctgtatcatgtaagacctacagtaaataaacgtgtatgcttttctcctgttagtatgtctttgtttttattttcaggcccagacagagatcctaagagggcagagggaaactcttcccttctctacactggcagagctgaggagtgccacagggggctacatgggtcaagctcaggtgcaagaacagggataaagatgcacatctgggagtcaaagccgcaggactgggggatgggggtggacattggagaagcaaaggaggatgtggtggcctgagagcactgaaacatttcagaagtcattaaatgtacacatcaggcccatcctgcttcaagctttccagaggccttctggctgcaatctaccaggtcctgggcctctctgtcctcacttccttcatcactgcccccaaatcactctgcaccagactcagcctccttgccagaccccttcccaccccagtgcctttgcacacgttgttccttttgcctaaaaatttcttcccctgcactcgttccctgacttcctttttcttggagtctcctctcaaaggcagcctcctcagagaggacttccctgactctccatgctaatatagacagacagacagacacacacacacacacacacgcacacacacatgcaccattattctctttcataggaccctgttctttgctttcagagtacttattacaaactgtaattatttctatatgagtgtgatgatttgaacaatgtctgctcctcttcctcttcttgatcataaactccatgagacaaggaacattacctgtctttcaccattgtgtacagtgaaatacacattgaatgataaatggctaaggagcaaaaacaagccctggttgatcattgcactacattctcaatatcataccagacctcttacataactgactgtggcagacgtcatcgctgctaaccaactcatctagtcctcttctccttctgggcacacaggattacaaatcctcatctccttggagttacatggggttatggaacctgctctggccaatgcagtatgagcagaaaggaatgtgtcactctcaggtggaagcatttaagagctattatgcaagttctgcatgtgctcttctcctgccaagaaacccttgtggggagatgataagggagcctccatcatctgtggtccctgagtaactatgacaggagcacggtcctctccccccttcctgcaagcaaggtacaaaatctttgtggttttaagcccctgagaatttggggccatttgttacacagcataacctagcccacctgactaatactcactgaattctcctgacagccctgtgatgtgcttcccacacccacttctcagaatcactcaaccaccacatattgatggagtccccactaaaagcgggcattgaccacacaaaaagaaataaggtatggccagcccctgagaagctttgtggtcttggttacagaagtggtcaagaaaactcaagaaagaggaatggaatggaggcacagtaggacttgtcccagaggaagaaatactaaggtagaatcttgacctaatggtgcccttgtccaagcgagtacaggtggaggtggtagaaggaatggcatccctggtacagggaccaacataggcaaaggtgaagacaagggtaaaaaagttaaaccagcatgatggagaatcagtggaatataggtgccttagttcaaggacatgccaagctgctgttagagagactgcaaaatataatggcttgaagacagaagctgagttcttccacacaaacagtccagagctgggtgctcctaggcttaaacttggctccaatctctgagttcaaggcagctgctccagctcctgccatcacatctatatcccagccagagggaaggggaaagcattaagtggggtgcatacccactcttcatagagatataaccaagaaacacaagttaccactcttcccttctagcaactccaccacccagttatccaagccaacctcagccccactttttcccctaagctaccctctgcaaccaaccaagtctctcctctccagctcctcacttttctccaggtcctcgcctctccagaggtgcaaagcagtggctgcctcataggtctcccagtctccaggccaggcccttccaaaccatcatccatatcatgtccatcccactttgtagttctggccaaatcactccctgcaggccacttggcagatcctccgaggccctcctcccctcacccttgcccacctctccagattcacttctctcctctggactgctcatctccatcttcctgatgcccctacttggctcctcctctcaaatatcatgttatttatcacctctgtctctttgctcatccctgaaataatctttcctgcttccagcttacagacctctcatcctcctgggactggctcaggtgctactcctttaggaaatagactcaaagatcctgaactttggatgcatggacctactttcccccttagttcataattatttcttcaagctagttgctccccatctctggtaactagcagcgaacctgggcgcatggcagcactcaggaaacaactgaagggagaaatggatggtgggcagaagccagtgcagattggaggctaagagcaagccccggagctgcaccatctaggttcaaatcccagctccaccatcccctggctgtgtgcacctgagcaagttattttaacctctcttagcctcagtgcctccacctgtagagtgacaacaaaaccagtactccctttatacagtctttgcaaagatgaaacaatgggcgttgtatttagagtagtgcctggcactgagttagcccttcttgttattattaggccaacatcactgaggaacctctgataaaaatgaatatggaatagcatgagcatatctgcatcttagaaagataggaggacacttccacttccaaccaaaatgaagtagcagggaccagatttactttactgtctgaaatagcaacataatgcatgaactacatggaaccctggttctcaaatattggatattaaacaacaaatgacagtggtccttgagacatgagaacaactgaggtgagctctgcaattgtcccccatatgcccagagatagcttccaggcgctggcatgaggagaggggacccaggcagaccctggagtctcctatgtttgggcagacagagaggccaaggtgggtagagttcacaggtcagaggccagggaggaaacagctacgcagagagaatcccaaagagtcctccctcaagagttcagctgaatagcaatcatgttccagcaggaagcactgcagctgtttagagggaacgatcactaggattataaatgccccaccagccagagcaggaagcttagaggttttgcttcatagtgggacaaaacgagccctgactaaatgctgttctggccctccctaacaaagctggaaagcaagacctgaaaggactgaatcatttccaagtaacttaaccacactctgtacaaagctcaagcatatttatatgtatacaaaaataacccgcaccctatgagataaaattcacaatatctgacatccaatatggagtgcctgggtgactcagtcgattaagcagccgactcttgattttggctcaggtcatcatctcagagtcctgggattgagctctgcatttggtaggaaatctgcttaaggattctctcttcctctccctctgcccctccccatgctcattctttctctctctctctctcaaataaataagtaaatcttaaaaaaaattatccgttacacaaagaaggatgaatatgcagcccataatgagaagatcaaccaatcaattgaaaacaacccagagggatccctgggtggcgcagcggtttggcgcctgcctttggcccagggcgtgatcctggagacccgggatcgaatcccacatcgggctcccggtgcatggagcctgcttctccctctgcctgtgtctctgcctctctctctctctctttctctctgtgactatcataaataaataaataaataaataaataaataaataaataaataaatagaaaacaacccagaaatgccatgacattggtagacaaggatattcagtattgtaactgtattccacatgctcaagaagccagaggaaaacgaacacttaactggaagacatggaagatatgaaaaaaacccactcaaacctctggagatgaaaactacgtactgagatgaaaagtgcactgaaaacaattaacagcagctggacaccccaagacaaaaaggttagtgaacttgaagacatagtaataaaaatatagaaaatgaaacacaaagagaaaaaaggcccaaaatgaaagactagagcatcactgcattattggacaactttgaggcctactgcatgtgcacagaagtccctgaaggagagacgatagacgggaggacacaaacagtattgaagaaataatggccaaaatcttcccaaatatgaaagccgcaaagccatagatcccagaagctccacgaaacccaaacacgagaaacatgaggagatgccacaccgaggcacatcgtaaccaaattgcttaaaaccagtgataaagaagaaaccttaaaagcagccagaggaaagagacattatatacaaaaggacaaagatcaggattttgggcagatttctcccgggaagcacagacgccagaaggcagggagcaacgtgtttaaggaacagaaagaaaggctggaaccccgggggcggggagtgcgcgtgcggaggcttgaagtccagggcggcagggaccgcggagacttggggtgcgaggccgccgcaggcaaggggcggggctgctggcccgggaggctggaggctgcggatcaccaagcggaccgtggggcagggccacatttcggagaggctatggcttgcaccctggaggattctgagtgactagcacggtgcacagaaggtgtggtggctgggagagcgagataaatttggcaggtgcccgatgatacattagtcagaacaggaaaagctagaacttagaaacaaatcctgaaatctcagcatcctaacagaaaagcttattttttattcatgcgaagttcacagggggctggcagaggataagctccgaccagtgagtcggagaccccggcgccctccacctcagatccgccgtctgaacccacgaggaccgccgcggcccccgcgagagaccgggcccgggacacccgcgcctgcgccccagcccggaggtgatgggcgtggtcgcgcctcgccgctagctcattggccagaagtgtcacgtggcctcagcccacctgcaagggacgctgggaaatgtgggggacgaatgtggaatgtcgggcacgtgctgaggctgcgcggccagacgcgagggaccccggacttttgaggagaggggaagagggcgtggaggtggcctggagcccccgagggagccccggcgtttgaggaccgaggggaaggaagccctaacccaccggggagggcgagcggggccctggagggtgaggcagccaaggctccagcgcaggcgccgggcccctccggacctgctgtgtgtccactcggaggcctgagagcgtctcgcgtgggtactgttaactgcgttccacggggtcgggcggccgagtggccgagtcacggtgacctggcggggaccagagccagggtcttccgtcgagctccgctccctgctttcccaagggcccccccagaagggacagtgtttaccaggagaggtctgccggcgcccccgcccgcccccgagaaccgtgcctccctgatttcccgggctgaccagggcggtggtgaggagggtctttcccgggtctcccagatcctgacgaacttcttgacccctgggcctcggtttcctccactgctgctgtttgatctgtaggcccggacaccacactgtggcagagtgtagggctggcaggctcccccggactcgtcctgctccctgagaaccccaccactctccatcctcttcccctgccccaccatcttaacggagccccctctggtcagagacgacccagactgggaatgccaaaggccctgatttgcatacacaagctcctcccccacctcttggtgtgtgcacagtcgccatagcaacatgcccccaagactctcttttgcagtcacctccccttactgtactgctggaatgctggctccctacccaggctcccagggctcagagctcaatccctcacttcacggataaagaaactgaggcccagagagggaaagcaagttgcccgagattgcactgtgagttagcagcagagccttatgcagattccaggtctccccattccaactctaggatgcctgtcaccctgagcgggtggtgggggtcacctccccacccagtcaccagtatgatacattcaggctcacctcaggcctctggagaagaccttgggcagctgcaatgaagaaatgatcactggactttgggcagagactcagagatagagccaagcactggggattgtggagggggggggtgcagctaagtaggtccctctgggtctccagcccctctcttcaccccctaactcattcattccacaaatattatatgcctgttatgtgtcaggtactgcgctaggccctggggttcaactgtgatcacgctgaccaaaactccctgccctggtgggctgacactcctgtgggaggttgaagatgatgaacaaagtacgtgaacataatacaatgttgggttgatgtgggttcagaaagtggtgaagggatcacttgctgcttgagttaaggtaacctgcatgttctttcacggcttacctgtcccttattctatgcctcagggcagccggtgtcctgacacttgactccaagatgattgccgaccaactgatgtgttttgggcaaacacaccttggcccatgagtctgaggctttaccaatagaattttcagtggcatagggggcagttgggaagatgtttggggtgagtgggctccccgatgtgggcaactgcctttcctgttcctagcatggcctgtagattcacagtcagatttcagaggcccccaaaagattgctggcctgccaccactcgccagcatcaaaatactgactttagcggagttcctggtgtggaaaaacagcccttcacctcatagtgagaaagaacagcaagtcacaagtgcccctgagagcagattccagataccaggctctgttagcagaccctttcctgggagggagttttatctcactttctgcagaaattttcaaacatgtaacaggagagtagtacaaagcactcccaggtgcctatgtgcagctcaggaaacatcaactcctggccactatggttttagcctgatccccttcctgcccactggaatgctctgaagcaaactggggctgctattataaggaaaggagggggagaacaggaaggccctcccaaccaaactgggaagaggaggaccccagaagtgcaatccaggcaagccaacaaggctcagggcgtgatcctggagtcacgggatcgggctccctgcacggagcctgcttcttcctctgcctatgtctgtctctcttgaataaataaattaaatattaaaaaaaaaaaaaaaaaaaaggaggcagtcttgggcagggagtaccagggtggaccttgaagctgaggaaacccaggggtagctgcatccaaaacaggggctcctggttctgccaatggggtaaaggagcctggctgtgagcaccaagccccatttcctgccccagtttcacctctttgttttctttccctcttcttccccctccctcgccccccccccccgcaataaaaacataattacgggctttataaaaaaaaaaaaaaaaaaaggcaaattatggtgacatgctttaattatctgccgagcaatggtgggctgaattacacaggcagggccttggaggttacctaaaaataaagcaagaagcctcattaaatgctaattgccacttttgccaactgaagtgagatttgggcaccatgtgccattcagtgccaggctgtctgcagcgaggtccaaggcctgggaagctcagagtgccagggccaagcctggctgggcacccagggcagtgcagggcagatactaggggcagagagaagttctcgatgccagggagagtgccccaatctccccaggatgttgagtggggagatggaaatccaggctgggaggaggaagcctcaggcctcagagcatccaagagaaagggcccacggcctgtcctctgcctagagaggagccacagagcctcctggaagttgagcatcttcctgtgggctcctgacgactgctcctcggacctggaggccgagatggtgtgggggcctccaaatgttcttggtataaaaacaatcatgcgctacatggtgctaacaggccactttctggtcccctttgcctctgcctctggggcttgagaaagcaggatagaaaagcaggttttgagacattggaaaccaccctccccccatgagctggaagagacccaagctggtatatcacccctcaagctaataccccagggaactaggagttccatgaaggtgtgtcctgtgtgccccactgacccggtagcttggtggcctcctgcccggggctggtagcagcccagtcttggctttgggccccaaaaactctttagtgggcattgttccctcttggctgcagaaaccccaaagtctggtaccacatctgtcccattcagtactgcgtacctggggcctggcctgcagtaggtacttaatacctgttgaatggatggctaaacatgaggtctgacagggtggccaatttgtctagtttttccaggactttcctggttttagcactgaaggtctggcatcccaggaactctgctacccatccccaaaccctagtcccttgatgaccctaggcctgaatgccacctcctcccaccccccaaacacacttccaccatacacgttggccttcttacactcagtttgaagtagtggtcctcaaccttgggcttgcatcgcagggacatggaaggcctacaagacagagtgcagacagcacccccaaagcttccaattcagcaggtctggggcagggcccataatttgcttttctaacaagttcccagagatgctgattctgatttaaagaaagaggtctggtgttagaacagcttgaaagccactgatttacctggcctgctgcatggcccacacctagggagcttgtaaaaggtgttgtccccagcccacccccaaaggagactgcagccctgggtagccaccacaactacctctgggtctctcccggggagcctgaggagaccggatcatccctcatacagaacaaaggtctctggggggcaccagccctctctccaaggagcctggagccctgcaaccccacctccccacccccagctatcttactgaagtataaaattctgaagaccctactcatctgtccacctctcctaggtgtcccgcatgagcccgggggactaatagcagggcatagggagtaaaggggagcagccgtgggtctttcccacccatgcatcagaataggtcccacccaggcctccctgtgggatcccagccctggcttcactggccaggccttctgggtgatgggtggcacccaccctcccacactgctatagcacgtctgactcccagaagtcctggggagactggtccttcccctctccctacctcagacccatggagcctgcacacctctctagagccccctgacatagccacttagggttcacaccccacccttggctccccgcttaacccacactattctcataattatgttactttgggatagtcagcatttctgggtggtgggaatatgctgggggccgttgtctctcccatcagactggaagctccgtgagggagaggctgtgtttctccccttagggcagtccttgaaggtggggctgtgtctgctccatctgactggcacccccttgagggcagggcctgtgtgcttcctcccctttcttcctacccctttcttagagtcccagacaggctggatgaggccaaggctcaggaatgcctctcccagctctaggtgctgaggggagcagaggaagcagcaccctccctggaaagagggtgattctccccgccggagcctagaataggggctccacggatgtggggagggcccctaggaaagtcctgggctgaacagcaaaccctgcgcctagctttgggcctcagcagggcaatcaccttgaggggaaacagaccagaggggggacaaggtgcccaggctgaggatgccacactccccttctccatccgagccaccccccagggcgcacacgcgctgcccggggagctcctggcaaacacccctggtctgacaacctagttttgcctgactgggctggagcaccggctacaatctattctggggtgtagtcttaggaactgtcctgcgaaagcaagaccaacagtgagaaacaggctcttcccccctccttcccttacaaatactgactgagcggaacgcagctgctctacacacacgcagtctcacagaccctccaggggaacagatttcctgagcagaggtgcgtgtgacacccatcctcccccaggagtacgatgggctcagccaggggcactaccagaggcacaatccagtgcaccagcctcacctctacacactcccccacacccagtcccagcctggctcccacccggagggggggggtccccacacacactcctccgcacttcagtcagctggcctgggaggtgggcaggggtgcggggctgggggtgggggcgccaggaaggggcgggccaggaagcctgggcttcagctgctgcctgtggcctcattgtgtcaccggctctgtaatttacccctggcagggcccagcccctccactgcttccccttccccacctcccaacctgccaaggacgccagctgctgtgaatgcacactggcacacttgccgccggccagtgacagccatcctcacgatgtgggtgcagtgtggacaagcccccctccattgggcctaaacagacattcacgctacacagacaagcacacctatggaggtgccaggagcagacatgcagccaaaatagacacccacacctgtgtcacacccctggctcacatggacacacgctacactccaggctccaggacagacacacattgtctcagcacctgtaacctggggacaggacaggcagcaggggagccctggaagccaatttctcaagaggagaggctcaggttagaggctgcgggtccaagtcccgttgtgaggagtgagagtcaggggagaggcagggcagaaatggtaccttcctcaagggctgcagggcaggggacaggaatagaacacccccccttacttagggaacctccaggggcagatttctggaatctgttgcaaagccctggtccctccctgcctggggcctctccatgctcccactccctgccagccccggaggcagcctctaccaccccaaagccctaggtctccatcacccactttctccttgcctccaattccaggctctcctgctgaaggttgagacaggggtccccctgcagcacccccagtggatgtggagccagggtgcaaaaccatgtgtttatttttattagaaatgttcttggtataaaaacaatcatgcgctacacattgtcatcaataaccatcaccagacacccaggcactgaactccatgtcatcagcaggaggggcaggcgggcaggcgggcaggactcacggcagacaggcgagggcaggcgggcaggctgcgggccacagggacatacacaaaggccaccgggaggacgcggcacttcgcaacacactcgagatttgtttttgttttggcttttttgtgttttgaaatttttttccttttttttttctctttcgccacaagtaagagtttgtgaattggaagacagtggcagggaagagagcaaaggctggatgtaatgaaggcgaggagggggccgaggacaggaaagaaaaatgcacgagagacccgggtagagcacaagagaaaaaactggagaggcctggagacggaggatgcacaagggagacggggcagaggcagaaaggaaagaagatagggaaaagcagagcacacaaacaggtggagacacagcgaggaaaggcagtgataaagacagggatggagacagactgggacggtcaccagtggaacaggcagagacaaagggagggtgagaaaaccagcattggggcccactcggtcggagcccctgtgatctggggctgggaggggccgtggtccaagatgcaggctcttggggtggcctgaagctgccctggccccttgtcctcctcctgtcacctgaccagcttgcccaggctgcccagcagtgaccgctgggggctctgctgtcctcagcaccaagccacgtccgtgggcgctcacgggcaggcaagacatcagctgggcccctgggagtggccctggcccgacgtgtcagccacaagggtctcgggtcctcctcctcttgttcggctctggcggcctagctagattgcatggttggtgtaggtgacgtaggtctgtttggtggccagtgctggaaggagagagaccgggggtacccaggtatcaggggctggcttcttcaaacacccccttccacacgggcactgccctgcccatggcatcaagtccagattccaaaagcaagcagttcacagcccctcaaactgcatggtggccccccacccatcccattgcttccccctgctgccctcctcccaccctgggtccccacccccagcaccaagttcccctatccctggactcgcccagtctctgaacatccttcccacctccacacctttgctggggctttagttggaacatcccccctttgaggactccctctcaaccctgctgcattggtagggtcccccaaaacccaacccccagtgaagcccctgccacctcccgactccaccacactcgaggagaatcatttttatttgatatatatagccttaaggtattatcaacagaagtttttcaggtcaacagcacacattctggaagagcacatgcgaagaacagacatgatacgtggcctggcagcctaggggaagggagtagccagctgggacagagggaatgaatgatggaaccagagtggggggctttgcgaggctagacaccaactagttgaccagccgggccctctgactaactcagcctccacccctcactcaaggaaggcggaaggcctccaggttccatcaggcctcagtgtggccaacttcccatttctgagtgcccctgtctccccccagccttgagtctcccctctctgcagccgtcggctctggccctcactcagccaccactgggaccagggctgcatgtctgggtaccccttgtttcccggcctcggccccctggggccctcctcctcccacccccacagctgggtgacaatgtcaactcttctgggaagcacgagtctcctctacctccatatggctggggctcaggcctcacagcagcttactgacaaggccaggtaagtgccaccctcctgtgacaaatgaggcactgagaggccagaggggtgaggaccctggccaggtccttggttttgtcctgtccacacccagagtttccctgcatggcccaggacagctcagtggagacaggattgctgcctggggtggaagctgggggctgagtgccggtgtgcagaggaagctgggtgggagacagtcctggcgcaaaactgccctgacgctccatcaagggcctgtctactcagaaaaggagtgcatccaccaggcttggccagggacaccaaggggaacagtatggcaggctccggtcccctttaccccatttttgctggacgcaggacagcagttaaggctgcatttcccacactccccacttgatgacattcctgctaatggcatgtgagtgaaagggctgtgtgcaaccagcatgtcatttgataaaaacaacctgtttctcctatacttcctctcttctgccttctgtgagcagaacagacacagagtgaccagcctcagcacaaccccctgggagctgacggagcaagatgaagaaacccggttcctgatcctgctcacccactgcacccgtgtagctggaagcccaccaacataggcagggtgctgggcccaactcccagagggcccatcaagtgtggccagaagcaaacttgtcggggtggggtgagcagaggggtacaacgtagggccaatggggcagcacaggggtggcatggagtccaggtgcactaaaggaagaactttctcctgcgtggagagggtggccctgtgtggtggctcagttccctacttgaaatattcaagcagaacatgaacaatcacttggctgggcagcagccaggaagttgcgagtctgcggtgccacccggataggtacaatgggaggagacgggcgctgcgacttcagaagagggtaagagcccggcacctcacagtgtgccaagacgtgcccccttcgtttctaaaatgacccatgtgcctccagggtgccagctgaccgggagggaagaaggaccatggacggggctgtttttgagaggggagcacccagaaggggactgggctggcacacttgggcacaggagccaggccacgagggtagaggtgctgaaagggaggcgggagagtgcacagatcagcactctggggacagaagcctctagctccctccctctgtgacctctggcagctcctgccctgccaggcctcagtttccccacccacgacatgagagcacccttttttgcccagacttctttccccaaggggctccccacagccccacatctccaccctgctctctccagcgcggtcagaaaaagagccggctctgtgaatcacgagctgcaggccaggccggtgagaatcagttccccagggctccatcaccccctgggtgaactgataaaatggagtttccaaacctgtaaagccgtcagcagctgtggctcagaggtgaaggaacactgcagcagaagcagcaaaacctccaccagctgcagggcaacgggcacccgagggcaggggcatcgaggcaggcaggcaggaggagacaaagtggtgaggaggtgtgggacacttgggccctgctgtccctctaagaccagagctgtctccaacagaaaatccagtccttgggttccagaacctggaagcgcattcggccctcagctacaagccaggggccccagagtccttcagcggagcttcggtctcaccatctggaaaatgggagcagtgagtctgcccaggccccccgggagctaactgtgaggctccaaaggaagcactctggccgggagtcaggagacttcgggtccaggcctgccttccccagtatgggggatctcagcacctgccaggtggcccttccaatgaattgaacctctcacagcctcgattccctcatctgtaaaatggggtcataaacctggctggctctcagccacagggtggacagagttactcttcaaagcttgtgaagtggtgggcagaggggcagggctgaagtcacagcaataaggacagggtggggagagccacacttcaggggcttccccagcctggagggagggacggggtgtacgagccaagagccccgacccaccccttgccggtgacaggcccctgctggtctgcagtccctgccgcctcagataacaattagccgggcggcagcaagcacaagcggacagcccccatttgttgccctgtgtctttgcgccccatcagcccacaatcgggcccctgaattatttattctgttgtttgtttaaagatacatggcctgccagtgacagagtgaaaaatgtccctgctccacaggagtgacatctccccactcttcctgcttacacccccccagtctggcatccccagaattaatcacctggctcccacccagcacctccacagcccctgttgtcgccaagctaaggaacaggggatgaacgaacctggcctctggttcccactgcagggtggaaggagcaaacagctctcatccttcccttgcagaaagtggggcccggaagactgcatctcccttcactgtgcctccactgccctccttgtctggttaggggcgggtggagtgggaaggggcataatcctaccctgtacccatgtgaccgtgaggtgccatcagagctgccagggaaggacctgccctctggtttcccctggccagtgacagcaccataagtgtcaccctttggggttagggcattatgtccagtgagactcccctcccccatagcccccagagggctaatgctccactctgatgggccctggagcagagctcatttgacagacccactcccgcaccagcagaataaggcatgacagatgaatccaggaaggataaagctccgtgggaaagaggaaaacggcagtcaggagtgtggggtggggagcagtgagggatccctgcttagaacagaagggtctgcttaggggctacatttggggtctctgcagatctagacacaaaaggccagaagaggggagtcctgggaggaccatgccccttcccatctcagagtggaaggcccagggggcacctgaagggagtcccagggctgtaggttcccaagaagctggtggtccgggaggaggagcaggattgaagagaaccagaggtcctctggtagaagatggggcagggaaaaacaccttgtcatcaggatgtcaaagaagggggcatgtcaaagccatgtatcctactccacacagagcatgggactccagagatagggacgccatgtgaagtcggggtcaaaggagagacagtgtggggccagccagccagccaccgccttgctgtgtgacctcaggagagtcactcatcctctctgggcctctgccagggatcaaacctctagccctatcctgacctcacaggacagctgtgaagatcactcaacaaggagaggctttgggagtgaaaaattgtgtgtggatgtaggaagtgactttccttctttccacagatggcagtctctcaacacgtgggggccgtgctaagaaaggaagagaagatgcttccctggagccacaaggcggggagcccatgagaggtgctgcctcagccaacacacaccagggaggccaggtctcctgttctcctgacctcctggcaggtgaccgtgggcctcctctctggagcctgtgttccagaccctcctgtagtctagcccatgtcctcctgctgccatcaacaatgtccatttctggccttctccccaggacaagacggaagagctgagtgctaactcccaggtcccgctgatggaaagtctggggcgagggggtcttctcctccctccccaccaataagagccccccaggactttcagagagccgaggaggcaggagaagctgccactcaaactatttggacacttggaggatgtccagggagggagccatggtctcagtggggcggggatgaccacagccacccccaccagagcagctggaagtgaggcccatggaggtccaccccacaggcaggagatcccatggctcaccccagggcagaggactccaactctttggaggcggtagggataccactgtggcagtcaagtccagccccgccacctgctggctgtacaacccaggtgagtccctaactttgctgagcctccctttcctcatctgtgttacacagaggataaaaaataacctgccttccaaggtcgctgtgaagatgaacactggtacatggtagtgtgggacacagtcagggttcaagagacagtcgccattattactggtgcccccgaggtctgatctgtccttcacatgccctgcccctctctctttctatctcttctcctcacacaggggaggcttcagggggaccagagacgctggcaaagatggtagtcttggtccctcccatgcacatccctgcccaggcctggaccttaggcctgcccctcagatgccgaggaccccctcaaagcatgactctctactacagaggtgtccttggacaatcccttcaaacaccctgccacctgagaactgaggtgcctgaaagccctccatccaatctactctttcccagacccatcctggggactggcctcctgagtccccatatctcagggccctgatcagggatggccaggctggcaccgggcctccatgcccaggaagcagagaccctccagacaaccccttttcccagagggactgaaaaggcacaggcccagatgtgggtaccagggcagagaaatcccagagtccccttttacccttcatgaaccaggttcccttcatggccttgcccttggcggacagaggtccctggaggggtgcagggagggctacgtggggtgggaccctgaggttctctccaggttaccacgatgggcggggcagaggggcactaacttggtgcctcaaggttctcctgtaactcccactcacctgtggccttagggctctcccgagaccctggaggactaggctcaggaggggcatggccaggttcaggttggagggggaggctggccttctcccagaaggaggccggcctgggtgagccctgaggggaagggggcagggccgggcgctcacctggcgtctcgaggttctcgcagagctcagacttggcctcaccattgggccggaagctgcccttctgcgtgaacttgttggacatggtggcggcggtgacaacagctttgaggctgcgcttgcgcttgggcacattctgctccgggtggaagaggatgatgtagaccttgggcatgtagagcatccccagggacaccgaggcgctcagactcaccgagaccgtcagcgtcgtggtctggatgtacagctggaggcgggcgggggttggtgtcagagagggctccgtccaggcctcaccgcccccagagacaggcacggggggatggacccaggagccccgcgctgggtcccacggacttgggcagaagggagtctgaagggagtcgtggtggagctgggacttcagaccagaatctctggattcaaagcctggccccaccacttccagccgtgtgatcctgggtgagtcccaccctgtgcctccgtctcctcacctgtcacctgggtgtgatgttacagtacttacctcatgacaggacttggtaaatggcgaccgtatgtacaagggccggcacatggtaggtgcctgggaatgctgctcgctgctacatgcagatactgggggtagcgcccctggaagggccctcgggggatcacagggccaggagtgagatgagcgtctgctggtgccctggagtaactcccagtggccgtgccacagcccctccaccaggtccccattcagtgactgtgcctcccaccgccaccctgtgcagagccggccactggcacaggagccacagcgcccagccagatatggcgatggcagcacagtcaaagctcatttcacgctcgcgagccagcactaacggtgacagatgtttagcaaaatgaaagtccattaatctgggtgtcggataatccattcttcaatagtggggccttccaggcagggcctgacaattcccactgcccccacccccgcccctccccgcctcctccctccttcctagttctccaagcctctgctgtccctccagcactcctccccaccagcctgtgggaggtcagaggtggccaggctgtggcccccaggtccaggcatggagagggcaggaaatgctcagcttcctaaatctgctgtttctaggcctgggccccctcctgtggggcctggctgaggtgccacctcctgtaggacgctctccctgacccgcagctctatccaaccctctatgacccccattctcatattccacccatctcctgcccttctccagaaatgcttcatgacctggatctgaaggctatcattctggctaccctttgggagagaggctggagaagctctagggtctgaaaggagggaggggtgtgatcctgagcaagtctcaagccctctctggccctcagttttctcatcaatacaatgggatgataactgctacctctcccaacccacaaggtcacccaaacccagactgtgaagctctgtgaacttgcacagcaccatggggaaggaggctgggactgtggagaggctatttcatttgtcaccattcagaaaatgtcatgggcccagggaaatgacagcctggtccccaggctggaggagtaggcagggggacaggttccacaccactggggaaaataatgaaggtctgggctaatcaagatgaggcttgttttctggatcttcaccattggatggggagctccctgggtgagggtatatgtctccctcattagattgggtgttccctaagggcaagggcaatctctcctgttacacatgggttcttgggtacaggagttgcatttccaagtcagatatccagtttaggctctctgtccccaccttgttgattggggggtggggcgtgcagttgggcccatatggagttgatagaaccagggatagaggccccctctctggacagagtgagtcctgcagtggacacagccctgtgctgggcgccagattctactcttccctgacccactgtgggacgctaggcccctccactaacacaggcagagtcagcaccatgggtacacacacttggtttcatgaaacctgaatcttgaatcctgaatcaatcatttttgagcaaggggcctttactcgctttttgcacagcgccctgagaactatggagccagccctgagcatggaaaagaggacaatctttggtgttcttttttgctttttcagcctaggaccctttctgcaaataaaataaaagatggggtatcaacagatcaaacccaagcaaagctgcccccatcttctggggccctgcccttccagcatgagcctcgggggctcttctagccatcacacatgcatatacatggatgtgggggtctctccttgctctgagcactggaagtcccaccacaccaccggctcaggcattagagcccctgtgtgaaggtgcatgttgtcaccaggaggtagtagcgtgccgattctatcaaagaagcagtggtcctctagagccactagaacccggcaggtacctcctgccccctaggaatggggcccaggcacacatgcagctctgcaaggcaggtggggtgagaggcgacctccaggatgtgatttcatcttgtttcccaaccacccatcttccagacagaggtgtctgaactcctgctcccatctctgattaggccaggcctgcctgctacactctgtcctctgcaagaaatcctgtcttagcctcaccagtgagtgctcctcaaggtgaaagaggttgtcagagctaggtctgatgggtgtggatagaggtcaccgtaggtggggcaaagggcagagtccgaggggccctgttgggggcacagaggagtcctgacggctccatgcttctgtccaggtggacccaagtggctactaagatccccagaatctccgcaaaccggatgaatgaacttccccacaagctggtcagcctgtggccaggtcccgctcaagtccagctgagccgtaaccccacgcggtagagaaaggacgctccagacggctcagagtaatgcctcgcggcagcagcgacaacccctgaaaatccggactaaggcagggaaatccatcctcctgctcaccagagcaggcttcactctgcgccaccatctgcacgcttggggaaatgggtgcagctgagcccctgaaagtgcaggtgcgcacacacctgggcatacccacatgcccacaaacacacacacccatctacgcatgcatctctgcattcacacacacacctgaactcacagctatacactcatacctaactcagaatcatacttgggcatgcgcgtgcacacacacacaacacattctccttcacacacactcacgtgcatacacacagatacattcacccacatctccacacattactgaatatgcatatacaagcgcatacacacatctgcagacaccgctgggcacacacaactcgtctgcacacccacaccagcagccatgaacctctcagcatacacacctgcccatccccactcaatgtgcacacatgcgcccacctgcacacagatccacataccacccagccacccctgaacatgcacaaaaaggcacacacacctctctaagcctaccacaactccccacagcaaccgcacccactctatctacacacacacacacaccagccaggcctacagcttccaatgcccacagcattttatagtgctacagaacatgcacagatacacccccagggctgcctttgcctcctcactcagaagcccgggaggcaggtccacgtccccccaccccagtggggggcagagcagggccttatggccacacgttgctgtgaggctggcctgctgtgtgaccccaggcaagtaagcctctgcccctttctgagcttcagaggagatcatttcagaggcttcctttcagaatcaatactgagcggagcctcctaaaaagggagaagtcagaggcaggcctgggcgccaggagagatgtgggggctgggagggagggagggcccggcagctggagtaggtgggtgtgacaccctgggggggggggggggcagggcagcaggatgctggcggtagcccgaggaaactaccagaagcagtataaggggctgctaccaagctgtgggccttccagccaggtacctttcctccctgaggaaccaagggaaggggcgtcctgtcattgctgaggctcgtttctcaagctggagtagggatggcttctctggtgggctctatgggcccccccacccctacactgcgggccaaggggcttctgcctgcatctgtcctcaccagggcgggccccccacaggccctgggtgcaggagccctggctcatagtgtgagctgggcctggtggctgctttggctcagggcactcactgccaaccccaacgtccgcttctccgaagccctcagcccacaggcctccctgagccaggccaagagtttcagaacaagagcacagctcctgcctcgagttgctgcggcagaagaggtagcacctccaaaggaagccccagggcaggaaggtgtcccagggctgcagggacagtgtgcactaggcttggggtggggggctcctgaggtaggccagcagggtcaagttcagccgtgcccctaccggcggagtgatctcaaacaagtcacttggcctctctgtgcctgtgtcctcccctaaatggggacagtgatccctacccctaccctgctacagcggagcctgctggccagtaggtagtgcatcaggcacatgacaagcaccccacccatcgtggctttggcagcagcctcactgaaggccatgcatccccggtagttcacacctgggcgggctctgcttcggatgctgtccatgggctgaagaccccccagcaacatatccagcccgggctgcttgccctcggcccccaaacaggctcctctagtgtcttccccgccttaggacgcagacattccttccttccgatcctcacaccaaaaaccatggaatatcattcttgatcctctgtacttcttaccccacatgcaatccatccagaatccagccagcccacctgcagacacatccaggagcccccacttctcatcacccctgccgccagcagccccttggtggggtccctacaggcaccaccacattggccgtccagctcccagctcgccttccacagggccccacccagcagccagagggatccttctagacctgagctatgtcacattcctcactgttcagaaccccgtggtggctcccttctcaccgacagtaggagccaggatccttcccacagcctctgtgtcttccagcatctgccctgtcatccttctgaccctgcctctgtcaccctctgggttcctcagccctgggcctccctgcattgggcaaactgttttcatgcccatcatgccatgtgactgttacaacaccttaaggattgctagagaagaatcatggccctaatacactaatgaggaaactgaggcagagaggccagctggcttgctcaggatcatgtggagctcagaccaggcgctggggtcctttgtccccacaattctcccctgtttctagcctctggcttcagtgactcccagtccttcaagataaaaccacacgggggcacccggggcaccactcaggggctgagtgtctgccttcggctcagcgggtgatcccaggtcctgggattgagtcccacatcaggctcccctgcacggagcctgcttctccctctgcctgtgtctctgcctctctctatgtgtctctcatgaataaatgaattttaaaatctttaaaaaaaagaaaaaaataggtaagacccccccccccccgcccccgccagaagccaggcagtgctggggctgggatatgggcagagtgcacagggccccagggtgcatccaggcccatgggatggcctgacagagccagcaggaggcagcccctctgcagctctgggccggtggaaggaaggagcctcagctgacaccccaggctcccgggcttcggaggcttggggacgaggagagaaggagacagtgtcggatccatcccccaccagggacccatggggatcctatcctgtgaggacagagagaggggcagacagaagatgaggaagagaggagtggatggcaaggctgatggggctgagtagggagagaggtgagggagagtctagaagagagggaaggctgacagaggagagaggaagaggatgggaggcagaggcagggagggaaagagagaggaggacagaaggagagggggaagggaggaggaaggaaagagatgagatggtggggaaggtaagctggaaaagaggaggggcgactcagagattggagaacagactggaggcagaggaggcagtgaggcgtgggagaaggcatctccagagcaggtgcgaggccagggagccccagaggctgcccccagctcagggccctcactcacccacccccaccctggcgccatcactcaccttgtctgccgactgcgaggtgccaaagaagatggggatgaaggcgagccagacgatgcaggtggtgtacatggtgaagccaatgggcttggcctcgttgaaggtctcgggcacaccgcgcgtcttaatggcgtacacggtgcacgtgaccatgagcagcatgctgtagcccagcaggcagatgagcgacaggtctgagatgtcgcacttgagcacgcccctggcaaagcgggggtcgagcgtccgctggtcctggaagtctaccaccgagtgggaggggtccaccacaaaccacacacagatgccgagcagctgcagggagatgaggctgaaggtgatggccagctgtgaggcagggctgatgaagcgcggagcactgaccgaccgcttgccctgctcgaagattcggtagatgcggttggtcttggtgagcagggccgcatagctgatgctcatgcccagccccaggaagatccggcgcagagagcaggtccccaggtcaggctcagcgatcatgaggaaggtggtggcgtagcacaggaagatgccggccagcagcacgtagctcagctcacggcctgaggccttgacgatgggtgtgtcattgtagcgcacgaaggtgaccaccacgaaaagtgtggcagcgatgcccaccaccgccaggaagaggggcagcacagcccaaggcgagtcccactcaagcttgatgatggggatgggccggcagcccgtgcggttctccgtgggccgcatgtcatacggacaggtcttacaggtgtagcgatccacctgatactggtaccccgtgcagggctcacagtgccagcagcagggcatgcccttcactgtcttcttccgctcacccggctggcagggcaggctgcagatggagcggggcagctgctgcccactccctggccagtgcatccgctctatctggcaacgacagcacaggggagctagccttaggatacgccgtccagtgccttgggctaccctcctggctggcaccctggggccccacacctccatcacctggttaggtggttaaaatccagctgtccttcccaaccatgagctgctgcatccaacagctggatttaaataagcccacccacatgacttagacacggcatctggaccaaacccgaaaccctcaaggaccatatggagacagcaagcccagagagcagcagtgacaacccagagtcacatggggaagcagaggggactcaggagctctgaccccagatcagcatcagcatcacccaggggcttgagggaaatgccacattttggccgaccccagaccttctgtttcaggatctgagttataagtaggccctgcaggtgaccatgctggagatgcgctgccccacaattcagaccatggggtctcctctgggcagcccaggaatctgagctcagcagggagcaatgaacagaagtttatgccgaggatacataatctgtgcccaggggttagggtttctttatattgtgctctaaattagtgctagtcaccgttacatgtctccaaagacacaatcgctgtgagcaaaggagccacaggcatgttggcacaccctactgaattcaatgttagagaagcctggaaagtaagaaaagttcagggaagtagcttatcctgtggctctgggcacgacaaggccatgtggtcccctagaagccaaagagcacagcaacaaccagggccaccatcctgtaggaacagtgaggctggacaacccccatgcacgggagctatgagaccacaagggacacagcgcgatggtagctgttctggaaaactctggctcccgggagaagagccgcgaatgcaggcagaccctgcgatcacagatgtgttgctagctggctgcaagccctgcagcaaacatctcaacccttccaagcttttgtgttctcacctgaccaaagggcagcagatatgaggccactttgccctttgctgcttattgtaccactgctattgtggcttcctctggcaagtcaaagcagaaactctgaatatttccccagaatggctctgtgcgtgttccctgccgcgtgtctggcgcccagcacagggctggcacacagagggcccagggaatctctgcggaatctgtgatagaggtagtgagtcccaagcaccagccacgagaggccaccttgctctcagaccctggaggaagatagcagcaggcggggcgaagtctcctcctcagcgccccctatcccagcctggcctactcagtggaccccaaactgagccctcaggagaaagtggggagggtatgagggctgaagcccagttctccctaaccctccccaccctcactgccccaatccatgctggcagaggggcctcgtatcatcagggaggagtccgctgtgcaccccacaccgaggccctgctttcacttaccacatctgtagaatgagacaagaatagtacctgcctcgcagggctgccgtccacacagtaaggtcacatgcttacaagggtccctgtacacagcaggtactcagtaagcattaactgccgatgccgctagtcaactgaatcacaggcccccaccgctcctcccactgcacccaaaagagacacgcctccacctggggtatcgcctcacttggcaaagtgagtctccgttcagcagcccagggagcatcacgacaagaacaggttcggcccctgccctgctacttggccttcagaacatccctcaggctgggcttgcagagatagttcctttgacttagaagatcatcggagctaaatgggatcatgggcagaaagggctttgaggagttcaagaggttcgccgctggaacagattcttacaagaggggagagcagggacacgatgcaactctcccaggatctggctctagggtagctgtggccagacatgggcctgggcctcctgagtcttctggtccatccctctgactgtcacactgtgcccaccccaagcttggctcgccctgccaccaaggcaggggccaagtccactggcatttcctcggggaatgaaccacaggtcctcgctctccaaacacctggctctgttcaccgctgggtacactgaaggagagggagaaccaccttgtccctgggacgatcacgggctgggaagatgtcgctaagaggacccaggagaagaccccccacacccacccagctgccccaaaacccagaaaaatgatgaccttctgggtgcactttgacagctttaagaaacgctctcgaacaatactgtgccctttgccttaggccactgtcctccttcgccccatggcagcccctccccacccctactcacctagcttcccgacccctgctgagccgccaaggccctgttcctccatttcaggcaggagtggtgcccagggccctcagaagccagagtacggcacggaaggaagccccaacctggcagcagcgcacctgggctcagggctgacccagactgatcgggggctgcctcccaggggctgggtggcacgagtgactctctccatccctccaggggcccttccctgccctcctgctgggcacttactctgaggtgcaggtggtcagtccaggagccgatgaccttatactcagcagagccattgcgcaactggtactggtagatgtcatagcgcccaggggcgtctccgttctcattgaaggtcacagggttccctgcgatgcctggaggggccggtgagggtcacacactcagtatattggctgagcttttactgagaagcagggagtaccacgaggccagtgcagagacccctcgggggaggctcctgcatggaacatgccctggaaacatctgaggagaccgccccccacacactcctaccctacggagccccaggaccccttcccctgggcttcaaggcccgggacgctcacctgagaagttgacactgcggatgtacttgagcagttgggtgccatccacggggtccatgcgggggcagagacccacgcggccgggacacaggtcacggtgcatggcgtgcagcgcatggcccatggcatacacagcatcgatcacaaactgcaccttcccctcctgctcatatgctgagtcctgcccaatgcgttctcggtctgcaatgaaacgcgcaaggcgggggcaaccatgaggctcaccgtcctcacagaccatgtggcagggaccagagacgagagaggtgacacagcccgtgtctgcacacttgggcctcctggctcctagcccagggcttgctctgccacacaggagatggtcttatggaggcacacgggggcacaattccaaaaggtgaaggggagggtccactaccctcaccacggtactgccagaccctatcctctgaggccccagaacagccagggcaggtccccgtgtcacaatcgccttcagaaggcaatcggccagggggtttccctgtggctgtggcctccctgctatcccccagcctggcctagactaatctgggagcagctggcccccgcacaggctgggaaatcgccaggacaaaagctatgtcttgcagtggtaccctatggcagcccactgatgggcagccgctccagccatgggacagatggggaaattaaggcccagagagggtgagagcctggctgcagatcccaggacacctggtgccctcaatggcttccagtcaccctggacaccagaagtcaccagcatccccacccactccatctccattagccaggctgagtgagatttgccaagtggggaaccactcccacctctaccctcaccttgctgcaaatggcagtagctccccagggcagcatggtcttggggctctggtctcctacccttactccctgggcccaagctccttggctgcctaaagcttcagtgtcctctagtaaaaaggggatcataatcctgctccacagaggcttacatgagaagaggtacagaaaacacttggcactgaggtgactaatccaagtggtcagagtggggggtttctgaggtccctgagccagagcaggccaggaaggctttctggaggaggaggcactacctgagcctgggccagggtagcaatcataaggaagaataagggttgctaacttctagcgagtacctgccctatgctcagcatcattctaagctctttatgcatatcaactcattgaagtctcaccagggtgctaggaggtgagcagttatccccataccagagaggaaactgaggcacagaaaagcccagtgacattccagaaccacgaaatgccgattctgaacccaggcacgctggctcccagcctgggcaccactctatgcctgagggattctaagagcgggattgggcggcggacaggaaagcagggaggttgagaggaggaggggacaggaggtggctgcaaagtggagggaggcagaggatggccagaatgccagagaagcctggcttcgctcctgaggccacagaccctgcccacatcacaacctggaacctcctccctggagaccaggacagagaagcccggccacaacaaccaccgcctctgtgccagagggccagtgccacaccttgcagaggtgattccccagcgggcagcaggataagtggctgcaccccagcctagccccatgggccacagtctgagcctctcatgtctactgtgtgggggccaggccgggctgggtcagccccaggccctgctcccctgggaactccaaaggtcactctgtccctccctctcccttggatacctcggaagcaaacaccgggtaaagggaaacacactgctgtccccaggctctctctaccatctaatcctctcaccccggaaggacagatgccaccccacccagatgtggggatggctgggctatgcatcagtcacccctcaactggccaggtcaggtggccaggaccccaccccattctcagctttgctcagggttgagattcaacacttgctgaatggacagcagaaatcatgggatcatagtgctaggaacaacaagaccaaggcaggtcatctgttccaattctgctattttacagatgacaaaactgcctgcccagggctcctgcagagctgggggcacatttcgtatccctgccttggccaccaagactgaccaagggcagaacttgaccccagtcaccccaacctcggggatcagagatcaacaagagtcactagtactcagattgcacagctggggggcagatgcccacttagctcgaggcgggggggggggcaccgttcagtccagacagggccccagctcctccagggtggccttggggctggaagcaggccaggcttcggagctgcctcaccggctctctcctggtcaccaaaggccctcgctacctgctgtcactgtcctctgtgtgcaggagcctggacttgagtccagactgtctgggctggaaccccagctctaccacccactctagctgtgtgtgaccttggacctgtcactccatctctcagacttcagtcctctcaactgcaaaatggggacagtgatggtactgatcccagagggtcaggattaataggttagtatgtacaagacctgaagagaggcgtggtgcttcccaagtgctacagaggttggttaaatctttgcacctgagggcacagagaggtgtgagtcctgccttgcctcagagctcctgggccagcagagccttgctaacaggcagcattatttctaggccaaggagcaaacaagaatgaacatgaaaggcaagtactccagctttccagcctgcccttgtgtctgagcttctgatgacaaggttctgagaaccagaagagaagcacagggatgatcctgtccccaaagggagggcagttggcgggggagggtcctagagcaggattgcctggaaagctccagccctggaccctaaggggacctgctccactgagcctgaagaatggaagacataaaatcccactcaacaacccacattcccatcacaccttcatttcatctgggtgagagactaaattattaaccaggacggagggaaggttgtggccactaaagcaagctggcagctctctcccaaagccaaggacacatggggctaaggggatctggctgcaccaccccagctaaactgccctcacctctcctctctcctcctccaagggtccctcctcagggggaccagctgaagcatccattcctgggccactttggtccaggacaagtgccctcgctggggtcacgagccgcctgcaccaacaccagattgaggaccaccctcactgggagaagccagctctggctggggaagctcccactaaaggggctctgggctcctgtggagctgtcattgccccctcagcgcagcccctccagaatctctaccccagagctgtcacagtgccagccacagactcctagagacttctcgacacacccgcacatccttgacttttgtctcacgtccagccccaatgacagatgagaaaatgtgcagcaaggcggcttgcaaaggacctttattttcaagggtaccccaggcctcaagcatgtcctctacacacaggcacccctcaaaccccaagggcccttcccctgcaccccttggaaggcaataatgagagggcctaagtggctcacatggtggggggcggggagcaggaatcataaatacaagttaaaaaggacaagatgctccatcctgaatgtctgaagctgtgccagtaaccagcgcagctctccacgttcctcctgattcctcagcaaataaccttttggcgtagctgctgctcaccgagaaccttcacatgcctggcattttctgttctgggaggctctgggaggtaggcaggctaaactggcccctctcacagaggaggtaactgaggtgtgcgagtggccgagtgatgtaccagaatcttacggaatcctggcacctggcatgtgctcctacgtccctggggattggcctggctgggaagtggctgagcagggatttgaacccggatctctctagttccataagagttttccaccacctgtaccatccctctcctacttcttccacccagcctctaacctgcctccttccccttttctggggtccaggctcaaccaggagttaaggatccctgtctgtggggctaaagcaggtggtagccgtggagaaaagtggggatcagaaaaatcccctcatgggtgggcaagaccttcagaaggtccaggtggctctggaaggaagcatgacacacacccctgagagccactgtaggagataaatcccagacatacggtggcaatgaccgcagcaacagtttgaagatgtcctaattgtgtcccggggtacagtgagccagggatgcgtttggctctgccacaggtgacagccagtgggggaaactattgggagaggattttcttcgtcaaaaccctgcagctatggttactacagtgactgcagcctttgtaagcaggttgtaaattgtaattgaaatgagttttcaaggttgaaataatcagagtgcctccttgtctctctcccatcacccgccacgactcaccccgcccaactcaccctgcccaaccgcaaccctccggagttctacgctccctacccacgcacgcacccagttctcgaagcggttccctcacataaaggaatatgaaatccattacgtacgcacgcacgtatattcacatccacccatccagggtggctgcacgcaaacctgcaggcgttgatacacatgtctaaacacacacccatgttcaaacacagataatcacaagtatatgtataaacacgggtaacacatacatcgctacacaactagcatggcactcatccaaacacagggtcatccagagtcacccactgttgggctgagatgctcacaagtgttttctttgggaagtgatacctggaaggaccagtaggggtaggaacctgggatggggaagggcggccactgatgccaggtgtgcggctccatccctctggggccctccaggagaccatgtagaggacgcctcagggctgcccatctgaggagacaaccactcccgctcccaccaatcttaggccaaggcctgcttccaagggcactaactgcactggcaaagacggggctggtgagcactgcagggaccagggagtggcagcgtgtctgtattcacaggtagaggcccacatgtgcaatccagcataggtgcacgtacacacatctgcacacagaagcttgcatttacatacaatatacaaacgtacacaccagctttcatctcttgggcaacttccggggagtaggataagagggtcccagggtccccccaggaacagcagcctagcaaatagctgtgcctgtctcccagcctgccacggaccagctagtgatatgacctaggtcaagcaaaatgcacattcctcagatgtaaatggggggtaataatactggcctgcagggcccctcagaggattagggaggtacaggtacaacacacagcatcataccttctatacagaagcactttataaacttgtttcctctcctcccaggcactcctccacgggataagatcccacatcccgggcctccctgctccatcctgcgtggtgcatacaggccctcctaccctcaggatgacgtgagcacagggtacccgaccccatgcagaccggggcccagctgaggtccgcccgccgagatctagattcgaggacaaagctgccacactgtccttcctggccattccccttctttcccgactcaccggtggttgatccatcctccccaatatctccctgaaacacccaagtcttggcaagcgataaatgccatataactattagctgttattatcattggtggtggtggtgtggatgctggcacaggctgggcgacaggaatcccccacacatcctcagctgccatgcacccaccctccctctcagagctcccagcccctgtgaacagaaggcagtaaatttttcctatttcctcataaaccgggccttcctccgctcagccatcacctggctggcagtgctgtcaaaaagatggatgccacatctgccttgtttacagctttaattcccaaaccctctctgcatgctcccagggagggggccaggagacagagagggaggcaggtgctgcccctccctgggccttgacagctgcaagcctccccctcagtgactccttcctggctcaggtgtggggggagtccctgggcaatctgcaggtgcttcccacagatcacctccatcccttctccgggaaaaggtgagcaaggtggctctgcagggatggggctctgtggggatgggcgtgggtaataggattcccattttacagatgaggagactgaggcctcaagaggtataaggccctgccgaggtcacacagctaggaggcagcaacagggggattcacacccagctctgcaggaccctgacagcagaatgtgtgtaccctctccctcttaccactttgagacacaccggcccaatctccagctgccagcatctgctgctctttggagactttctgtggtcacagcagctctctgcccagccatccggcaggcaggctggaggcgctgaggaattagcatcctccaggagcagcctgtggaagcaacaggcagaggccaactgtgcaatctgctggcctcaaggggaccagagtgggccagtacaaggccaccagtgcagatgggcaggcctcctggaagaagtgagtgggaagccaggctgggagatagagcaggggtaggtggagaacacagagcacacctgggctggctggaggcaagagggggtgcctgggagagcaggagggcaggaaatcggagattgggcagagcaccagccctagagccaggctgcctggggataaagccagttctgccaattctggtgccgtgatgttctcaaatggcctctgcagcctcttctgcaaaatgggtgctgcacctgcaacagcctctaccaactgccctccctcatcctggatcctacagctgacatgcaacaccagtaccaacagatctggcaatcccatcactcccactccctatccacatcaacaaccattttaccagcaccgatcatgcacatcatctttcagccagcctcttcctacccttcacctccaatcctcacggcagcccactgagatgggcagtgactcccatcttctctgagacgcagagaggttaaatgacttgtccaaggtcacacagcagggaggacacggagtcagatccaggcccggggctgcatccttctcctgccccccaccaggtgcccagtgcagagccagccccccaccacttcccgtgggtgtcaccctggccctcctgcctaagacactctcccaagggagtggctcagctcaaacctggacggggccacgggatgcttgagccgcctccccctcacccggagtgggtctcaggtcccgcacacattcccagcggcagccctgctcctcccgataccctgaggtggacccgataccctgaggtggacccgctcatnnnnnnnnnnnnnnnnnnnnnnnnnnnnnnnnnnnnnnnnnnnnnnnnnnnnnnnnnnnnnnnnnnnnnnnnnnnnnnnnnnnnnnnnnnnnnnnnnnnnnnnnnnnnnnnnnnnnnnnnnnnnnnnnnnnnnnnnnnnnnnnnnnnnnnnnnnnnnnnnnnnnnnnnnnnnnnnnnnnnnnnnnnnnnnnnnnnnnnnnnnnnnnnnnnnnnnnnnnnnnnnnnnnnnnnnnnnnnnnnnnnnnnnnnnnnnntttaaaaaaaaatcccaatgcccaggttgtactcagtaccaatacacttagaacgtctgggggtcaggcatcagtagctttaaacaatctccaggtgactcactgtgaacaaggcttggggaccacagctcctactatggtcttcagccctgaacacacacaaaatcacccaaggagctttcatgaagtccacagcccagaccccacccctgagattctgactgaacaggtctgggggtggagtgctggcatagttttaacagccacctggtgattctaatgcacagccaggcctgagagccaccattttacagttcacgaagtacctccatccatgctttctcatttccaacccaagacactctctgggctggctcaccatcaatcccattcctccaataagaaagcaaaggcccgaagaggttaaagagcttgcctcaggctcccagcgaagctctacactcctgaactgtgctccagccctccctcctccacctgctctgacagcccaaacacctccctcagggctgcggagagatgcccctgtccccagttcaccagccaggccgaagacatttgtgaatccagaccccaggactgggaatctaggtaaatagagtctacaggagctgatcaaggtcctctcctctcctgcccctcccaaaccaagaagtgactccagaaagccctttgcccttggcaggctggacactggaggccctgttacccatcctgcccccatttccagtctcaccattccccatcctccagccaggtctggggatttataatcagggtgaacatacaattttccatccccacttaggcacttttaagaataaaagggatgtgggacgcctgggtggctcagcagttgagtgtctgcctttggcccagggcatgatcccagactcctaggatcaagtcccacatcaggctccctgcatggagcctgcttctctctctgcctctgtctctgcctctctctttctctctctgtgtctctcatgaataaataaatgaaatcttaaaaataaaagaagaagaagaggaggaggaggaggaggagggatgtttttaggggcacctgggtagcacagttggttaggcatccaactcttggtttgggctcaggtcatgatctcagggtcatgagctcgaaccctgcatcaggctctgtgttcagcttagaatctgcttgagatactctctctctctccctctgccactccagctcatactctaaaacaaataaatcttaaaaaataataaaagagatgttttccaaaattatgtaagatgcatagtcaccctacccatgaaagctcagtctcctgtgctgtcatttttgcatttcttaaatcttcaattactgcctgacaaaggcatttgctgtacagcctttggcaagttgcttggcctctctgactctccagaccctcctctataatatggagatcagaaaagcccttagagctgttataaaagtgaaaaaagtgaaatggggtaatgtgtataaagtgtctggaacacagaagatacacaacagtgagtgatatttatggttattagcttgcctaggaacataagcccccacatcagacaaacacacacaccccttctcccatagacgtactgactcatgtacatacacagtcacacacaccaccatgtacacccacacatgagcttgcctgctgggcccctggggaatacccatgatcctaactagccaatattcctgactcccagaggacccaggccaccagagggcagcacccttcccacctgcctgccaacctcctcaagcttcctcctcctgagttctgtgactcaggaacctaagatcccgcaagccaggccaatggccccttgctcacctggccctctgcccaagccactttaatccgtccaggaggatatgagagggagatcaccatcccctctcgtgaccactcaggttgaaggcacccagagctccctcagtgtcactaagggaaggtcctgctgcaggctacccagatcaagaatatacagggacccacatctgaatgtatccaaatgtggacataccacgatgactaccctaggggacttagggcctggacctgggtccaaatgctgctcaaccaccttccatccatgggaactcagatccttttactttcttgcacctacaaattgttttccaatctgtagaatggacccactgtcccattctcaggtggcccattcctcacccttttcaggactctactcatatgttacctttataggaaagccatctctttgttctagttgtttctagtgtacatttcctttctgatatattgtacagttcactatttatctcgtttaaacgttttcctattaggataaacattcaagagatttttgactcactcattcagcgccatatccacagtgcttagaacagggacgagtataccctaggagtcaaattggtgtttgttgaatgaccaagggaaccgcaagggattagagatggtttctgcaaaatgctctgatgggtgaatgtctggactcccacacggggcagctggggtcaatttcgtgggctcatcccccaaggtggctacaggcaggaggaacctcttgcagagacccaggagcctcctcctgccacaccccacaccccagcagcatccctgatggctgagagcaaggcaactctactgttctaagcctctgccccgcctcggaggnnnnnnnnnnnnnnnnnnnnnnnnnnnnnnnnnnnnnnnnnnnnnnnnnnnnnnnnnnnnnnnnnnnnnnnnnnnnnnnnnnnnnnnnnnnnnnnnnnnnnnnnnnnnnnnnnnnnnnnnnnnnnnnnnnnnnnnnnnnnnnnnnnnnnnnnnnnnnnnnnnnnnnnnnnnnnnnnnnnnnnnnnnnnnnnnnnnnnnnnnnnnnnnnnnnnnnnnnnnnnnnnnnnnnnnnnnnnnnnnnnnnnnnnnnnnnnnnnnnnnnnnnnnnnnnnnnnnnnnnnnnnnnnnnnnnnnnnnnnnnnnnnnnnnnnnnnnnnnnnnnnnnnnnnnnnnnnnnnnnnnnnnnnnnnnnnnnnnnnnnnnnnnnnnnnnnnnnnnnnnnnnnnnnnnnnnnnnnnnnnnnnnnnnnnnnnnnnnnnnnnnnnnnnnnnnnnnnnnnnnnnnnnnnnnnnnnnnnnnnnnnnnnnnnnnnnnnnnnnnnnnnnnnnnnnnnnnnnnnnnnnnnnnnnnnnnnnnnnnnnnnnnnnnnnnnnnnnnnnnnnnnnnnnnnnnnnnnnnnnnnnnatgccatgcagtgagtgtcctgcctggggcagcgttcaggtggagattcagtggctgtcggagctgtaggagaatgctgacattgataagggattagggttagggcagggtttcccaagccgtggcaccattgacagtctgggccctatcattccttgttgtggggggctgtcctgtgcattgtgggatatcgagcagcacccctggcctctacccactagatgccagtagtatcactcccgagttgtgacaaccaaaaatgtctccagactcccttgtctcccttgaggggtcaaatcgctcctctcccctatgagaaccaatgctcaaagtcttctctagtatcatagggagaagggacttgccagacaagttctgggttccaatcccagctatgccacttaataaccatcatatgtcacttcacctctctgagccttaatatattcacttactaaatgtgtataaaagtgtcctgtggggttgctggtaagagtaaatgagatgtctctcaacagccatagtcactactgttttgtgtttaccgtagctcgaggctgagagggataatgtggaaacttctgtggcctgtgtcccctctagctcagggtaaagaacacgctgccctgtgaccttgagcaaatgcctcccgtgctcaggcctccatctctggaaagctcagtagagacggatgtctgcaggccttccccacaatatcaatgctggcttcnnnnnnnnnnnnnnnnnnnnnnnnnnnnnnnnnnnnnnnnnnnnnnnnnnnnnnnnnnnnnnnnnnnnnnnnnnnnnnnnnnnnnnnnnnnnnnnnnnnnnnnnnnnntgttgcgccggttgttgtccgcgtgcggctggagaagtagcggtcgaagcctggcggggaacctgggcatcagggcctcgtgcccccttccctacctgcccccagcccttccagctcccgcatcccccaagggttagagatgcccaggcagagggagggaggaaggcaagagcaagcctctgatccagggcccagctggcaaaaacaaaatgtggagcatttcatttcattcaaaatgaaaagagctgtattaagtcccaggggtagcatgtgtaatcttacaactgctgcctttatggaagagaggtgcgtggggaggatgcttcacgcttggccttttaaccaccaaaatgctaatatccgggctctttgagaagaagccacctgggggtcctgagattagagtagagaggctgttgggggctgaccaaagctgggggcacctgagctctctggttctgaagaggaggccagacaagagagggaaaagggtgacccaggtcacatagcaagaccagggccaggatcttctgcctctgcatccagaacttccccatttctgacagaggcggcttcctcctccagatgttccaaaggagactcccacctctgctctaagtgcagaaaaccccaccccagggtgggcagcctggccaatgaagagtgcctactctctccccacagtgctccttctgcattgatgactgttcccagcaacatgcagagttgactgagctgcttggggtgggcccaaacacctgagagttcagtagggtccatgccatgcagtgagtgtcctgcctggggcagcgttcaggtggagattcagtggctgtcggagctgtaggagaatgctgacattgataagggattagggttagggcagggtttcccaagccgtggcaccattgacagtctgggccctatcattccttgttgtggggggctgtcctgtgcattgtgggatatcgagcagcacccctggcctctacccactagatgccagtagtatcactcccgagttgtgacaaccaaaaatgtctccagactcccttgtctcccttgaggggtcaaatcgctcctctcccctatgagaaccaatgctcaaagtcttctctagtatcatagggagaagggacttgccagacaagttctgggttccaatcccagctatgccacttaataaccatcatatgtcacttcacctctctgagccttaatatattcacttactaaatgtgtataaaagtgtcctgtggggttgctggtaagagtaaatgagatgtctctcaacagccatagtcactactgttttgtgtttaccgtagctcgaggctgagagggataatgtggaaacttctgtggcctgtgtcccctctagctcagggtaaagaacacgctgccctgtgaccttgagcaaatgcctcccgtgctcaggcctccatctcttggaaagctcagtagagacggatgtctgcaggccttccccacaatatcaatgctggcttctatttaccgaagcaagagcaggggagaaggccctgggagcctgcctccccccatggtgagaacagtgaggtccctgccagactgggccactaatgggaacctcacgcctcactcacagagaggttctagtcagagcaggttgttcctacccagggtgattgtgggttctgccccgagaggaagggatgccggacaggacaggcccaagctcaacagcacccagggcctggatctggcaggccctgcacggagaacctgcctccacccccaccccagcacagcatcttcctcttgtctcctgctcccaggcccttttgacagaggactggccccaggcagggagagggccttggctctccgtctcagatgggagaagggatggaggtacgtggggatgaagggaagtccctgataaataaccttcctgtatgtgccacgcatctccacacccagaaatatctgagaaggaggaagaaaacttctgaatctggatttgaatcctgctgggttgagtgtagccagaaaggccacccagcctagacggtcagcaccaaggggatgtggaccaaggaagaggaaggacaggatgtgggaaaatgaggaatggagtagggggacaataaaaagggacagctggggaggatggtggcagcagtcaagagcggtgggcgtgccttgcccagtcctacctcgcacagacatcctcttggggaggatagtgactgcaccctcagccacctcctccaggtgcagcaccggtgtgctcttagagccccagctgtccgagcccatccagaagaagtggcctgtctggttggccttccgtgccgcctctagcacacgcctgtgggaacacacaccagcccagcccagccgtgtctgcccatgccacgaccccaccccagccacacctgctcaggggccgttagctgaccctccccaccccaggcacacacacatccccctcatagcccatgcctgttccaccaggcccatgcttccacctgcatctggcccacaccctcctctggcccagggtgctcccccagacccacttctgcccctagggccacatctgtcctacaaagacaaacccatttccctaggtccgtgcacgccccatatctgacttgcacccccggcaccacatctgcccagtctgtgtcctctcaggctcatgccaccctggtcctgtgtcacagccacatctcttggttcattttcacatctatatgcctgcaaatgcgtacatacacacgcacgtgtgcaaacatacacacactcctctacatggttacccctctgcacctgctgctcccctgccagcagagccctctccagcccacccccttctgtgccaaaagcctgggcctccaaagagctgcttcccagaccctcctgggtagatgaaagggtgagaggcaaccaggtgctcacctcaccccgtccacagtcctactgtgacagtggttgtaatcaaatcaaattggggaccctagagcccagcacagggcggtacccacaggaggcactctggaggagaaaaccagccagaactcccccaacccagctctggggaatgcctcctcagaggaggggaggcagaggggggcagggaggccggaactccaggaggcaagcaccgagctcagaagctcacagtgagggagaggctgtgatactaggaactgggacacggcccccagggcttgggggtgctgcggatcctgggagcctgtgcaggaggcagccgctggggccagacagcccagggctgggggagaaactcgctagcaggccccagagcccacgccttccctcctccagcagctctcgactctccaagtccccaaacccaccctccccagggcacattaatgagggggtgagggggagctgttcccagaagccatgcccacagcctattagtacccgctagcatcaggccagccagagatgaccagagctcccagaccttcctccctgcaaagtcacctgggtttatttttacttctgtttgcttctgaaaatgcatgtggatttcccgaaatgcctctgccccccctccctgcggcattccctctggagtcagcccctcccctaggtacctctgctctgggaggcatggcccagcgccctcatcttcccttcccagcacatgggtccatctgagctaagcaggaggcctggagcagggtgcacttctggatggggtatgggttctgagtcctgggctttgaggtggggataaagataggagtgcagggaccagtaactgaaggagaaggacttctgaagggaacctcctcctccaggagctggtgacctgtggataacaggaatgtcccgatggcagaatttagggggcctgtaggccttgagggggtcaggagcagccctaggctccacagcctctgactcctccctcccagccttgggctgcctgagacgctgcccttagagctggtctcttagccgtttgtggccttaatgatcttccagaacttccccctccatccctgcagggacctggcaatgtctcctgggggaaatctgtccaggatggggtcgtcaccaagtggggaaagggctggaaagaagaggacccagatggacactggttagcaacagggagggaagcacaggggggcaagggcagacaggcagccctggcggagcaggagggcaggggaggctgagggcacagcaggctataacacgtcaggccagccaactgaggggggaggcctggggaggatcacatctactgactcatcctcccccgcaaatgtgggggcctgcctcccccattggactctagcaggggctgtgtgtcccctgagcctggggcttcctgagctcagagcttgcatctctccccttggccaggacaatcacagaggcctggcacatcttggccctgacatcagtctgagaggtagtagcagggaaaaggcaaggcaggaagaagggaagtaggttaagatgggtgctttgatgtgcaccagactcgggaccagaagagatgggctggcccagcactgcatcacatggtcctggcaccctaaagtccacctgtttcctcagcagatgcagagactgaggccagggaggggacgacaccgcccacagagagtgtgcaccagagccaggactaaacccacagcccaggcctcttcccactactccaagctttgccaaagagaagaggcaggggctaacagaggtgggggtggtggggactccacacgccccaggcacttgcttggagcctgactttaagccctttaagcacattcctgcattcagttctcaaataacactaccaggcttgcatccttagcacctccctcctttttttaaagcagaaaagaggcacagagaggttgagaaacttgcctcaggtcacacagctaggaggagggagagtaggattagacctagttctttggctgaaagtccagggccttagctcctttgttaaagtacatgcttaccatccccagctgatagaatggatgcgggggaaatagtgagggggtataagagtgcccattagcagtagcctgtgccccagctgtctcccaccccacccctccagatcctacagtgcagtcaggcttgtctaggaaggtctccagcgggacccagggctctccccgtgactggctcccaaccctcaccccgctgccgcctgctctcacctgatgtcatcctcattggcaaagatgatgaccgccctggcgtttgaggtctccaggaggcgacggatgatcttgtcaaactccccaggcttgggttcccgcggtatcttcactgactgcgcgatgcacacgccccctgtgggaagggcgccagtcagcctggggcagggggcagcaccagtctctccccgcttcaccctacaccctccaatacatactccctccaggagacagaggccagggctgcccatggcccccccagccagacttctagctcacaggtcctgatctgtgcacaggcacaggctgtgcagtcagaactgccacggtacaaattttggttccaccactcaccagctggatggccctgggcatgtcacttcagttctctgtgcctcagttccccagcctgtaaagcaggctggtagcgagaggcaatacagcatcatgtttaggagctagactgcctgggtttcaatctcagctctgctgcttactgcagtgtgacctcagggtggtgactaaacctctctgtgcctcaaatacatcatctataaagtgatgacactactacttacttcacagggttgttaccaagctaagtgagttagtgcacacaaatacaataatacctggcacatagggagtacttagtaatggtggttattttcgttgaaaccatctcataaggtttttttggaggagtaaatctgagaagagagcaagttgcccaccctgggctatcagatcaccacgcatccacatccatgtcatgtgcacctcccagggctcttgtccccaggtcatgtgctcatcaaaaggtcccttgatgagaccactgtgcatggctgctgactcatacctgtgcatctgaggcctatccctccaggtcttcccaccctttccaggctcttcagcaggtaggctccccagctccccctctatgccctgacccccacagggtgccttgatgcctgcctctccccccattcccagttcaagaactcacaggaaagccattctaatgtgtgtgcttccggtggagtgaccagaggagctctgaatgggtcagggggtttgggagcccccctgtctctcctcctttggcccactgcctgcctggctgggtcctggaggaggggccaagggccggagcctgactatctcttgagctgtctgcctacaagaagcccaacccccatgtctgcagaagcatccaggaggcagagtcaatacatccaaggccagattcacatccaggctgcaaggctcacagaaaccctgggagcacttcagacttcacccagccagttcctagccttagacacgtctccagtgttggcaggggacagatgtcattcgtgcattgaaatcccacctgacctcctggtacaaaagcacctatggatcactgttgctgttatcaacagcatttgacagatgaggacgctagacaggaggagaaatcacacagtcccctgcccctactgagatacagagcaagggagcctccaggggctgagaacaccagggtccctggtggcagagtcagggctcaactgatggaagagcatgggggattattcttaaggaaacagatcttttatctaagactgtcagcccctctgggtcctactcaagggtcacagcccagctccaccccaaacaggatcccctggggacccagcaatgcctcaaaccatctaccttggctgggcacctggctgctgcccacgctggggccacttgacacttctgcacagactccatgtgcctctgtgtggggcccacccaccagccccaccagaagtgccaacagtacccagctccactccagaaggagcctctaggggcgcctgggtgactcagttggttaagcctctgccttcagctcaagtcatgatcccagagtcctgggatggagccctgcatcaggcttcctgctcagtgaggagtctgcttctccctctccagctccccctgcttgtgagctcgcgcgcgctctctctctctctctctctctctctctctctctctctcgtaaataaataaaaatctttaaaaaaaaaaaaaaaagagcctctacccttggaacagaggtggcaatcagggaaggctgtccaaaggcgatgaccctgagctgagtctgaaggaggaggcataagcagccagatatgaggcattctggagaggaacaaggtacactcactagaaggggggtagttctgtgccaggcacctgccaggcctgaggccacacgacacatgcacactctcacatccctgtccccaggaagtagaccccaccctggttctccacagcaggcaaagcagccatggtgctctgccctcgcccctgactagaacccacctcccttactttctgcctctttcaagcaggccaagctcctcaggtctctcctaaggcaccaaagaaatccaaagcaccagagaagaccatggtcaccaggagctcatggggaaggagggagggtccttgggcaggactggtccctccagacccaggtcccacagagagagccaaagggagccagtctgctgcccacagcacgggccatgtgctaatggcagctgggcaggcgctcagctcccaactaaacctccatatggttcctttccagttagaaagtgggccaattgtgacatttccctcccatctggagagacagatggacaaggggaggcggctggacagggggtaagggtgagccacctggctccaggagggaggaggggggccaggggcataaggaaatgggagttaattgtcttcaaatggggagaaactctcagaaaaggggtatttctgggccacgcccccccccccccccccaggaggatccccgggattgtcccccccgacaacccagggcccatcttggatggttcaattttctggtgaaagaatttaatgaccccccctccctccgcttaaatgagaatgagcccccaggtaccttacatgggaggaagtccagcaggaactcttcaacccaaaaaggaggcattgaacggcgggggggggggggggggggggggctccctnnnnnnnnnnnnnnnnnnnnnnnnnnnnnnnnnnnnnnnnnnnnnnnnnnnnnnnnnnnnnnnnnnnnnnnnnnnnnnnnnnnnnnnnnnnnnnnnnnnnnnnnnnnnnnnnnnnnnnnnnnnnnnnnnnnnnntgcaattttacatggattcacttcatatggggtgtcatcagcacatctctaatttctagatgaagaaactgaggcacagagaagttaaaggggcttcccaaggtcacatagatagtcagggggagggggagggtttaaacacaggccatctggctcccccattgtgtcatggctcaggccatgtggggaaggggctggtgtacaaggtcaagggaacacctgcagcccgtagacatgggcatgtctgggcacactgcccgttctggagtaagagcccactggcgtccggggtaaaaagcgaagtacccacagggtccctttgcattgctgcccaaatgtcagcatggctgctccagggaccccaggatggggattaagcaactggctcaccgggggctgtgccagtgtgacacaagctcccagcagtgaggggcatctatctcagctgccctcctggccccttgctgcagccagagaggaccggagtagccccagagggaccagcatttactgaagcatccactccaagcctggcacgcagtgaggcctcacaccccccagggcaggtgctagtagtcccatcttacagatgagggctgaggctcagaggtgctaggcagcctgacagaggtcacacagcccggaagtaggaatgcaatctgggtctgtgtccagaccctctctcaggcagagaaagaaaaggcctgggtcactgggtctctgttgagctctgcttcccgcagcccctccccacccctggaaagaccccaatcacatgccaaacccgccagccctcttgcctgctatcctgtagctgtagctccatcaccatcgctgtggggatcatggctaacacacccctgggaccccctcttcaaccctctctaccagggagggagttctcctcaccctactcctttcccccatggcctccctcattggataaaatacaaacccatgagtccatatggacagtaaacagaattgaattaaacctaagtagcaagaaacaagcccactccctatctctgctcagaggttgaaaccttctacgtctcccagactccaggcataggatcataagaaagcagggagcatggaggagtccctcctaagcgcccccttggccagcccctcactctacaccccagcctcccaggccctgggtgagcacccagctgccagctacaagctctgctgcccaccaagtcagtgcatccactcacagggccacgggcacgaagccatgaccgcttgccaagcacatctgagcacttgggagcgcagggacctcacagacctcctggcccaggttggacagggagcaaggaggacgaggcccgagaggaggagtgctttccccaggggcacacggcagttggggcagagcccacctccagatgaggctctcgccactgcaccagggggtttaaaatccaggccagccctctgtggcttcttcccacctgctttgtcacagaataagcagagcccccccaactaaacccagtgaatgttgggacatccccttacctctctgggacccctcccacccccgccctccctcagctgtgcagtgagtgccccacgtacccccagctgtggcagcccagagcctgccctctctccacgccttcccctcccactggtcaaaactgacccatccttggtcccctcaaggccctgcctctgctcccagaaagctgggagagtggccactgaacactttggagactacatagagacattcagtaaagtggggtgcgctgatcgcctataagctggcacgcccctttctacattcctcccacaggaacgcacacatgggcacaggagccccacgcagccatgcactgcagcaccgtttgcaaaagcagactatcggaaatgacctaaatactttacaacagaatggataaactgtggtgtttgtacagtggaaagaaaatagctctcacaacagtaccagcacaaccgaatcctgagaacaggaagttgatcaaaaaggcaaattgcaacatgatgtgtcccgtctatgaggagcttaaagatcacatataataagacttaatgtatagggagacacacatccatatgaacaaaagctgcaggaaggcaggagcttctgtctgttgcactcatcgcaacctccccggagcctagaacagtgcccagcacatagtaggtgctcaataaaagtatgctgaatgacttccttctaccaccttcagagttgtggttacctcaagagaggaaagcaaaagaacaagactgagaagggctccatggggtgggaggggggcagggggattggcttctagacaatccatgttccatgttttacttctttaagcaataatcagaagcaaatatggcaaaatgtaaatgcttagtaaatgtggaccacagaatccaaatcagacaaaactttcagacacaaggcacaatgatggtatgctcgtcctcatgtggtttgtgctgcccgatggaggacacaacgggacacaccccagcctttcctttccatctgtggaatggagccccttagccgctcccagcccagtggcatccacagggcactggagggcggggagtggggagcctgccagagaccgcccttctcccaccagccttctggctcctgaaatcctatctgcccctgaggacaggctattagccctcccctgtgcctcccccagggtccagacacctgccctgacttgaatgtgacatagagactccactagcaaaacttgatactggcttcctgttgtattttgtggtctctgagccccttctatttgcggtctgatgacctttcccagtgttctccaggtccagccaatgtatctgtgtcagtgtctgcctccaactgcactccccaagggcaaggccgggtccgtgcgttcgtgtgttccttcattcatgcatgctttcatccaagaagcgccctgctcagttcccagcacaatcggatgctgagaaatgataacaagcgagatccctaccttggagctcatggtctagttgggaaaagcaagaccaggaaagagagcaatcagccggaggagaagtgcaaggggacaccctctgggctggcaggagtagacagtggcaggggatggcccctgggtgccaggcccaccgcatgcttctctgcacttcacgcatccaccaacacaccctgcccgcatgctgctactttcccttcatggagtcaacaaatgtttaccgagcttgtctggtgcctggcaagttttagatgctagggcgcagccgtgaggatggggcccctaccctcacacaacctgctcatggtggcagaaaacctcttggaggcggggcagaggaggaaaccagcagggtgatggggggcaggggtgggggctgcatcccctcattccaccccgttgggtcctaaaggacaaggagggtcaggccaggctgtgtagcttaagaggcagaggcaaatttgagtctgctctgacttttcccttggagctgctgccttgcccgagagccaggaactgaaaacactttagacttgtaaatcccaccctcaagtgagagctcgctgctaaaatgacctggtttctctgtcccccagtgcctgggattgtcagcacctggctccctccatcagcaccggtgacccagggagtttgtttgagcacagggacacagaaaccgccaggcaagaagggacaccccgggggagccagtcagccagccttcctacctggagggctctccctcgtgccccaggggactcaggtttacacacactgcacctgtgcccagcttcctcgtcctccccacacctccctgccccccactagatggctcttcccattctaccagtctaaagaagccctccccaccatcctgccacccgcccccagggaacctccaggtcccctgcctttgcaacaccccacttgaggtggccttccaccagagcagcctgctttcacctaagtccaccccaccatgttgggggcagtcaggggacccgggctctctcctttctccttcctccttccttccagaggtctcaccctccaggcttgggcatctgtctctccgtcctagtctcattctctcactcaccaggagacctacccttgccaggccctgagtaaggagctaagtggccagcatgcaggcagcgggatgggccccgttgggcagagaggccaggacagggcgccgcatccatggctccccaggggactccacgtccaccccgtctttccccagctcccagggccctagggtcacactcttctacccaggctgttcaactggcctgaatagcaccctgagtgctaggctctagactagggaggagaaatttccctacagtggaagcatgcaggtggcccaggaaggcctgttccctcacagcacagtgagcagctgcagaccagcacagacacgggctcctctcctctttttcttttcttgcttttttctttttttggtccttttaaatttaaaaagggagaaaaacaataaaaagacaaatcctgggaaatcaagtggaaaaatctacattacagcaaaatgtgaagacagcaaattgcaacatagaaagaaaggtggggggagttacacaacccaaggggggtcccaggttcctataggttcccagcagagggggaggtgggaggaaggcatgaggcaggctaggagttaccctggaccatatggcaccacacacatacacatacgcacacgcacgggcacacacacacatgcacaagcacgcacactcagccctgcctcccactccaaaagccaggtcctcttcccaaatccgctttcaggagagggacccactcagggggtcagtgactaatccagtgctacttttgttttcaggcagcagagctgtggctggagggtgttttgaggtcaggaagatgccaggccctgagagactgcccctgatgcctggctgttccagggtgaggagggctgtgggagcaagtgagaggtaggcctggactctaaccaaccctggctcctgctgggtctggggctccccagggggcttaaggcctctagttggggggagggtggccattcaggactggttcacggccactgtccctttctgctcctgctcccagacctactccccactactctccacttgacacagctccctgcctacaacccccagtgactctgtgcgtgcatgcacgtgaatgtgagacagagatggagacagggacagggattcgaggtccacccctcctcctcaggtctctaacatccagccttacccgggcccctacaagatctgctatccaaccacatctgctgcctccacaggccttcgcagaggatgctccctctgccaggcccccacctggtgctgcagggaccctctgcagccttccctccctgcaccttggatatatccttagtgtctgtagctctgctcagagcctcaaagggcccaggcctcgtgctgtacctgctcgagagataggcactgattcatgcttgctgcatgaatgagccactgcatagctaactgagggggatgggagggacagagggacagaggggcaggggcagctagcagggagtaggggcagaggctctgcaggaatccagagtggggacccatacctgctcaaatccttctgcctcctctgggagcccctgacccctgcacctgtgacctcccctttgagttgccgcccagtcatgctgagtgcccagacatttgtatgccaggcactgggcacccactttgtgcctggcacctcgtccatgccagactctgggctccagagataatccattcacagcatctgcccttgcaggatgcacttgtgagctctgcgcacatgcatgggccgggcatcacacacacttggacatcttcctcagtcttgccttgcttggagattttatttctccaactagatgaaaattccttgctgtgaacacttaggaaaaacaagaacaagtgagggggcacctggctggctcagtcagtggaacatgcagttcttgatcttgaagttgtgagttcaagtcccacgttggggatagaatttacttaaaaaaaaaaaaaaacaggaagtgaagaaaagtgtaagagaaccatacaaactggcaggtcctcagagtctgaagatagcagggccggtagaaaagcatgaagtagaatattcaccctccctgtatgaccagggtgacttcccctagggaagaagtgggccaactgtgagagatttggctggagccaagaagactcaggtaccaagggacaatgaagagaagacagtcccccagtttcctgtccaggtgcctccctaacacatgccaccaaaggtctgtgccaagcatgaacactgcacctgcattcggcttccccccacccccgccccgcccctccagctcaagaaagagcatgctagctgcacagcttactggctgtgtggctttgaacaagtcacctagcctctctgagcaaaagaccttccaactacaaaatgggaaaggactgggacacctgggtggctcattggttgcgcatctgcctttggcccagggcatgatcttggaatcccgggatcttgtccccacatcgggctccctgcatggagcctgcttctccctctgcctctatctctgcgcctctctctgtgtctctcatgaataaataagtaaactcttttttaaaatgggaaaggacttaaagaaactgcacctgatggagttgcagtgagggtcaaaggcagtggcgcctgtgaagacctgggtctgcctcctggggccaatgcctttggggacagttgaggacagtgggggtaggagctgctcacacaggagggcgggagctgggaagacagagaactcattccccaggccaaatcaggacccagggctgctgaggtgtgctctgggggaccagggacaccatgataaaccaggacctgaccccggaaacaaatgctgggcaaaacatacacgtttcccttcctgaataatctcagcacctagcatcactcccagccacaccccaacacacacatacacacacacgtgcacacaggcaacacaccccttcacaagtcacataccccaacctcacactaccttagggccatggacccgcatgaggccaaacccagccccaccccatcaccagcacgaacctgatgacagcctgtgcagaggacaggcacatggccacactcaggcaccaacgcacagtcccactcacacaaccaacagccacacaagctcacgtggtgactgcaaggcctcacatgaccactcgccgcacccggcctccctcagtcactcagccacagagctgggtacaccagcacactcgtgtgtccactcctccttgaagctgccacaccagcaggaccacacctgggcaccattcatacctcccctgcactgctgcctctgaggcgggcctggcttgggagtgccaggggggtgggttagtgacctaacggcggggtatggcacccctgtcttccaacaactatttaccaagcagcttcggtggcttctctgtcaaggcaaaccctgtcttcctgctgaaatcctgtccctctgcctccactccagcccagccttgcccctgtggagaagcaggctggctctggggatgcaggggacacagatccagagccctggcctagtgtgacataggaggctgagtatgggcacagaagggcccatgtcgcacttcaaccaccgggttgctttgtggtaaaagctactttgcccaagctctccgaacatccatttctgcatctgtgatggaatgacattacccccacccccagaaatacaaggttgtcgtgaagatggacgggatcccccgtggacatatctggcctccagggcaatacttaggggagggggagagggcaggttaggggagacttatcagggcagctgtggggctcactgccttggagctgagagctgctatctcctccccaggaggctgctgggcagtggcagccttgttcagagctgcattattcatggtgctcagctctgagcagagggaaatttgctgagtgatcgacctaatatcttaacacaaacccatttaggcaaaacacctttgaagcaagaaaggcaggaaaaaaaaatagaaaagaaagcaaagaggttcggaggcaggtagtgacaaaaggctggttcctatctgcccgcacccccagcaccccccccatccacaggatacccctgccccgactcagcccccccaacctccactttccctgactctcaggcatcctttggttgaaggaatcccacccatttctcagatttggctcagagaggaaggagtctgcctaaggttcacacagcacgtcaggggtcagccggacccaggtctgctgagtgctagctcagaattctctgctaaggagcccttcacagagcaagaccccagagctccagtgacacccctgcttcctcagcctctagctccataccctcatacagcaggacctctttctccagatcaactctgattttcccgccctcagcctctgctggtccctctgccagaaatacccttcctgctcctctacccatccaataccctggaggggctcattttctcctccacttccccctggaaacatgccagctctctggcccagctggagctcaccatgcccatgtgggctctccccacaccctctccactggcacacggcatcctcctgcttgtgccgtggcccatctgctaactctcctgcttcagggtgccagggctcccagctcggccacctctaggctgggtgactttggacaagttacttacctctctgagccttatttccctgtactacagtgtgaagaatacacataagaggttaatacacataaggtgctccgaacacagccaagcgcacacgcactcagtaagtgtttgctcttgtaatattgtcgggtttctcccatcaccccataagcccctttcaggggagaccatgtctttctcctccctaactccccagtttccagcagagtgccaggcacacaggagggactcatcaacattggctgaactgagcctcatttccagcagcatcctccacctggcctctccacaccagactccttgagaggaggagtcagtgatgggctggttgcgggggtggggggtggggaggggtgtcgcctggggggggcaggggtgtgaagatgacctctggctcgctccacccccacagcaggaacgtatgctcggatgggcagagagaagccagggcgaggggccggctgcctggcctgcggtttggccagggaggaacaggcagctgcaggccgggataaaatatttaggagcccacatccccaggaagtggagactgacaagcaaaatgaaatgttgagatgtaattacccgggcaggccaagcatgtctccccgccggcggcgggctcagcaccgccccaactgccacaagcaggcactgggtaatgaagtcctcctgggccctctcccatgccagcccttgccccctcctcttccggccaggccagcaggaggggcagcagaacagcaggacatgcagcaaacagggcgggcggggagggcatggtccagccctggcatagatccacccaagcaatcccttcacctccactgggcctcagcttcctcagccagaaaatggggctgctgagccatgcccaggagggaggaccagacggcgaatgtgcgcgtgcttcattaactggcatgggcagaggacaatgaaaggacagcagtgaggacagcagcagacaccagcctgacccagcatgccacgagaggcattcttgaggcgctgggctgcccaggactcagcttagcagaagctggtagaaaaaggtctggggctgaggcccagatgtgggtgggccagtctgctgtgctcacctcacccccagaaaccttccccaggccctcctaacatggttaggccacatccaggagcagagagacaggcacctggacaggggctccaggcctagatcctgctttgctcagactcttatttctgccttagtgcccaatcaccctgcccagactcctccttcctcaagtcagcacctgtccattcttgaggattcagggcatggcctactcctccaggcagccttcgtgggtatccccaggctccttctcccttgggagcctgtaacaattccaacatctccatcactgcacttagcacagtgaatgaaaattatgggagatggccgctgtggggcccagagcattcactgattcagcaaccacttgctaagcagccctcctcccagtaccaggcactgtcctcgacaccttggctacagttactaataggacaaccaagaatcctgcccttgtggagctgatagccatctatggagtagacaacagatgctgaggaatgaacgaactaattaattaagagtcagtctaccgtccagaaggtcttggcctcagctctgctcctgtctttctactttcctcttcctgtcctctcccaccccatcttctgtctcttatctctctctctctctctctctctctctcacacacacatacacacacacacacacacacacacactaccccattattccacagaccctcatgttcatacagtgctcacatgttctctcattaattcctcccaatcagcccacagcttaggtgaccattttacagataaagaaaccaaatctcacaagccagagcctcatcctggctgcctccctgttcccttttgccagcttctcttcccaccccctccacctttctaactctttctcccaccttctggggtgactggcaagttgcctcctctctctgagcccatttccctctctgtaaaatgaggcaggcaaggcaggctctgggagatggtaaatgggacccatgcttctttcccccattctccactcagcagcccaagctgtgtccctctccatcttcattctcatccctccctcccctctcctcttgcttgtcaccttgtcctgcttcctcctcccatcccaaggcctcccttgggtcccaagatgtctgtaaaatggtcgttagctttccttccggctcattaaaaatgcgaatttgcatagaatacccatatgatcattctgtctacagcaaaatgggacatgaatataaggcaccatgcaagtcagggagaaaagggaggacggtcacaatgggaagggcaggaagaggccaaatgctcaccactagagtctcaggcctcagagtcagcccccctcgggcccttcagcccttccttgccctttctgatggctaattcacctgttttttcattcttaacagtaaccagcaaaatagggactgcaattatccccattttacagatggtaaaactgatagccaaagaggaacagtggcctgtccaaagacacctacagcaggtctgtggcattcctggggggcagcactctctgccatggactagactcccccaacccacgtaggcctgctgctctcaccagaatgctgcccctcctccctctcagaaggaagaggtcatgaagagccacaccagtcatgcagttcttctacccagaacagcccctgctcctctgggacaggcccaccttttttaaattctcctcccatcgccctctcctcaaggaagcttcccctctccaaaacaaccatttagccaggtgcagaaatttttggagacaaatgtttccaaacctcttctcccagctatagacagttgacccttgagcaacacgggtttgaactgtgcaggtccacttgtacgtggatttttcttggcccagtagagtactgtaaacatcttctctctttcttgtgattttctgagtgatattttcttttttctagcttgctttattataatatcacatacaaaatatgtgttaaccaactgtttatgttatcagtaaagtttctggtcgacagaaggcaattagtagttaagttttgaaagagtcaaaacttatatacagattttcaacagcacaggggccagtattcctaacccctatgctgttcaaggatcaactgtaattacatttagacctgcctcatcccaaaaagaatttgcagcagtgcccaaaaagaaatatacttggctaaaaagaatttgataacagaattgaggagatagaacctctactctatagatgaggctttgctcagcagccacagactggcagagaactggcagtttgttgggaccagagccaaccagggcttcccccagatggcccaccttggggcaattgtcactatccgtggtgctgaacccaggtgtgcacgcgtgacctccagtccacatgcaatttaggagcaagtccttcgggctggagcttcaaaatacaccctaaatctgtcccttattatcagccccacccccagcctaagccaaatcacttctcacttggatgatggcaatggcctcctcacttgcattcctgcctcagtgcctccctctgcccagtctgttccccacacaaagccagaaagattctattaatctcaagtctgttaacatccctcctcttcccacaaacctccaatagttcccatctcattcagaacaaaatctaaagttctcccagtggcctacaaggccccatgtgacctgtccctcttcttctacttccctctacctcactcactctgctgcttcctcttggctattccccaaactccaggaagcttcccacctcaggccctttgcacttgctggtacctctgcctggggcactcttcccagagatcacaagcctcactctctcactgcatttggggctcttctcaaatgtccatctctgcagaaaggcattccctgaccaccttatatgagataatctcccctatctggccctctctgtcacttacactgatttattcttctccatagaatgtcatcagctcctatctaaaattgtattacacagtgatgcatttacttgtttgttataagctcctttggccctctccccaaatgggagctcacaaggccaaggatctttgtctgtttggtccactgccataggcccagtgtcctggttgaatgcctggcacacagtaggtgctcaataaatatttatccagcaaatgaatgaattaccacccaaaggcaaaagatgaaggaggaaatccctcactcctcctcaccagctacatcccatggagctggctctgtgtaatttagaggcctagactccatctttctgagtccctaagaactctaggaacgaacacgaggggagctagcattgaagaagtgactagcaagggatgtgtccctctctatctttggggactgttagacagggcctctcataggctcatacacagccatcatgatggtgacacctgacccacctcccaccaccaccccacacacacacactctccatcagaggaacccctctaccctctcctcctactctggctctgagcagaacctctggcctttcttggggacagtccctgtaggtccctccctctggctgacccaccagcatttccctggagaaggccaggtaaaaggcaggctcaactgcctcaaagaaggctctaccttccttccctcaagttccagagtcacacagacctaagtgtcaaccccagctctgccactgccaaagcagtgagggcccaggcaagcctgtgggtaacctgagccatactcgcctctactaaaaaaaaaaaaaaaaaaaaaaaaaagggacaagtctcagagtggctgtgtaggggctcatactggggccagagcctagcagcttccgtgaggacagttaatgagatatccccaagaactatgtatattaaaacaaaaggagattcaggggttttccccaggccaggccagcagaggagccaatgcaggagtcagagcctgttggggctcaaagaccctgggaaggggctggtggacatagaatagcaaggcaaaaatggctatgagcatccctctgtgtgtccatgtgtgtgaccccattgaagaaggcacccagcacctttgtggtcttactgataaagaactggaagctcaggaagggaaagggactagcttaaggtcacacacggtagaggataaggctgagagtcccccctgccccaggacactcagcagccccatagaggcctgaagcaggaagtcttagggtggagaagaaagaaaacggtgagctcacagggtctttctagagctgcagggaaaaagcagtctggagcttgcttcagctgcatctccaaggagctcagagtgaggtggaccccacctcagatgggaaacaggactggggaccccacctcagatgggaaaacaggatgaaatccaatagtcagccactaggtgcagagggttcgtgtaagtcaagtcccaaaccccagcagggaaaggtcactggtcttcactgcttgctttttaacaaaagggaagaggtcagaagggatcaggttgccatgcacagggctcctctgtgggctcaggtccagacccaagaaccagacacactggcagctgaaggccaagcctatggtatccagattttcatgtgatgaggatggacagaaaagctaagagaggtgagtgaggcatgcagagatgcatgctgggggaactcgcaggtcccctaacctatcaccttcacattggccatcaagctgacactccaagagggaaagtgactggttacacagccacccagagacagagtcagaaccagactgggccccagtgcccctactctgattcgtcatggtgacaatggatgcacctttggtagcctggtgtttcacttagggaccagactgtgctaaatgccttacaccaattcattcactaaatgctcacagcaacctaatgggggtactatctatatccccctttcatgaagtagaaactgaagcccaaagaccataagggactgctcaaggcggtgcagagtctggcggcagagacagcatctgggctcttaaccactccactctactacagcatccagaggacagggttcagaaggtcaaagccacaaaggggctgcaatccacaaagggaagttttttaaaccccaaagaaatcttcaaacgtgttccacaaaggaggctggtgaaaaaaaaaaaaatgttgcttcctgtccaagagggcagggatgcaaattcagagcaacaagggcttggtgtctaatattttcttcctcctgtaactcccatcaagcttagaggcaaacccagaatggagcacatccctgctatgataggccagggtgaacacatcaaagacggaatggagagagaaggaaaagtgacccaatgccacccataccaggggactcacaaaataaagaggtgtcagcaccttgccaaaggccagagtggcagagaaatcagagtggacaggcaaagtccccaaggcaggtcaggcaagcttggggttatcttcacagcaatacaaagattgacctggaatcaccgagcagtcacattgatgccagcaccttgccaatctccaagcactggccaggagactcaactggctcgtggtaggcctcatgggttggcagggggtacccatgccaggtccacttaatttccatctatagtagagtgacaggcagcagaccaaggcaggggaagtcatgatgggtatcaagttcaatgaggactgactactaagctagaatggtgggtactggctgcaaggtggggcccacttcccttccgcatccttggaaaatacatggctagtgggcagggcatactgggccccagctgctgggtccctgtactgtgactcccagaagcagctggggggagagtccagaggtctccccctcagaagatgctacaagctcatatataccaagctaaagccagcagcaggacccctccctgcttccagctccccagccctttggctaatgtcaaccacatttcatctgattacatgctccaggctctgtccctgtacaattggcccaaatcatccctgaaccaaaagaccaaactctgaagtgctaccatttgatactcattcctctgggtcttcagggatgtcttcttttccagcactcctctgagagcctttgcttatggagaaaaatgcctggagcccagggccatagactgtgaggacacagcctgtagggggcagagttagacactggagatgaactgattacagatgagggaaggagggcccagaaggacagtgatgggcccaaggacacagggctggtcatctgctggcccacatgttcattccataaacatctattaagctcctgctgtgtgcaagagagggcaaggaggacagagccaaggagcccttcctttcccagcctcaagaagcctagagtcaaatggaagaggcccagggaaagttcagtaagcactggggtgggtgtgcttgaggcttcccaggtggtgagccctggggacaatcatcctccctcctggtgagcatctctgcctcccagggaggaaagcagatgacagaagccctcagggaggcagggccttggcctgagccttaagggcagagaggacccgccagggccctgagcaaatgagacacagaaggtggagacggtgtgtgctaataccatcccttgggtaagcacacatgaccccaactgccaaaaaatttttaaataggattggcttgaaaaaaactctgttcagttccatgtcacactactccctgtcccatggccatgaggaccaggccaagcccctcagcggggtcccacctgcctgactcactcctacctccagcctcttactcatgctttcccccagctggcatgcccttcccctcctcttcacttgtctaagctatgtctttgggccgatcccctgcaaccctggagtatatcccttactttaccagatgcatggtaaactctactgagcccctactgcatgcagggcagggcgtgaggtcaggtggtacactgctcccctcaccctacccagagccagcagggcccctgggacctctcctcgcctcacacaggagctgcatacctggagggtgtgaagcccaggccagctgggaaactcaagcaggtctggaaagctcagtgtcctccccttgctgcactccaggaagaaaaaaaaaaaaaaaacacccccaagccaggcactgcagcaagaaatgagaggaagcagggcccttcatggcagcctgatgcagctgcagagcagctccgagctctcatatccctgcttctgcctccgggaaaggattctgtcctcggggagtcaggagagggtcactggccagggagcttagtgggaagggagctggggtctcagggcccccggacctaagcccaggtgcctctgctctgtcgacctcagtctgcccttctgcaggttgggagaacaacctcaggccccctaggagaagagctaaagaagaaagcagctgggggtggagtctgtgatcgatcagccactcgttccccagatatttactaggcagctgctatatgctggggacttgctggggattcagcagagagcaaaacgggcaaaaaaaaaatctctgccctcgtagaccataaacaaatataaattgatttgtcaagtgctataagaaaaacagagccaggaacggaatggagagcaatgggccaggggaggggctataatactgtggtcagaaaggcctctctgaggaggggacagctgggaagacacctgaatgtggtgaggatgtgggcatacggacattcacagaaagatggctccaggcagaggggccaccagcgcaaggctcctgaggtgagctactacccagtgtcagaggagcagggaggaggctggtgtggctgcagcagagatggaagggaggagaaaaggccaggggcaacgggaagggaagcaggcattcggtccactctcagggctctctggatcctggaggcacctctctgctttcccagatacataagcagagctagcatcccccaaccccggtggcacaaacctttccggctggccaacctcttccccatccccttggagcctccaggaggtgagtgttccctttacagccagagaagctgagtccagagatgtcacatacacaaccggacgaggaggcgccccagccttgagcctgggctgccgccccgccagtcactgcccaagctgctgcgctgctgacagggaccatctaaatgcaagcctgaagctcagcagtgggagctggagctggaggtcagaccagtaacagcttgactcaccagtgtctccggaatatcaataggggacacagggacacagcagggagatgaggctttggaactcctcactgtgcaagggacagggtgtcctccaaggagctggcctgatccatccacccccgccctctcctgctgcatcgagtggccaccttgttcccaccttagaagcccatgcctggaggcacccaggaggctggaatcgctccccagaaaagaccagaaccaaactccccaggtaattccatggagacgcccttgtcaggagctgacctgtgtccttcctgccacatgcacttgaggtggggggaccatcagctggattcaaattccactcctgctattcttccagctgtgtgacctcagggaacttacaacttctctgatcctcagttttgccatccgtgtaatggggttgtcttgagggctaaatgagttaacatgtatgaagtacacaaaaggagatctggtccacagaagggctccatcaatattacctactactaccatccactctcccgtcacccacataggaggccctaggatgctactcctgtttgaccttaagcagaccttaactgaccttaacttctctgagcctccattttcctcattcgtgaaatggagccctacaggaaataaaccgaggctcacatagggccccatggacaaagaaaggttgtgggggtataagaatttataccccaggccccacccctgagagggcccaggatggtggagggaagcacccagggcaaggccatgtctcaagggtaccaccccctcatgcctgggtgactcagtcacattatctccagagcccaggcggagtctgctctgcatgcctaatcccaacatcggtttcactcctgcctctctgccttcccctcagcacaggctccccctggcaaggaggagggagtcccggcatccaaagacgacgggaagagcaccagacaccgcacgtgagcacgcacacaggcccaccagtcacatgtccagaaaatcacaaatgtgcacccccaccaccacgtgtgtcctgccctcacggcttctggagctcacctggctgccctgtggctgccagaccagctgtcctataagtaccagcaggcctgggctcctatggctttgtccctagccttgtccctgaacatgaactacagcttcagttagcgcccagcatggtcccctcgggcgttccagctcacccggggcctccccaggagttgccgggcaatggggaggccggtagccaccagatcccccaataataaccctccgatatgtgttcctgggctcccacggctgtgggccagaagcatgttccactctggtagcaaccaggtttatcctcatttcacaggtgagaaacccaaaactgagcagctgagtgactttcccgggttctcacagccaataggtggacaagccagagcccagatctgcctgccagaagctgcccgctagccacacgctgccgcctctgctacgggggccgcggggagacgggcagcatagtgttgaaaggcctgggtgggggatccctgggtggcttagcggttgagcgctttccttcagcccagggcgtgatcctagagtcctgggattaaatcccgtatcgggctccctgcatggagcctgcttctccctctgcctgtgtctctgcctctctctctctctctgtgtgtgtgtgtgtgtgtgtgtgtctcatgaataaataaataaaatcttaaaaaaaaaaaaaagaaaaataaaagaaaagaaagaaaggcctgggtgtgacagccacactccaaggcctgctccaacacctcactgtgtgagcctgggcaagcccctctgagcctcagttcccctatctgtaaaatgggaacaaaaagaccagcccccacagggttgtcaccaggattcatgatggtgcagggagggtgcctggcacaggacagggctcagtcaagggccacaggaaggtctgggggctgagccacaagactgaatgttcaaagtaggagcacacagcgctgatgcgggctgggaaatgcaggaccagggcttcctttaagccccaagccaatggcccaatccgtgctgggtgcaatgcaagagctccccacacagaggacagagctgggtttcagttcctggtcctccatatcctggttacgtggttggggaaatgacctactctctctggccttagtttcttctcttataaaatggacacaactgtgctcccctacaagaccccaagcccacacaacaggcacccaggacttgctggccaagctctcccctcagctctgatgtgtgtcctcagcctagcaagtgcaccctcccctctactctgctccctggcactcttctgagcaactcacagatgatttatatttcagagagtgaatcaatacaatatacggccaaagacatctttaatctttcacagggattaggctacaaggtacagtggcctctttctacaggccgctcaattctgatttcaatttggccagctggagcgcagctttctctctcctttttcttttcaccacctaaagacgttcctccaaatcaagtttcattttagcaggtggggtggggagacctagctgcccatacccgaggggaagcctagccagggccctggggctgcagggggacagaaggagcttttaaggacatggaagttcaggccgggtgggaggccaggccctcggtgatgggagagcacacagagggcaggggtgcggtgacggacacctgtaccaggccaggagagcccctgagctgcaggcgctggcagcacagctagttttcttatttttctagaattctttgtttttaaaccttttgtaacaagatattttgtgtgtgtgattttctttatttattagagagagagagacagagatagtgacagagaacattagcaaggaggagagggagaagcagctccccgctgggcaggtagccagatgcgggctcgatcccaggaccctgggacaaaggcagacgcccaactgttccagccacccaggcacccctttttaaaaatcttgagtaggctttatattttctagccaccaaatgagatgcttgtggaaaattcaaacagtagtctaagtttcagccaaaacacaaatacctagagctcatcccaatcccatgcttctcccactcttaacacaccagcaagtgtccctccaggctctgtgtgtgtgtgtgtgtgtgtgtgtgtgtgtgtgtgtgtgtgtgtgtgtgagactgtcatccccccatccgtgggaaaggggggcagaagatggagcgatgaatacaaaagcagttccgacgtctcatcctggagccagacagcctgggttcaaatcccttcttcaactcatacgtggatggcctgatgtcggttttctttctctctatgcctcacttcctcccctgtaaaatggggatatccacctcacagggtagggaggattccccaggaccacaggtgtgaaacaggtgttcagcaggggccaggcatgtagggagagctatgtaagtgctgggagtggctcccagggccctatggctgtgtctgaacacaactgaaaactaaagctctagaccttctgtccgtccctctagcacctttgttcccaaagcctgtagaggttacaccataaacagggaggtggtgggcttgtttgggaaaggattccagccaacgggcagagcaggggatggggctaccccagagagaggcacccacctccgagcaaagcagcaaaggccctgtaggcacccagagggagggggctgtggcacagggtctgacactacgggcgggggggggggggggcggcagggagctgcagcccgcctgctttaggtgggagtgggacccctccagcccgtgctgccctctgcctggccagctgcccgagcagggagtggcctggagctgcggccatcggtcagcaccgccccacttccgtcctctccaccaggttgcaggcacccgagctgctctggctgtacaattaaaggggcttatctgagatttatagcaggattatgtccgcagggtgttaccaacaccagcctctggatactctgtggtccttaggaaaagcaattagagtcctgaggttattcgggtataaatatacagatgccatcctccaaggtcgagggcgccacaatgagctatttagagatagagccttgggagaggccaggggccctctgcgaggagctgccaagaggggaagagcctgtctgcctcccccgcacaccccacccatgtgcaatgaaccatcccgcttggcaaggctcacccagacccgggtggagcccccaacccggggcctgaccacagcggctggatgcacaccaccaccaccaccaccacggccccaggcagcctgccctcctcagcaccatcagaactgagccttgcagtgctgggggcttcaggcttgcctaggtattaacccttgttataccagtctcttaccgctggctggtatctaaaagcgttacccctggagcttctgaggacaagtaagggaatggggggagtttaaagggggaaagctggcttgtggtaagggtagggggaggcctccaggagagcacatcactttcccaggtcctcacattccccccaggggcaccaacttccctgaagacaccaggaaccaacacagccctgctggccctgcctctcactcccaccacacagcacaatccttccaagaacctgctggtggagcccctgtctcccgggtccctgagacacccccccccaccgccccagacaaagccacctccatccccaccccttccccttctccatctgcctgaaaacagcagctgttccactggatcccatgccaggaaaactgacactccctctgtctgcctggccacgctggcaaaagtcattcacatcccctcctacccctggggggttacccagccagctggggaggccacggactgctccccagggctcagggggctgaggtccctgaggggaatggcccagggcgggcagggcccacggcaggacccagagagcggctcttgggcagtgcttggccaccaggccctgacacccgccccccttccccccctgggcccaagcacgactcaccatcctcccgggacttctggatgaaggcctccacaccactctcaccatagctgccttccgaggccagcgtggacacgtagttccacttgagggcacggacgatgtccaccatggcctgggcctggtacgtgtccgacgggaccacacgggagaagaagtcgtagcggctgttgtcactcaggtcgggggctgtggaggcgtagctgatctgggggatctgggggcgagacgggccgctgatggggcggctggcaccccctccacgccagccaacaccacaccaccactccacaccgacctccttcccatccccagagccacaggaagttggggggagacccctgatgcgggctggatgggtcctagcccacctgacagaggaggaaactgaggcccagagagtgtgagcacctggttgggtggctgtcccctggctccagaccagggtcccaatgcctcccacctcctcctggtccccgccagtcctccccatgtcctccccatgtcctctgcatccccgacaggaatcagactggcatcagagtgagaagtaactggtgcaccagcacaaaccctcctcttccagaaaagtgttccaaccagcctcactgggtcctgtgaagtcctcaccacataccccatatacatatgtgcacacacagacacacacacacaccagaatcatagaggattacacgtgtaaacacacaccagagcctctgggtgcctccatttacacaaagaactggaagatcccaggagcagatgtccccagatggacaccacagcgcagcccaaggatggggtggggctgagggtgtcaagatagacccctagaggtcatttggcccatgaccttcccccaggcagcccctcctgtcaccacccagtggaccctgtccccacagctccttcgtgctgcccagctcagaggagacagaacccaggtccctgctctcccacaaccctgcccaccccgtggatggactcgcaggaagacagagtatgtggggaccccgggaggtccctccctctgcagcctgcaacacaggccccagacaggcctccatggcagactccagccccctgcctcccgccccagctctcccagccacagagcacctttctgcccccgcagacctcaccgaggccctcttgacacaaaggtgagctgcagagcccttaagcccttaagctgaccctcttcctgtggttgatatccaaccattcccgaaggacaaacacctctcagccagtctatggcaccctcagttgagggtgggaaatgttgcagggggcgagaggatttggggtgcaccctggacaagtggctgcccacctggcctatgcctatgatgtccctacccccagggacagcagggtccgccttccactaaggacacccattgggacaaggacacggctcagccccccatgaagttccccagatgggtcctcattgaactcactcacgagaaaggtaaggatggggtaggaaggactggttttccagatctggggagccaactaaaggtaaccccaggccgtctcacgtagttcttgtggtccttctaggatgccatgaaaccattgtgatgctgtttgtaatagcaaacctttggaaataatccggtaaaagaagccagggccccacaagaagtacatcggccgtgaaaaagaacccggcagctttccatgcgctgctctggatagctctccaagacccgcagcaggaaccgagcacccagacacagctctgtgtgtgagcggcaccttgcttgtcgtgtgcggggggcggcacagattctcactctctgacgcaacagggaaccaggtggctggggggcagggttgatgggagacctttcccctgataccctttgtatattttgcatgtagaataatgcaaacataccacctgcttggaaaacaaatcacgctaaaatcttccctctcctacctgtgtcgacagcctccaaaaactagccagtcctctctgcctcggagagcactgagcatgaacacagcaccctctagaagtggcctctggttggagagttgatggttaattttaggagtgtcgttacttttagggttgtagaggttggttggtgtttaaggggctattatccagagcagcatctcagccttggcattgttaacattttggggtgtaattctttcttgggaggctgttctgggcactgaaggatgtttagcagcatccccatcccctacccactagatgccagtggcatacccctccccaaattgtgacaaccaaaaatgtctctagacattgccaagggtcccccagggtacagaaccagtgcagaacccctcccccaagtggggacctactattttagagatctgtacagaaacattgagggatgcggtgatacaatgaggtcgcgggtttgcttcaaaagaaccacagtgggagcacatggaagaaagaataatagccaagagcagacaactcagtcccacgtacacgggggctcaccgtgccatttgctttgtatgtgtctgaagtatccatatttaacaaatttttttaatgttctatttatttatttgacaaagagcgcgagaacgtgcacaagcaaggggaggggcagagggagagggagaagcaggctcccacccagcagggagcccgaggcagggctcgaccccaggaccctgggatcatgacctgaactgaaggcagacgcttaaccaactaagccacccaggtgcccctgtacttaacaagtttttaagaataagacaaaataaaacagacggcactccagggtcatccctctgaacaggagagccccgaatttggagccggagcaggtggtggagatcgtgaggccagggcctgccctaccagcctgccttcccagcaggtccctgagagaagatggatgtttgtcagcttccctctgcgcctggccctcagcaaggagcgctaatcaaacacccaggaacccactcttcctaattagaaaaagctggtctcctacttctgctgttttctcccaacccggcgctgaagtcaaaagggactgcggggatccctgggtggcgcagcggcttagcgcctgcctttggcccagagcgcgatcctggagacccgggatcgaatcccacatcgggctcccggtgcatggagcctgcttctccctctgcctgtgtctctgcctctctctctctctcactgtgtgcctatcataaaaataaataaatagatagatagatagatagatagatagattagatagatagatagactgcgtacagcagaggggtgggaagcccagggaggtctcggggcctctcacacaggggccttctcactcttcatccctcactcctccctccaagccacctcccaccactgcagtgcaggactcagcataggctgggacgacagatggacggatggatgtccggacatcaggacccaggccctccccgcactgcaggcctccattcccaaaaagtggggagccccaagcctggggttcctgcaggggaagtctgtcagcctgcaggggtgccccggcctcagatttcaggagcccaggaggggcccctgctctgctgccaacaattcctgagacccgggaaagggacccagcccctgctggttaagagggaggagcgagcctccagagcagagtcagggaaacaagccagcatccctgcctcctctcccccacacccccctcacaggctcctccccagctccaggccctcccaagcttcctagcacgctggttttgagtagagctttgggagctcaacggctcagattcaaaccccagctcagccccccaccagctgggaagcctccagcaagttacttcacccctccagacctgttttctcagctgcaaaatgggaataattataatccctgcctggtatggttgtaagggtcatatgagggaatttccatgaactgctgaccagcagtaagcactcgaaaggttagctctgaggcgagctacagtccctcctgctacaccctcctcagcctctggtccctgtgccagctctctcccagctacagctgtgctcctaggggtgaggcacctcctcctggaatgctgatgaactggccggccctccaagggcctccctcctgggcccacccaggcctgcagtgggtggggaggggcaggggcccccccgggatgccctggacggggtgcctgggacagcctggcctcacggggctctgaggtctcctcagctgtgtctttgcagccccgctggagcaggaggggtgcctgattaacattcttctcagagaagtcttctcctctgacaacagcagcatggcagaggagggggcagccacagccatgccagtgccagcacaagtgtcagctggaacccagattccaacggcgcctaaccaaccacagctggcccactcgcagtccacctgcctggcttcctctgcctacagagcccgtatcacctcctccaggcagccctccctgtgttccagagagcctgctcagacctcccacagcaccaagtggaggtcctctaggggcaccaggcctgtccccctggtgtgaggccgcctggactacttgccaactcagcaggcattctaaggtgccctcgacatgctgggcaaggccacttgtggagattcagaaaaaagtggactattcccaacacccactgcatcccccgaaaggggcaggtgggccaccccagagtgacacacagtgtgtctggagctggcacccagcagaacttcccacccaaggatgagtgactgaggggagagatggaggaagtgaagaaatccccctttctctccacccccccacgtgctcacgtttgtgctcgcgcagtctctctctctctctctctctctcaggtttctggagtgacaaggaggtccatgccacgtggggaaagacaaaagctgcttccgggcttgagcaacaatgaagatgaatgccaagcgcatcagacgggggcggggggcagggcgtgtgcgcacacgcgcatgtgcatacacgtgctggagcgtgtgccctaaacacatgagcgcagggcacgttcattcatttattcctcctaccaatagtcgctgagtatggacagcctgccaggcatagttctgagtgctggcgacagacgggtggacactctgacctcgtgcagctcccagtctacacggaggcaggccatggaggggtgatcccaagctgtcatatgggatgaaggatccaggagagaaaggaagagcagagcaggggacgttagaggggttgggggaagtctctctgaccaggcaacatctgagtcaagaccttaaggaggtgaaggagggagccacgtgggtatttgaaggagggcatctcaggcagagggaacagcctatgtgtgcatgtgtaagtatgttacatgcatgtgtgtccaggcacacacacacatgtgtttagagcctgaatttattttcaggctgtctcaggcctggccagcatcaagaaacttctgagagtggctgctccgtgtcccataccatccagaggagtttggccacctgcccagcacctcagagccccccagagcatggtccctgaaagctgatacttcattcaagtctgtttaaagcactcagggatgaaattctaccctgacctccacgaagcctgcagcaccccgagccaagaagctgggtgtccatgaccatcacacggacacctcagggccaccccacagtaacaccaaccctcttcctgtgagctttagtgtttaaaagcacctccccttcctgcctcttccctaatgctttgcacagcacataagcttccagcacaccctggagccatcctccctggactgtgcagtgacccagccttgtcatccagctttgtgaccttaggcaaacgagcaacctctctgggcctcaatttcctcccctataaagaagccacagtaacaacagagaggactgcactagcctggtacatgcaaagtgctcaaaacacacaggccctcagcaaatgctagctatttgcatgagaggaggaggtgaggcaaggaccattgtgcccattttgcagatgagaaaacagaggctcaaagagatgaaagtatcctctgagtatcacagccagaaacaaggcacagacggagctcttctgcctccctgctcaccatccccaaatccccggcctagggccctgcccagccccttccagctgactctgctccttccactccaccctgaggccaggctgggcagccacagatgaaagctggaccctgcccccacctgtggccaccagccccagccagggccctcgtggacctcgggaccccacctggccggctgcagcccctctcacctgagcagcagggaggccctgcattgggccgggcagaccctgggccggctgcctgctccttgcctttctgatcctggctgctcaaggcctcaactgcccggccctcagcatcagccatttccccgccggatgaaaggcagccaggcttttaggtacatgaaagcggcacaggcagggacgtgtagttcagagaaccggtcagaggaaagaaggcctggcctgcactaggtcagggctgagagacaccatcccccacctcagcaccccccacccgcctgagccacacacagtctcccaaggggcatctgctgcagacgcacagcacccagaggagcaagaggtgttgccagccacctctcctccctctacggggcctcaggagggagtgtgtctccctccgagctgggcacacggtaagcacttcacacgctctagtggggcaccaagcacctcctcttagccgggtgctgaggaccagcctggtgggggcgggtaaaggtggtcctcagagggacatgctgtctccaggctgacacgccaggtttggggcaacgaggggttcactgggggcctcgcagaggagctgtgtgagagaaaaggtggacagtatgggacatgggcttggacgggccgaggaggtgcacagaggggaacacaaggtcaaggaggttcaaagcagctaggcagagccgtcacagtgaaagaccagaggtatgggtgaggggttcaggaagacataagaggatcaggggcaaggggggaggaccagcacatggagggggtatggatggcccccccggcctcagccctgaggtggcctacttctaacaaggaccccagagtataagagcaaaagagtgaccctatatcttagggcccccctcaaaaaaaacagaggagcagacttccaaggcctgggaagtgggcaggggcaggacggggcaccctgggcatgagactgaggtggcatctgggtcatctttggaaggattaggatagacccaggtaggcctgtcccataagccaaaggccttcccctgtactcagtaggtcacttgggggctgctggccacttcccctcagatcctctgggaatttgggtcaagctggcctgcaccacccacttcaggatggcctcatcaatcagacctcattaccctgctctgcagacacagacccgccaccaactcccagccccaggtgtccagccactcgggggcctggccatgcaccccaccgggccctgagccagcctgtgcctcagtgctgccagtcactcagcgctgggggctgcgcccacagtctccagtctcggtgtccatctctgctccccggggcactcggcctccctggccccgccacccccccaggcctggagactgggtggccctggccctactctacctttacacggacccccttcctctcacaccgtgccccatagcgtctcctcactgccactaagcagtggacatgactctcccagaagacgaacgctatcttaaaagacaatcaaatttgcccatgggacccccgtgtttcctctgccacggccgctctcggggccaccagccttcccctcccccactctccaggcctccccgcactcctcagaaactgttcattcacccacccaataaaggtttacccagcactcactgtgtgtctcgcccactcttcggcacaggggtgagcacccagagacacatccctgctttcatggaacagacattctagcgagaggtaacaaacgaacacgcacacagttaacgttgtcctcagagctgctggaggcatctccagctctcggccttcccgccgcgtggtcaaattcgactccctgacccttatggttggctggggccgtgggccacgttctggctaatgaggcgcaagcagaaaatgccattccttcggagccagagcatttcactgcagttgtgagaccctacagggtccacgttccctctgctaccaagaccagcctgggtccctggggagacggggcggagcactcagccaacccacacagagctagtaagcagcttgttcatgcattttaagccacagagcctgaagggtggtttgttctttcagcacagcctcactgatgctgacgacagtggcaggagcttcgggacagccaggcatgagtcttctttatcaccacctcacgagcctgggcatgtcaagttcccattcggtacatgctggcttgggctgaactgaattacattcacattcacacacacacacacacactcacacacactcgcaatcatcatcaccgtgaaaactagcacttaggagcacctggggggatcagtgagtttagcatctgcctgtagctcaggtcatgatcctggggtcctgggattgagcctcagattgggatccctgctcagcggggagcctgcttctccctctccctctgcccctcacctcgctcatgctctctctcaaataaataaataaaatcttaaaaaaaaaaagaaaagaaactagcatttattgagtttactatgtgccaggacctgtcctcagtggttacaaatgccttcacatctttgatcttatgaaaagcatatgaagtagacccttttattgttcccattttcccaaaactgaggtacaaagggattaaaaacttgtctaaggtcacacagttagcaagtggctgaggcaggatttggacccagagggacaagttccagagcccagtccactgtcatgtaaaaccccagcctcccccttgtaccggttggcccagacatacgtgtgcgtgcacacacgcgcacacagagtctgagggtgtggctgacagcctccagggacccggagggctgcccacaccctctgcggggcagggtcctcagggcagcaaccgaggaagccacccctgctcgccctccatgcccagtccctgcctctcctcctggctgtcacactctcggctgaagtggcccatctgtctccagcataaaggatcaagcagaggtgaggctggggccctagagggttgtataaatggctctgctttgagcaacagctaatttctaaacacaattattaatttcatgcttatcatatgcaaacctctgtctcccagacgagatgaaattgatttaattagaaattccatcatcaagcctttcggatccaagcttttaattaggatcaccaaccccacccaaggctgccagaaagtgtgccctggcccctgcttctcttcctgaggccccaggcacagccaggatgtgtgggccactccgctgtcagcagggccccaccggccaggtcagcgcccatgacctatgtcccaccccaaatgggggacatggctccacagtcaccagcagcctctttccaaatggcatcataatgggggaaacagcttggagagaactcgtatcatcttgcagcaagaaggactggggtgttaaaggtgagcaggagacaggagatgaacagacctccactcttcatgcaaaattcacatacggcctccctttggagcacctgccaggtgctaataaaatgcctttcacagcttagctcagggcagtcagtcaaaattatcaatagcacttggcgttttatcaaagcatttccagcacatgacctctgacctcatcccaccttggcctagcttgtgttctcggggccccagtcacacaggtctccttgctgaaccctgaacatactgggcacgctctgcctcagggcctctgtgctggctgttcctctgcctcagtgctcttctcccaggcacaaatgtggctcactccttccttcacatccttcccttggagagactgctcacatgtcaccttcctgggaaagcctttcccaacctcctaacttagtacccatgctgcttccagacactgcaccctgctgtcactgcccttgcttggattttcccccataataacgaccactttccagcacgctcaacctttacttacttttcacttaacatccacctcctcctgccacgtgagctccacagatctggggaccttcctttgattccccacggggtgcctggcgcagcacttggcacagggcaggtgccccatactcaaaggggctccttcattcctgccacgtaagtggcccgaggacaagctcacgatctcacagacgccttagacaggtgaggagacccaacctcacagcccaggtcacagagccggccaggggctgagttccaattctcccgtgctccgatgcttgacctggacaagcaggccactctgcaccagtgcctggcacacacagatgctgctctgaggtctccattctccctccccagggctcagcaggggcatccctcacttcctagggcctgccgtgcccaattcctacccccctcggccccctgatttcccagcaacaccctagaaggcaatcattgtggggccatcccacacccacccctgtctccccctccctggagcccacctggactcttatcaggacagcaaggagacacttggattaatttccagaatggttctgaattatgctttccaggagagaacccgacagatgcaggcaacaggcctttgaacaaatatttccccagaaagtgctttattcagtcccttgtctcacccctttaaacattatgtgttttcttgggagcccaggaaaaagggggctcaataaggcaaggaggctggagaagaagagggcataggggtagggtggtggggggcctgggagggacgctgacaaagaagctgttcagatgcaggggtggagggcctgcatagataagagcacaggcggggaagcaggcggtgcaagggcaagagcaaacaagatcctcaaatcagcacttgtcctatttcataagcaaaatgtagatcaataaattacactcacttttacaggttttacatgctgactccgtaaccttgtcaagagtgatacttacggggggagactagggggtggaggagcccagagacctagacaggaagggccagggacctggtggagcccctggggccacagggcctgcacccctttttccaagaagggctcaaatcccaagttcgcagaggcaaggaaacaggctgccacaccctcagcccactgcctcgcttggtaaccgtgggcaagtcaccacccctgtgagcctctaacttctcatctgtcaaatagccccagcagtgagagcctgggctctgtaagccttactgtgaggctcctatggaaggagggacgttaagtcttagaaagcagactaagacgctagaatcatgatacctcttgcacacacgcacgctgggtacagtcagcctatacagactctcctttcgttgattctcaccacagccccgagacagggagccgtagccacatttatatgaggctcagagggctgaggggcatgcccaggatcacccagacccatctgggtttctctgtgccacagcactgcccagaagccggggagctgggcagcactgggccatacccacgtgtccaagggggctcctcagacaagcccagggtggccgcagctggcacccgtaatgggctcagcagggactgggcatgggggggtggcaggcagcaggcaagaggctgctcagtgttggtggtggtcataacaggcctggtagctgtgccttcatgagcacctactccacgcagagcaggtcacggggattatctcatttaatcctcacacaataaccccatgaagcgaatgctatttattaccttcgctgttcagaagagtaaacagaggcccaggaaaacacagaaataaaactagagcacatggcaaatcaggacctgaacccaaggtctgactccagcccctgagagctcacaagtggccacaccgggcaggcccgccacgttcattgccaggtcctgccctttatccacaccatccccacatgggggcagggggcggcagccgggatggggagtccagggtcatgctccaggtctctccccagcacatcctgtgagcacaatgctttgcatctctgagcctcagtttccacatctgttcaaggggacagttaatgacccctacccactggacttataaggttgggacagagggaggggcctccacaacataagagtgacatctgcccacagccaccagccctgggaggtggaggcgaggccgggacagcgtcagccactgcggcgtgcctgaggctccaggaattagccctgcgccccaccaccccgctcctgcgcactgagcaccagccgtggggcacagcccagctaagggaaaattacccacggcgtctgccccagtgttctcccaagttaatgcgctgtgccgtgggtaatatacggctctgtattaatataatatgatataatgggatgtattaacattattgaatacatgagccgataaaagtcacatcaccatcactccgtgtaatttatatcacagcctgggccagagccaggctggcggggccggggaggccccactgaagctctggggctcctgctgggggaagggcctgacccctgggtgggggagtggagccaagaccagagagaaagggatgtgccaccaagcaggcaaggccaggtgatccccgggccagggtgccaggctatggtctgggagctcttgacctgagccctctggccagtcctcaagcacttgaccccacagcgacatctgacccagcagtccctccacttggctgcctggctccttgctcccctggggtcctccttcctctaagacagcacctcctcagcctccttggctggtcctgaaggccagcaaccccaggactcagtcctccatttcctctctctccactcattcccaggccacctatagcctgatgacccacccccaaactccaggctcccacccactgcttgctcctcttggctgtctactgggacccccagatccccccaaaggccttcctagccaggatcagacacatccttgattcctctctctcatgacccaaacctgatttatcaggaaatacttttggctctatgaggaaaataaatccagaatccaaccacagctcaaccatgctgccactaccaccctgggccatggctccagcatctctggcctggactaacccagcagcccccttccctggtcccccaggtcccatacttaccacccatctcatcacccattccttggctagcacccatttaaaattcaagttagggggcacctgggtggctcagtcggttgaacatctttctttggctcaggttatgatcccggggtcctgggatcaagtcctgcatcaggctcctctgctcagtggggacctccttctccctctccctctgcctgccactctgctggcttgtgctctcttgctctctctctcaaataaataaataaatacataaaatctttaaaaacaaaactcaagttagatcatgtccctcctctcttcaagagtctcccatcttgggcagcccgggtggcttagcggtttagcgccaccttcggtccaggatgtgatcctggaggcccgggatctaatcccacatcaggctccctgcatgaagcctacttctccctctgcctgtgtctctgcctctctctctgtctctcatgaataaataaataaaatctttaaaaaaaaaaaaaaaagagtctcccatcttagccagagtttaccaggcccaaggaaatctgcccccttagcctcctgacctcaccacccacccctctgtccctcacttgctctgctccagccactcgggcttcatgctgttcttcccaacacaccaggcaggagcttgcctcaggaccttggcactggctatgcactcatcactgcctgttgatactatacattccattcatgtgtcctcttgaccatctgcctcaccagcactgcccccagtggggcccagggtgagcaggctgctgagcacccagcctgcaggtggtgctaccaccctcctagggcttctccgatccctggctcccctcactgctgtcctcaggcaccagcagccccttactctgaaccatcatcttcagcaccatctagaaggggacccacatgtggcatactccaggtggtatcccaccccaggggtccttcttgggggacatttgttgtggaagtcccatctcagcctacaaaatgaaggcttctggtccctggcaaaggtagaggtggtatgggcttcccaccacatcatgcactcattcaaaatatgtttaccaagcactcactagtgtccagcactatgataagcaccagggatgccagagtgggcaaaagcagacaaatatctgttctcatggagctgagtctagtggaagaaatggcccataaccagatatgcacacctacacatacataatcacaacctctgagatgtgctgggaggaagaggcaaggtgcctgtgagagccttgaatcagggcctggatctggtcaggggagccaaggaggcttcctgaggagaggtaggaatctgacatccaaaggatggacaggcaatacccaggtgaagagggaaggaaagagcattctgtgcaaaggccctgtggccaagagcccatggcagtttcaaggaaaagcaagaccacaaagaaaatgggagaatagagcatgagatgcacctgtagagaaaacagatgtggggacaagatggggaccaagaacagcagtgggaaggccaccacactggtccaggtgcgaggtgagagcagctgggccagggggtatccgtggagacagagagaagtatgccctcccacaagctctccagctcccgaatatctccctccttgtgacacttagtgagctcttcactaaactccaagctcaccaaaaaccagaggaagggcctggagctgaaagactggcaaacggggtctcgggtgcctgcctctcctcagagccaagcccattcctccaagataagcaggcttcccaggggttctccagctgccccagtgacacaggcagggtgaggaggcggccagggtgtagacacaaagcaggaaagggccaccctttgcctctcacttccactgccatcaccccctacctacagctctgtgagcttgccacgatggaaagaacctgaattcatcagccaccaactcactgcatggcctcgagctagatgctcctccatctgtgctccaggtttctcatctaagaatcgtaacaactacagtaataacttaacacgtattgagcgcttactatatgccagactctgttctcagggttaatttctttactcctccctagaattctgtcacagagatactagcattcagcccatttcacaggtgagggaactgaggtacagagaagttaaattacttgcccaaagacatgcatctggtaggtggccaagcagggacttgcgctcttgcagccaggctgtcctgcctccccaccgagataaggactggatggaatcccctctaggaccctccaaactctgctgtggctgcctcctgggatctcagcccagagatccagcctccagccggcaactccggaaggctggcagcttggacttggggtggatctcaccccagacccttctacttctctctaccttctgcaaaaacctccagatgttgcattctattcagcaagcacgttccactggcccacagtgtgccagatattaggacatggtgggggccagcacggtccctgcccagtaccatggacctgctctgtgccatgtcccaacagtccccaggggcatgggccctggccaccactgagcaaacctgctctttaacacacctgcctggctcctccccttgttctcacttctcctctatcactggtacatcctgaggtcacctcgaggggactgaccccagatagaactttctaccattccctcacttaatttactcctaacaaaacccttccaggttccattattatctgcatttttaggcaaaacttagagactgggagagaagtcgttctccctctgtcactcagctactgattgaaacccaggcccaccaatgccagagacagagcccacggcaggaaccaccagcacgtctgggtcctgtccagataatgaagggacaggctagagatgcccacaggctctccctgtcccagcccgacgtgttcagtttccagaaactggtaatccgagctgacacggctctctgaaagggaagctctgagtggatcttgggcccttccaccctgtctcactcactcaggcccctgcctcaggatctctggggtgaacgaagctctgcccattaacccaggcctcagcaggtcccactgggggcagcctcgggtagcagagcctggagaaaggtcctgccaccgtcatagctgggaaccccaggccctctctcagtgccaccaggcagcagggtaaattcagaggagcacgaagctcacctcaagttcccaagcatctcccaactcctgccccacaggccagaatccccatcactgggatcaaagtggccttgccagggacctgtgcttaccatctcctagagggagcccatcccaactcccaggcttgccaggcttttcgggactctgaattgaaatctacctctttgtcactttcatgtgcttctatgtagttctctggagcagcaaacacccagcctgtgcccccagctggaaggccccccagggctccttgactctactatatttacacccctacttgcagccctgcttgggcttctggcctgttctttgtctggtggtctaggtctgcacgtgtacccacatggacatgcaggggcacagtggagcacacccgggcaggaccaccactctctccccaacatcccccccagcccccagcctcccccttggaaggaaagcccaagccctgtgtgagccctgctgccttgctgacctcagctcttaccaactgccccactttactcctcaaacagcccctgagcatcgagcactgtctagcctcagcctctgcacctgccatgccctctgcctagctggcttttccccccacacagccacagagcatactctttcactctatcctcgtctctgatcaaatgtcaccctctgggatgcctgggtggctcagtggttgagcatctgcctttggctcagggtcctgggatcaagttctgcattaggctccccacagggaatctgcttctccttctgcctgtgtctctgcctctctctctctctctgcatctctcataaataaataaaatcttaaaaaaaaaaaagtcaccctctcaaagatgctgtcactcatctaaagcagccccacctcacaccctgtccccttacccatggcccttctcaccccaactatatataacatgtctctcttcgagtaagtgtctagctgtcttttggctgtgcctcacaggattggcagccccaacagcctgagagccacaggggccaaggcccccaggcgctggagatcacgactgcacccctcccctggccctggctgcaggccctgtccttcactggactcattcctccaacttttttttttttttctttttttcattcctccaacttccatctgaagataaggaaggccctccagggcaggctgtgggtgtggagagtcaggagcccacaggaaatggcccctctccaaggggaccctgtgaccacaggagccaagtggagacagtcttctccacggtcacccttggggctgccgtggccaggcggacagctccagacagtacaatcgcacggtccatagtacctgctgatggtggcaggggccaggaaggaggaaacacacatacagatggacgtacaccctataactcagccctgccaggcccagcagactcagagtcagtccacccaaatcgaaggacctgcacacacatgtgtgccacaggaatatcccagaaaggctcactcactcatgtgagtgcgcacatagacacacacacatacacaccccactctggtacagtctggtggaatcatgatttacagcacatttggggagcacaaaagaatgttcatcccccaccccggaaaagtcactgccctgcccaactgcccattaagcagctggaattcttaactgcccacatgtgagcaggaaaagtgctgacctgctatcacccattaacacccagcaggtggcagtttttctgcagggctggagggagccagtgggagatccagcctggcagccgcagagcccaaggtgggcgagagctgatgggccgggaaagggtcagaccaggcagtgggggggccctggcagcagaggaggattgaggaactgggcaccagcgtggggcagcccagaagttgtgtacccacctactatgctcacctgcccatcttgctcccacagataccacgggtgggggctggggttggcaggcctacctcctgccccaggccccaacctgcccaggtcattggcattgccgggagtaggctgtgctggcaagcaccctgtgctcatctttctggttgtccagatcgcccatgaggctgtgaggacatgaaaactccaacaagaaacaaagggaccttgtgtagagatcctacggtgaggaggcccttccctcaacccaggttgcacctaaatacccatagtggaaaagcaggggggtggggggcagaatcactccctgtaagccaaggcctgctccagcctacggaggagagggcagtatctgtaatttgttttaataatcctgctgaacagggagaaaattaacaaacgagaaaccagctggaaattaatcaaacttctccctgtccatccccccaccttccatcttaatgaaggttatttatccaacgagcaataaaacatggaattaaattaaacaggccttttcttttggtgctctcccccgccccagggaggcggtgtctcctgcttacagctctataagccgggccacggggaggaacacggcggagccatgattcccagatgcctatcacaggggtttccccagaaggagcccctcaattagcacgctcccagtttaggtctccctgccagctctctgccaaaaatatgaacggcagttaactcaaccacccttcagagatgggacagagggaggttcctgtggttagatgggggactcaccagcttccctgtggggaagagaagggcctggatgtggaagatggggagcatgagcatccccccaaatgaggatactctgatgcccacgattctggctggaaacaccatcctggccccaacctcttggtaggaaggggctggagggagtgcagggcacagaggatgctgaggaaggacctcccttgaggacaggactcagtctccccagctcagggcacaagcatcacaggtcagtgtacctgccctcgggccgagactgcgccctgtaccctcaatttcctctggcagtttcttgggcagctgagtccccaaatttctcctcacagcctttaaatccacttatgcttctgtcaggccatgtcttggagtcacaggttcctaaataactactctcagggtccctcctcaaccaccctctttggtcttccctctggctttgaaaatgtataataattgccttccatttacagctttcacatacattctccctttgaaacctcacatcagccaggtgagggtttttcactgatgcccacttaacaggggagaaaccctgaggctcagagaggaccatgggcaaggtgcatgtcgctgtggctgggggtcctagccttggtgggctggggcttggggaccaggggtgtggggcaggcagcagggcaggggtcttcagaattgccaggtccctgggaagcctcttcaggcacttttggtggaggacgactgggaggtcgattgctggcctggaaggaggggaggcgagggaagaggggaggcaagaatggaagagagagggatggatggaggatggagggtgactgcaaataaactgctctaaactggcccccccgacaatgctgcaaatccagtctacacggggcagccagagagcaccctggaaaccatgcaaaagatcccatcattctctgcttaaaaccctccaaaagggaaccctgggtggcgcagcggtttggcgcctgcctttggcccagggcgcgatcctggagacctgggatcgaatcccacatcgggctcccggtgcatggagcctgcttctccctctgcctgtgtttctgcctctctctctctctctctgtctatcataaataaataaaaataaatttaaaaaaaaaacctccaaaagctgcccagaacaactggagggaacagtccaactctgtcccaggacccaggagtccctgctggtccagctgcgccaccccttccccacctctctgaacagcatgcttattgttcctcaaatgagccatgagtatttctgcttccaaacctttgcaccgcctgtgcccttaacccaaacaccatccagccactggctcccttccttacttgcctgcatctatattcaaacaccctctccccgaccaccttgtgtaaaatagccttctctctcctcatctgtctcaaaacccctgacctgtacgctgttcatccacagtgcctgtcaccatttgaactattgctcacctcatttactatcttctccccctctagagggtcagctccatgtgggcaaggagtgtatgtgtgtgtttcttcactgatgtattcctaacctagcccaacatctgactatttggtgaatgaatgaaggaatgaatgctcaaggccattatttgggccatcatcacctctcgtctgaattgttccactggatcccaatcactctctcaagactcaggcctcagcctacaaccaaccttccactctacactcaaaggaatatttctaacccccaaatccaaccagggcactgttctacaggatcaagtccacactcttggcctaagcccccaacccaccccagcacccccctccacttatccaccacccaaccctctccccccaatgccacaagccttactgatccaaccagacatatctgaagttttagccctttccacttagagcactctcatggctccctctctgcctacaggatactgaccacctcctctaggcagccaccctatgcatgccctgtcagaagtgacttctccctcctctgaaaccccatagaccctcacttgcacctccaccacagccgtcccataccccaacttaagctatgacaaatcacacatatgccacacctcccattccaggaaggacacagatttattcactctggcaatctctgccatccctaccacctgctccagtagcttgcacaaactcggagctccataaacatttgctgaatcaaactgaaccagttcaaacacagtccagggagagtgcccattaagaggggtctttcctccagtttgctggcatttcaggctggtctgaggacaaacggacttttaagtacctcttaattgcagcacatgggagcagctggccccacattccactaacctctccttgagggatgcctgagaagaaatcaattccccagggttgagaggtggccagggccctgttaaaacggcaatgcacggaatgagcactgggtgttacactatatgttggcaaatcgaactccaataaaaaaatataccaaaaaaaaaaaaaaaaaaaacggcaatgccctgcctccagtccagcccataatagcagctcctggtccacccagcagcctgcatatatgagcacaagcatggccacccccatgggtgaggacagcaggcacaacacagccactgctgaattatttattccttacattgttagcacagtagagagagcaaccgtgtctccaggcttcaattaaaatatcaaggcactcgcaccgtctgccgggccacatgcccagctcccaccaaaactggcaggatgggaccgcctgggaagccagaagctccccaaggccaaccctgctgccctgctttgcctgccctcagccaagtcctgtgtctggaccacagacagggacccctcctctaggggtctgcagtgaactttaacccagaggctgcccctgaggcccctggcaaaaccgtcagggctctaaaagaccacttagtacttcagtgacctaaaggagactctctggcttcccaaggcggccctgggacaagcctggctgggtttgaaccttactccaattctctatcagctcccagcaccccccgaaacacttcacagcctgtggctgggaggcaggagttcaaggctcaccccagctcttctccagcctccacgatgaactctggccacatcacaccacctccctggactctgctttccttttttttttttttttttttggctctgctttcctcactcagaaaatgcaaatgacgatgcccaggctgtgaccccatgggagcgtcacaatcactggagaggggcttgggaaaagtaaaatgaggtataaatgttggccttgctaggagagggctttcatttcagaagagtgggttctacagccttgccacccgtaccccaacctgaaaacccctgattctgaggctcagactcaggaggaaaaaagggctggcaaagccaggagctggctgggtcacaagctaactaggtcacccacaagattcacttcaacaacccccggactggaatatgaggccgagtgaaatcaaagtgggcgagctgaaaaagaacaagaaattgcaaacacatgccgccaagaacagtggaatgagcacaggtttcggggacaggcggtgctgcaggcctccgctacgccctggacaagcccgcttcctcacctgtaggatttcccagctggtcacttacattagataaccgttatgaagctctgactcagtgccaggcacataaattcaaccatgggtgttattaagcacctactatgttctgggccaggaggtagagcagtgaggaagagaggcagaaccgtgacttgcagagcttgacatccgaaccatcactgttatccatcaagatgatgacagaggtagcatttgagatgggccttgaagcacaggagaaatttccacagcaaaaaaaaaaaaaaaaaaaaaaagggatccctgggtggcgcagcggtttggcgcctgcctttggcccagggcgcgatcctggagacccgggatcgaatcccacatcgggctcccggtgcatggagcctgcttctccttctgcctgtgtctctgcctctctctctctctctatcataaataaatttttaaaaaaaatttttttttaaaagtggcaagaaggtataatcctttcggagaattgtttggcagtacctttttgttttttgagatcttatttatttgacagagagtgagagagcacaacagggggagcggcaggcaaaaggtgagggaaaagcagactctgctgagcagggagcctgctacagggctcgatcccaggaccccaggatcacgacctgaactaaaggcagaggcttaacagactgagacacccaccctgtggcactgtctttttaagctaatcattcatttagctgatgagccagcaattgtgtgtgtgtgcatgtttgtgtgtgtgttcatatacatatatatgtacgtgtttgtatatgaaatgagtgctcgtgtccactaaaagacatgtctacaaatactcagagtacctttattcataatagccaatcactggattcaccccagatgtccagcagaagcagaatgggtaaacagttatgaaccaggcaaacaaccacacaatggaatagtatggagccatgaaaaagaaaaatgccaattattctttcatctaactacatggatgaacctcccagacaatgtgggtgaaagcagccagatacaaaagacttactgtttgtgtgattctgtttataagaagctcaaagccagatgcaagtaatctatactgttagaagtcgggctcgattagccttggggaaggaaggatatggactaggagaggctcaagggaacactctagggtactggaaatgttctccgtcttaatgttcatacaggtacatgcatttttgaaagcgcatcaagtagtacacctgaaatttgtgtactttactatatataagttatacttcaattttttgtaatgtagaagaaagaagaggtggacagagtattcttcagggactgagggaacactagaagcagaagccagcagattggactttaggaggcataaggagtggcacaggggacctggagcaggagtgacagcggccagagggaaggactagggtgaaggtcggccggatgggctgctgaggcaaagccaccctgggagcccaggggcttccacctccttctctgggcaccccctgccacacaccccacctgtgcacagcaagtggtacaggtgaggtcattccccctccctgccagcctgtccccccacccccacccccacccctccctcagccaccaccctgaatcggaatccctgagtttaatttctggggcttttgggaggctttcatcctgagcagaaataaagtgatagccacaatctctcacccccatgcctgtagttcagccaagcaggtttctccaggcccccgtgtcccacgcccacagcatcactgaggacacctggctctgcctcctacgctccacctgccatgtccaccttcccatctgccctctcagggagctcacctgagcacctgtctctcccaggataactggtccaattaggtaggaccctcccaccttctgcttcctaccacccagcacccaagccttcgctatcacatcaccccttggagagagagagagcactagaaatgcacggctgagggagcagccaagaaacctcacaccccacccagccaccagtgagacatagcacataaaagggccccctgatgggggattacggagccattacacaccatgtttcaaagactatttaaggatagtggaaaatgctcccaactgtagtctggtgggcaaaagctggctacagaaccacagaggtgttattgtctcaacctcgtaaattatatataagagaggctagaaggaaatacacaaatgtttcaagtttgtcactctggatggtggaatgagtgggcaattttcattcgcttctttatgcgcttctgctttcttccaaatctgcaatgagcacattggcttttagaaggagtcggaccatcaggccacactcacacataaggaccccggggctgatggtcctacgctccacagggcagaggaagacctacacgatgccagactgcaaaccaccttcagcaccacccacagactcccacactaagacaggtggcctcaaaggacctgcatgtcacatccagctatgtggaggggacgggcacaggtctggggatctaggaccgggttttttgttttttttttaagattttatttatttattcatgagagacacagagagagaggcagagacacaggcagagggagaagcaggctccacgcaggtagcctgacatgggacttgatcccatgtcttcaggatcacgccctgggctgaaggtggcactaaaccgctgagccccccgggctgcccctaggaccggggtttaaagcccatctctgattctgactaaccaggtggtctccacacattaacttctacgggcctcagtttcttcctggaaagtagggcatctgttctgagcactctgtagtaccatcggcctgtggaataaccaagaagggactgtgaaaggttgtaaactgtcactggttgtaagagaccctggtgtccccattcttgtttttctgtttttcaccaggccctaaggccctaccacggtttctttttttttaagattttatttgtttatttatttattttgtttatttatttaagagagagagcatgagcagaggcagagggagaagcagactccctgcagaacggggagcccaatgcagggcttcatcccaggaccttgggatcatgacctgagccgaaggcacactcacccactgagccacgcaggtgcccccctcccatggtttccaagaaatgctcagaagctgcctacagcaggtgcctgaaagttccccaaatcatggaccgtacccctatgctgaatccgaagctgtacagaaaacatacgtatttttaattaaactggaaacccaacaaaagctaaggaaaaagccacttcctccttcaacactgccaaagaccactgtgcacactagaacaaaacccactcacttcatctctatgaaatagggaaaagttcagtgtcgaagcattcttactgcctaagttctagccaactctgtgctggatttccttttggaaaagaggttcggtggtttgtttttttgttgttttttttttttttcacgttgacatctttctgttaaaaatatttttcagctcatctctctagattctatggggactccccagaagaaataggtgatatagtccctgacttcagggtccctctcttggtggggaggctagagggaatgaaagctttaggggccagcacagacccaggtgaggactggtgtgggaagggtctcaggggaggaggtttgtagctggatatgaagagcggggaagaataaagagggttttcagtaggggaagccacgtctcattcaaagggagttcggtgaattatgtagaattaatataataaatatgtacaatggctgcaggtgacagcatctccctgaataatttggaggggggagaaaggaggcagcagagcccttgattcttcagaggaagtattacatggaaaatccacatggaaaacaagaacagcttcaagccccccaaaagaagaattctgaggcccctccaggaagaagtaagaaagctcctgcctcactaccctcagaaagtattcagtaaaactgggtcttgatgcatcgcgcagatggggaaatggaaaggcagacagtctaagtgatcttgtcaagggcccaaggctggttagaacagaaggggggccctccagcagatagtgtctaaaccaaggtgcagacggaggataaacataatgtgcgggcctgggccagaagcactccttggggagccagagaggcaaaggaccagccaaactccagccctgagccgctgcgggacccaaggagtcaccacccctccgagccgcgtctgttacagggatacacaaggcagccgcagcgtccaaagacagcagagtatgggcattgagggttttactaggggtaatcacacctgaatgatggggggtggagggaatgggtggacagatggccagccgagccaggccagcaatggtcacccccgctgctagttctcagcaccttccgggacctgcagagaggcctagggctgcctccaccccaccctacacagactcacagtgaagagggcgcactcactcctctgagcctctccttagctaaggactgaggtccctgctccccatgatctgctacacaaggctgcacagaggccaggtcagcagcaccagccacggggcctcctcccagccccacccagctggcagcagaggtggagaccaggccccagggagtccaggccccacccagggctggcaggaggccatgagattacaaatacactggccctctgacccggcactcccactccactcccactccgtaggaattcgccccacagagatgtgcaaagcagtcaatgacaaaggcagccatcatgactctgttcacaaacgcacagggtggggaaccacctagtgtccatcaccaggagaccggaagcagggagtactggtggccatgcaaaggacaagtccttactcgctgatcagtccccaaggtcacccctgctgcagtcatgtgaagacagtggaggagaacacaggtgtacacaccttgccctgatacactaggtgaatggtgcccccagcgtgtgccatacggcagccccaagtccagactcatgccctctttgaaaggaagcagtggctgcctccatggtggggctggggtatgtccctcagtacctttgaatacccatgggaaagtatttcacacttaaaaaatactactacaggcctagggggtctggggcccctggataaagggcacgttcaggagagagaagcatctccatgggagatcctctcaggcaccttcacctacaatctctctctctgcctacccccctacccctccactcatcctgtcctctccccctacctcccaaactgcttgagagagaagccaggactcaaggccaggggggccagcacagaagttggggactccccagcctgatgctagaggggaatggacggggtcctggtccaggctgacaggccagggccgaagccaggcccaggtgagcgtgggggaggacaagcaggggagggggctactctccgtcggttgggtttgttgcactttcctaattgattttatgtctgtgtccccaggatacttaggaccatcttagaaaccacttaagcaatttaaaataatcaaagtacttagaaggcacttaacatttcctcacacttcaggcttcccataaaccccctttcagctgcaacctgaggcctcagtcaggagaaaccactgccaggaggtaggtgcctatgtcaggcccctacctcctgccatgtcaccccaagcctcagcagtacccgaagcaagacagctgaccccgacaccagcaccaggctctctctctcaccaccaggccttcggactcctgggtccctccgcctgcaatgccctcccctgctgcccagcacagacctccacctacctaattgtatcctggctattgagctagttgtcctcctacaggaagccctccctgacacctcccaccaagctgaataaggccatctcatctaccccaattaaagcactcatctgtcacacctgggtggctcagtggttgagtgtctgccttgggctcagggtgtgatcctggggtcctgggatcaagtcccacactgggctccctacagggaccctgcttctccctctgcctgtgtctctgcctctctctttgtgtgtctctcatgaataaataaataaaattttttaaaaacactcatcttgggcagcccaatggcccagcggtttagcaccaccttcagcccagggtgtgatcctggagaccggggattgagtcccatgtcgggctccctgcatggagcctacttctccttctgcatgtgtctctgtgtgtctctcatgaataaataaatacaatctttttaaaaaatgtttctttaaaaaaaaaaaactcctcttactgtcatgaaattactgaccatttgactctggagtcaggtgtcttcaccccaaccccaagtttcagaagcatggggcatggtctgcataaagcagagatctgtcacgtttgttgtgtaaaacaatgaatcaagcctgacatcacagatggagtcgaggagacacaaccttccggtggacaacactagagcctgagtcctcagttatcctcatccccattttatagaggaggacatccaggctcagagagatccagcaacactcccaaagttgcacagcaagtgagcagcagacccagaggaagcacctccaaatgcaagtccacaaggcacccgggagcttgatgaaacaagacttcacaccctgagaatcctcttagcaaggctgcgtaggtccaggcacctggtgaaaacgtgtgttctaaccagcaccagaagggtccaatgtggaggcaggtttggaaaccagcattcctgcataaaacgtagagagcaacctgccaggctctgggaaagttcaggaggcttattccccacgagtctgcaattccactcctgggtgtgacctacaagaaactctcccaagaacacaaagacacagtggccagctttgtcgtgcagcacccttggtaaaaaaactaggaagatcatcaggaaccttgctaggtgtccacagtcaacaaacaagaaaatgaacagggtgctgttccaaggggggggagtatgtggccaaggaaaagttgaagagcaacatgatacccagatcccaattttagcaagcttaaaacacgcaaaacaaaactatttttaagtgcacagtaactgaaagaattacaaacaatccctacaggacagggcagtggctgcctctgaggaggaagcggaggagggtgcaagacgcacacatggagcctctgatgacatctgcaacgttttcgttcttaaaatgaaaacaaatgttgatattattagggcaaaacatcagtatttgaccaagccaggtgttgggtacagagcagtttattaggctctctaattctccatatgcttggaatttgggggtaataaaattcatgatgccttgtgagagagagagagaacccctttcctgccaggctcctgtggatgatgccactcacctttgataaaaggctcctttgtgaatgctgtgtgctccccacttccctcacctcccctcagaacagacctgattctggaagccatgtccctcacacacctgggggcagggcccccaaatgtcctaaccctcaaggtttcccctgaggggaggagtgtcctttgcccacattccttcctaaggatctagctttgctttctatctgccgctatggtgcaggggcggggatggggagagggggagacatgggactggattccctgacagctctcaggccccaattccaagggagggaggcagctgcactgaacacagacacccactgccctgaccgaggttaatgctgctgggcctcccctgaaaccacagaccacaggggatgaagaatgagctaagtgctgtctctctactctgcagccctagccagagacaccagaggaccatcagggcccctggctgctcctgctcagcatgggggtgctgctcagcgggctccctccctccctccagcatatttcagccttaacaattttaaattcctcctaggcccctggggatggctagagaacaggctgccaggcctgcttctaccttcctgcacctgcacttcacacctcctgtgtcatccaaggggcccctctcagtggaccccaggaaaaaactaaagcctgggtggggaggactcaggcctgagaggggataaaatagggggacagggggaagaatccagcctccctctcatgcatgaacaaacttcacaacagttactgcttcttgagggcctaccacacgctaggcaccaggccagtcaatttaccttgtcccattcatgctcacaaccgtcctacccattttacagatccagaaacaggctcaaagacgttctgtgaccttccctgcccgaggtcacacagccaggagtggcagagccaggatttgccctgtctgaagtagcttcacatccctgcaactgaccaagtgtccccaccaccctgggatgcctgcagagccagcccacggtcatcccaccggcaaggggggggacgacaacgacgacgacgacgatctgagtcgggaaagggggcctcgaggggtttggtgcccaccaggaggctctcagtactgagatatggatggccatcatcaaggcgggcaggtggtcagagtggctgggaggctagggcacacctgtccagcctcaggtgagctgctggccagtcctacctcttggccttaactgtggatgaggccaccacatgatccagggagaggcccaggcagagccagagaaggtggaaggaaagggagagatgtgggtagaatatgagggaagcagagaaagccacagggtcccacagaatgaggcagggactggagactaagggtggccctgcttccctccccccatcacagctcgggggtaccgctctccatggcagccccaaggcagaaggctggggcccgcatctcatcccctcacccaggccaggcccctgagaaagggcaagcctaaaggtcacctggaatataacccatgtagaccttatttcatttccaatatgtctgggtcataaaaatgctagtttaataaattgggaggaaaccgaaaagacacagctcattcagggctgggcaggggaggtaccatgagcttaacaggtctgacaatgtgggtcccacccctccacagggcccactccctcaccaggttccacacctggtcccaaggctgacggactccctggcactgacagggcctggcactggggtggaggggaaggggcctaaaggtgggggtgtccagcccgattctgccctcaataagcccctggacctcagggagccctacaagagccatgcaaaggaaaaggacctcacgtaccaggatggctgcagcccacgaaggctcagggaagtcttggattttgagtcagggtttgaaggagtctgactctgtccatcagacatcaagaggggcactcgaggggcacctagatgcctcagtggttgagcatctgcctttggctcagggcgtgaccccggggtcctgggatcaagtcccgcatcgggctcccttcagggagcccgcttctccctctgcctgtgtctctgccaatccctgtgtctcttatgaataaataagtaaaatcttaaaaaaaaaaaaaaaaaaaaaaaggaggggcacttgaggaggagcacttgaccaggaaaatccctaaggtaggtttggaaagcagggcccaagttcagagaacatgcagggttgaggcaggctggactccactggagagacgaccagaaaggccacgggggccatggcaatcccatggtgacctgacccctaggaggtaaaactcaatgctccttctgcaggagaggccacgggggagaggagtggggtcagcccacctggtccaatgtcctccttccacccaaggtcacacagtgagttggcagcagagccagacccagaatgcagattcctgagctatgggaagcctcagtggtaaaaggacccacagctctcccctgagtggggagccagtgatcaccccagcatccccagacctcatagtgaggttcaggagagccccaggaccatcccactggggacactcaggtacactcaccagtcatccctctgccaaaagccacagacctgcccagctccccagcttgcatggctcagaccaaatcctctcacctgaaacccccttggatgctctgtcagcgggagatgaggaccaacattatggagcccggctgtgcacccacccaccccaccgccagctcctctctacattattccacatccttggcctgaaaggtacatttgagtctgcccatttcacagatgagatgagcaaggtccagagaggtggagtgacctggggccaagctctgggctacctaccatgtggctacctgcaagggcagggagtgctctgggcttcgctacaaccaggcattcagccgccatccacagtctacacgctagacgctaccctagcactctccatgcatttgtgcagtcttcacggcgccctatgaggtgggtttctggcatttcacggacaaggaaactgaggcacagagaggtgccccccaggtagtaaatggcagagcaggggtttgaaaccaggccctggagccaataccttaaccactacatgctactgcctcttggggctccctgtctggctggccctacctggctcctgtctccagctctccttcctcagattgggggagagtggaaagggacagcgtggggggggggggggcatgggtaggaagaggcccacaggataagatcctccctcagggtccccccttatggctcctcccccatcacctgtgtggctcccggaaaattgtgcagggaccacttgcctattgtacaggtgacaaaattgaggtcctgagaggcccagtgattgcccaagggcatcaaaatcctggccgcccccctttcacaaaaccctgtgcagcaataaggagcaggatgtgggttttggaatccctgtagtccccctctccctgcccccagggctcagtacttcctcttgggttcccaggtcaataaccaggaaaagccatgccccagggcctttgtacttgctattccctctacctaaacactccacctccagatatccatagggcaaccccccttactctaccaagcctatgcacaaatgtccccttttcagtaaagccacccccaaccatcccattgaaattggccccccactccttcacctctctagttacttccctgctttgttctccattaagtatttatatgctttacctatccactgcctgccttccccctcaaacgtggaagcccagcaaggcaaggccttcctccgttttgtctcctgccttataaggttccttaaagcagtagtcctccacctagggtgcacgtgggtttcaccggggaacctgagtcccatctcagaccaattaatctgaattcctggggtggggctcaggtactaggattttttcaaattccccaggtgatttcatcgtgcagccagatggagactgctgctggcagggctgggcacaggagatgctcagtatggagttagtaaacgaaagagtgagtgaatgaatgaatgagtgagtaaatgagtcagtggagaattaattgatttttataggtggacaagccgaggtccagtcaggagagagagccagatgctggcagtagtgaacttgagcctcccaggctctgtcccacctcaaccgcaaagtcacaccccttgcccacccaggggccgtcagctcccacctggactccaggagcccaccaggcttccctcaagggcatttctgggaagtccccccagaggccccactccctccttctactttcacaataacagacttgtttgccagtccagtcgccagggctgaatcccggcttccactcccaaacctcctgcattccgagcggctctgcaggcacagggggcacctgggaagtagcaggcttgccagggctgcagggtgggtggggtgccccctggggaagccaggtggaaggggaatgccgggcccactcagagcacctggtctggtggccaacccagccccctcgcaggtatccaaacacaggtcaggcctccacgtctcatcagccccctggaggctgaggaatcaaatggctctagtaaattcccctggtggttgcaatgagcagccaggcttgagaaccactgaagccacacaacctctaccccggcagccctacccacccatcctcccgctacccctggatccccagcatctgactgtattgcgggggctacccctccaccatggacaacatccagctggtttggacagagctcagagggcatggagagaactagcaaaggagtagtcaggggggctctgagcctgggcctgcagctgcttcctggggccacgtgtccccccacccccctcggtgcaggcttcagcctgacccttatgtcttgaggccccccttcccggactctcaccacagacggacagctgatgattgtgggaaagaggggcacagtcaagcaaggcctatgtgctacccctgatagtcaccctcagcaagacccccttcccacacctcctccacacattccccacccctcatgcggcctagcacttcacaaacactaacctctggcaaaactattctggtgacaccagtgtcccctgagcacctcctcagggctttgcacacattatcacctctgccaggcaaataccatcatgcctgtgagcaaacagactcagaaaggccacacagagtatcaggccaggtctcaaacccaagtctttctgatggccaagagataggagagcagagtggcgagctgggtagcttctgggccaaacagcctgcatttgtattccagctccaccacacatgctgtgtgaccttgggcaaattgctcagcttctctgtgcctcagttctctatttgtacaaagggaataacaattacacaccagggcttgctgtgaagattaagaaaaaccctggcacaggatgtgtgttttgttgtaaatgtgggatttttccacctcagacacctctcctggagggtccctcactcaccctcaaatatttattgaggaagctttgttagaacaaatctctaacaacagcctcaaatggtacaggattagatatgcactaacagggaacagagatttgggtgaaaggaattccataagtcagggaggaaccggaggtgttttggggttggagatacatccaggttggtcctgggatgaccaaagtggtgggcactggtgggcactggtttaacccaatggtaagatgggcctggctacaatcatgcccacagccaagagctgatacagaactctgtagaccatggcgaccctgctgatagcacagagtctggggggacatggggacagcagatgcctcactctccatgagttcattcagccaagattcctgagagcctatgggcctggcaccaactgggggtcctgcaggtgctgctgagaggctggcggggtcagctgatgtcctctgactcatctcacttcccaggtgggagctcaagtgtagccctacacccggctgcctcagttggtagaatgtgtgactctcgatctcagggttgtgagttccagccccatgttgagattacttaaaaatagagattactttaaaaaaaaaaaaaaaaaagagtagccctagattatacataaatgtgggcctggtatatacccacaaaactttatttatgggcaccaaaatttgaatcccacatgcgtttcctgtgtcgtgacattattcttttgatttttttccttcaaccacttaaaagaccaagactattcttagctcatgggtcatacaaaaacaggtagcaggccagatttggctcttgggctaacccctggtctacaggggaaaggcaacagccaagaggaaaacaaggaaatgtgcacatgagtacaaaccatgatgagtaccataaagggaaagacggggaaacaagaccgaataattgaggggtagggtggcttctctgaagggagtccatttaagcttcaggttgaatgagaagtacctatccccacagagtgaagggagaacattccatatacaggggacagcaaatgccaaggccctatggtggggaaaacagtgtcatcaaggaccataaggaaaacttatgagtttaaggagtgcacccaggagagacaaaagatgtggtcggagtgcctggtagcacagagcctctcagacaggcaggagtttggaaatttgcattttaatctaaaagcaatgacaggtttaataggagtgagatctggcttttagaaagctcactatggccactgagcaaaggtttggctgtggagaggcccatttggaaggagagagaagagaaagtttctgcagtggtctggggagaggccccaggggtgggaagggtgaggggtgtcatgtctagggcacattctaagaggaaagcctgtagggtttgctgacagtagaaaaaggatgtacaaaactgtcaccagattttttggcctggtgctggaaggatgaagctgtcttcaagggagtgggcaagctgtgggagggtggatagactttcttgaaagttcctcctcgttgtgcagtgaaaacactttgaagacacaaagccacatcctcaatagaatatcttgtgttatttaagccataaagtttcccccagagtcctgggtcaggcactgaggagcagaacaagccaagcaccaggcaggcagctttctccagaagtaagccacaaacctttacagcacttacaaccccatgtgggtccagagtatcacacagccaggagggctggtggggggttgcacagaaggcctaatgtggctcaccagcgcccccggccctgcctttcttaggaagctggggcacctgcccatctccaccctctccccagctcaacagtgtcccctctgccccctcttctcccagcccccttaagccctccctccatttaccccactccttctccccatgctccattgtctgacagtgagacctagctgttatctaaaagtttaggttggctgcttggtctgcaggaagacgagaggcccagcagatggtggggcctctccaggatcagcctcaaaggtcaccgtctgtcactgcccacccgctccagcctcttccacatcaatggagtctctcatgctgatttcaggccccacaagctgtgcagtgacatttcctgcgggctgactgtgtgccaggcaccgtgctaggccttctctggacattaactcttaattatctcacctggtctatgaggatatgttctcataggataggcctatgttctcatccccattttacaaatgaggaatcagaggggcacctgggtggctcagtggttgagtatctgccttcagttcagggcgtgatcggatcaagtcccacatcgggctccccacagggagcctacttctccctctgcctatgtctctgcctctctctctgtgtgtctctcatgaataaataaataaataaaattgtttaaaaaaaatgaggaagcagaggcacaaacaggcaaaataattagccatggtgacaaagactctctggctccagcatccaaattcttcaacaccaggctggataaccccacacacaccaccctcttcaagcctcagcttttctgtctgctgcaaatgaatgagggactcaatggaacgatttctggatccttctagcctttacaagtctggaatttaaaaactgctttcttccaaggcacctgatatattctttctccccccaacagtggctgctctcagggaaagatcttcttggcccattcacactatggtataaatgacctacacggtgaatggaggtgaggggactctggtggaaagattcaaacccaggcctaactcgttccagaacctgggctgtcccaacatagcattgcgctagccacatccttgggctttaggagctcttccaaaaggtactctttacacccatcaatattccctgttcccaaagagagagccaaaatgaggatgaaggaagaggatgggaacaggaagtaagggatataagctatcaagtcagacccacgacttctgagagtcagggcttctggtccccatgaaagcctgggtcccacttccaacccagtttatttggacaggcattctggaaggagtcaggcctgggagctgaggacctaacttctggccctgcctagaaggacttagattctacatctgtacgatggggagttggccccttccagctctactagttttgagttttgctcataccctgaccccaaaggcaccccattagctttctccaggtaggaaatcacctctagtgcccccaagcccagagctcctctctgagctgtgcacaagaaactcacctcttagaagaaggggagctataatcacagcctctggtagaagttcccagcaggccccacttattggccttggcagagcagggctggggctgcagtgatgccctttgaaactgacacctgacacagcagctctcctggcctgggcgcccctccctcatgctccccaggcagtggcctctgctcctgaccgcccccaacaaagttcaacctttttgcctctgtaaaaggcttttaagtttctcacccagcctctcatttctcagtttaattattgaggagccctcttgtcgccaggctggaacattaacactgttaaaaaggaacccaaggaatgcagaccacagatgactgcctccctctggctctctccccatctcccctgccctgaatctcctttccaacatgtccctcctgcccccattccttctctcctccccaggcccccacctcccaatcccatctcactttctgtgcagcagggaggctcctgaccccctgcctcaacccattcatctctcgggcaatctgagaaggcacagataaaactgaggcctcagccatgttcataggtaaccagatgggcagaaaaaaaggagtacctgtgagcccctaggctggtgaggcctggctccaggcaccctcaccctaccagagaccttgtgccaactagagagagattagcatggaagtcacagtgcactcccagtggagtcattgatgcctcactccaaaatatccatgtttccaagaactcacagataccattcttgtaccctttaccctgtgtcaagtgacacctctccactcctttagcctctccatctctccataaagtgggtactggctcatctctgggagatggcagggaggcactcactgaggtcatggacacaagggtcccatcacctttggttcaggatgtgatcccagagtctcgggatccagtctcacattgggctccctgcacggagcctgcttctccctctatgtctctgcctctctctgtgtgtgtgtgtgtctctcatgaaaaaataaataaaatctttaaagaaaaaaaaaaaaacaagggtcccatcagactgtcttctaaaacacccacagtccccaaaagtgtttttttttttttaagattatatttattcatgagaaacagagagagagaggcagagatacgggcagagggggaagcaggctccatgcggggagcctgatgtgggactcgatcctgggactccgggatcacaccccgatccgaaggcagacagacactcaaccacctgagccacccaggtgcccccaaaagtgtttaataaaaagctccaataaggaaactgcaacagccccatgtatatagtctgggcctcttctccaaggccgaggacctaggccccacccagacagattgacaaggagtctggggcttgtcctttctgctgatggccccaggtggccttccctctcaggcctggggcaggcaggctgaagcaatgactcagctaacctaagccattgccaggacctggcctgggcagctgagccctgctttctcctcccctctgggtctccactcctcagtgcgggtgggagaagtggaccaggctacccattcccaaaccatctgtaaggaatgatctctggcagcacagccccctgggggctgtttggattgtctactgcaagggcaaagtttccttcaagttttctgttcagcttaatctggcattcttcataattcatccatttgcttaaaaattaagatagtgtttccatttggattataagtaaaaccaacaccccaggaagaaggcccataggtaaggagcacaaggcacatgaccccacaaagttctaactcccaccccacgctgtaacaggacaactctagcttcatttctttcccactcccaccccatgcccaacttagtggacttctacaccattcacctccacttcaacccaggcccctaaaaatgctcccaaagtactgatgcactatgggactggacaaatgggctcttgaaaaggtctaggtgagagagtcacagcctcaccacttcccactctgcatgggcccagacagcctctctcagcccactgggtctaactttggagactgaggagggaaggggccacctccagaggctgggaacctgacaccaggatgaaggagggacccagtggcttcctctgtgctttccttcctcctcctcccacatattttccctccctccttccccccccacaccccgcaccccttacacaacacacacacacacacacaagcacacaagcacacacaaacacacagcaaagaaggcaggctccaaagaagagcggctcataattattggtaaaatgcttgtaatgtttttctctctacccggtagctttcagttgttttagcagcttagcgaagcacttggctccaattgaattgcaaatcagcagctcttgccccaggaagagaggaagggaggtagcaaggagggggcagggaaggattccagacgaaagggagaaaggtgtgcaaggaagaagggcaggaggaaggaaatgagcaaatgagcaagggaagcttggttctgggcccagagcaacagctacagagaccgcctgctccttcgaggccctttccctgtcctcatccaccatccaccttctgctgtagcccactgccccatccaaaatatcaagacacattttataaccataatcttggggtgaagtgtgagggccacactgggctttctcaactactacaagaaaagcatatctttctagggaattacaatttatttgaaaacaatgtcaaaaacaaaagtcttgctttatctctttggcagtctccaacattcatatttccattttatctatttctttgactctgtttctctttctgactacatgtatttctacatatccatctgtctgtctttttacacatctgtccacctatctccttccttctgtttcaccagcacttcattctcccctcttggttcagaattccccacagaggagcggagttgatcagggaactctgggcggccgtgctgtttcagtaccatggtcagcaccccggagccgctcctccctgacacctacactcctcggatcctcagctctcaccacaggactgcccccaaattctcagatactgttgtgggggatggtacagtcctcagagtccaggagggaagaggagaaagaaactagccaggcctggcaccctgggttgttggcggaagaccacgtctggggccaactggccagacactaaccttgaagaggcgaaggatgttggccaccatgatggagacagagctccctgaagcaccgatgacaccgaccacacgttccggtttggtgatgatgggggggccgccactgccacagcggacctctgtgccatccttctcgatgagcgcctgcacaaaggtcagggactgctcgagggcatgggtgtccctcgagcaggtgtccagaatgcgggcgcccagcgtgatgttgggcagcaggtccgggtcattgttgatgcgatccagggcaaagagcatggcctccagccgatggatgcccttctccttcttaagttctccacaggccttgccctctgaaccccgaccgtgcactgggaacaggccgcccagtgtgatgtccccatctatgcgaatggaattcatgtgggggtggcccttgggcttccccagggaggaaggcacccaggggccataaaggctaaggagcaggcaaagaggcagccgggcccaccaccagccccagcctgtcttcccaggcatctcggaaatccctagagacccatgaagggcaggccccactcctagccttggcaggcccctggccccacagcctgggtgagcatgggcagggcagcccccacaagtctctccagggctgcttcagcagcagggtggctgagggcagccaatggggtcacccatgctggtgctcctcgccactcaggcagtgctcagttgctgacatgggccattcccacaggcagcagggagtggccagggagcagcaaagctctagtcttggtcctcacgttctgcgggcctgttcttgacggatgaatgtgaaaagagagtgctcctagcttcacgtatcttggcatcaaggagaaaacagcttcaatgctctcctcctaccaaccttagaagggagagagagggagagggagggggagagggagagggatggagagagggagagggagggggagagagagagagagagagagaatcaaacagaagcccaaagaagacattagctattctgatctctcatgaggagcctgagagaaggagatgctggaggttatcgccacaggctccacaaatctgaacttggttttctcccagctgctgctcgactttggttcaagtgggagagcctgaggcagaaattaggtcatgtttgaagatttcttaggcctagacccactgccatcagaaaccaggggatcagagtgcacactccccaggaacagcctgaactgacttgagaggaagaagggtcttcctcaacactcacccacatgagggaacagcaagaaatcaggtccacaggatccaaccccattttagagatgagggaactgaggcccagagcagaagagcattttgtccaagtcacacaggtagtgagaagcacaataccacgcggaccccagcttcccagctctggagccaaagacacttaggttccttggggactgaggaataaggaagccagcaaggccccctgcagaagaaaccaggctgggagctgctcactctgaagaccagggagaagctggggctgtcccagctcagaatcctcatcccaaatccaatcgggcaatgcaaatttcacatttctacctcagccacacccctggcagacggtaaccccaggggctccaagctcaaggaggtaggcctccttttcatttgcttggcctccctcccccaccatctttctcatggtctttagctctcaatttctccactgctctttctctctcccccacttcctccctctgagagggggggctcaggttatggcctgaactactgcacattattatgatcattgtcattattattgttgttgtgattaaatatttatctgcaagggtagaggagagaacaccagctcttcctcattctcactgctaatttgggctaatttcccctggggttccttcccttgccccagcctcccactcgctcaaaaccagcaacctccctcccctcaacttagaaggccacagggagaagcactggaagctgagtcagggattggttggggggctgacacccaggctcccattccaatgggtttgtcaaatgaagaccagcaagccactcacccattctgtgcctcagtttccctagccatttagaagaagggcttgtgtttggattaggaggttttcctagagatgcagtccctgcatccaggccaagcaagcctctcagagccacctgtcccctgcttggacttcccccacacagaggccccaactgctccagttctgggaaaggagaggaagaagagagtacagcctcaattcctgagcttccctgcctagcgccttctgaaccctcacctcacacatctgacccctcatcaaaatgtnacacacttgtacatacatatatcacatacacataaacacattacacacatgccagacatgaacacagcacataccaatacacaccacatgccatatgcacacacaccctacatacatactacacaccacagacaccacacacacatacaccacagacacaaacataccacacaccagacacacacacacacaatggggagaagcagaggccacatggtggaaggaggcctcaatgaggagaaaagcaaattcttgcaacattagaatcaagagcccaaggccccaggccctgccccctaactgctcacaggcttccctccaccccgacggccctgcccccacccacagcagtcccgctccatccctggtcttccccatccctggtctgctgggtctgccttttctgaacatctccaaagagctgggcaaaccaccgcctcttttagcctcccctccttcttttgatcctgtaacaggaacaagggaaaagtaaaaatactctgagtaaaaggcgccaccaggagcagaggctgggggtggggcagcagggggagccaaggccatccttccatacccttccgtaccccaccgggcagcctccaccttagcaaagaggggccagatggggggaggttgagtcctcaggccaccccctcaattctaaaacagccagggaagctcacacttcagacgtttgggggctggaggtggggggtagggggtggggagtggggggcctcttattctacccttccctctccttccccacctctctcctcaacctgtctattcccttcccttccaccccctgtcagatctttggctccagataggcagggagggacaaggagcaaaggaaagagcacacggtcatctccacacacaacagcatctttcagaacatcctccagagaggggatgtaaggagagccaaggagggagggtgcagtctgccctcctccccctccagcccaggcaccctacaatctgagggcctctctgatatctgcaggcctgcagggagaaactccccaacctgccttagtgatccttccaagtcccatgcttccgcacgtctaacctaaatccttccctccacaaccagggcctgagccaggaagaaccacaaaccatggaacgacaagcggctccaaagagagctactgcaacgtttactaaactcactcagctttttattctcccaaagctagggaaagagaattctccccaaacaccaaagtaagggacagagtcagagggaatgaccctgcacttggcacccagagctgctcaagcaggctttcagcccctgcaaggccactcaagctctgggctcttccccctgccctgccccagcaccccctctcaacctctgccttccttgagccaggcctcctccctcccctcagcttttccacatttcctccccaacttcagtcctctccattcacctctgtctctgtggcctggcccagcccaggtgctcagcaaagctgggcgtggcgtctgttttgaatctctgagctgtttagacacctcatcacccacaactcacacttccacgggaggggctctgctccccagcaggaaacatgagggagaaccagggcccttccccttcttcccccaccaccccaagcccacaggtgcccacgcagacctgagacgctggactgcaggccacctctgaggccccctccctcctgccccactgggggccccgcactggtccagcagaggtgcgctatgctggacagtctcctcccaaatggacagagcctagacccaaggaacaagcaagaagacgctgcaccccacagcaacgaggcctatagtttgatccccacccttgtgatccctggtccatggggaaaggggatggctaattagctccctcaacctcaacagcccaaccctctccccacagggaccacagcttgaggagaccgtgtcatactcctcttgctatctctgcatcccagcctggcacattgcctggcatcccccaccagagcttgtggaagggaacgaatgatgtgatgcgagtgaagaattctgggctcttcccaccctctctcccaggtcatcagtgtcaatattaatagaaacagcagccctgctcccagacactccccagggccgtgccaggccatgtttgaagagcaaggaggagggcacagtgggggtccaggctccatggatctcattcttttcccatccccaagaagctccagcccaccagcctgtatcaggaaccctcccaagtacagaaatccccagatcttgcttcataggccatcccctccctgttacaccaaaagagcctgattccaaagtgactggttcgctgggcatgtggtgggcattgcagaaacatgcaaggaaagaagaaatgatagaggacaggagggatgagaaagtaattcctcagctcaatgcccatagaaactagagaaaacttcaaatccgccattgtggttcctccaatctaggattccctccagcctcctccctgtgactttgacccttcaggtagcaactgagacccttcctcctccaggaagcctgccctgatgatcctagctctatttcctccttcttgcacattcacatctccctctctctttctctctctctctctctctctctctctctgtgtgtgtgtgtgtgtgtgtgtgttatttggcaatgatgagcctggaagattttaagggcctgtgtggaccacactcatctctgcatctcctgtgcctagcccaaggctcagaaactctcaataagcaacaacacacggtctttgcccggagccagcaggcagccaaggtgatgcccagggcagggtctgaagcagcattctgcgtctgcagagtaaaactctgacctggcaccaaatcctcacacgtccctggtgtggtcaggcatagaatacatcctttctgccataaccattcagttattgaccgtgtcgatcaaatgtgtgctggctctgctctgggcactggaaatgtgctaggagtaacagacacagacagcagcacccacctcttggggccaacctggggggtggcccaggagatgcaataaacatacttacataaagatatgtggcacttcagggagtccagaggttatgaagaaactaaggcaggtaaggagagaggtcaagaccctggggtctgttcagaaaaagatagtcaaggcaggcttctctgaggaggtggcataggagaaagcaactaaaaacagtagaggtgtgagccacaaaagtgtcccaggtagagagaagcaagggcaaagtccctgagttcatgtttagcattgattgttcaaggactagcaaggaagccggagtacccggagggcagtgggaacaacgggaggggggagaggaggtcagagagggcatgggtacaagatcagacaagacctgtgctgatggagaaatgggggcccactggagggctctgagcgcagtgacaggcaaggattcatggcaagagaaacctgagactcaaagagatgccacctgctaaggccacagcagctctggtcagctgaaggcaaagcaagcccatctcatcagcccaggaagggcccgacactgaccttccccctcgcccggagggggagcgcaaatctccatttgccagcccccacttccatgtagacttccaggcctctccttcctaccccaacttgtcctgcctccacctaccaccactgccaacccgcccccctcccagtcttctggcacaatccaagtgggcatgtgtctttgtttgcagctggtgctactgtgagcttcccgactaatactgtttcttcctctctcctccttcttcctgtccaaacacctccttaactcagagctccccctactccagcactgccccagagggagagggcccacgggcttcacaagtcaaagcccagactctaccatcttacacagtcataagcacaaccagttgtgggtgaccctcccatccccaggccacacaggagccaggcacagggaagggccagtgctacctgtgaagtaaatggctcaccagaaagttaagatcaagtccccaatctttattcctaaagatcaaaaatcacccagtgattttagaaacaataaaggtgtaagccacagcaatgaccgtgttttcactagaagtcacaggcccaaccagaaaaccggtccagaggccagtttctatcaccctgaagagcagagaggtgggaaggctgaggataggggacagggcaggacccaacctcgtggtccagcctgggactagcagccagctggctctcctgggacccccctgcattacagccaatgggcagccagtgctttctccagaatggggaggcttaaccagatactacagctagctagtcagcgtggctcagcctgaaatggcatgggctggcattatgggctggcatttcccaattaccacagataatatctcccttaattgaatggggtccagataatgtcattatgcactgcattccccaatttatttaatatacatgtgtacacatatatttatgcctcactgctgccaacgacattgctaaaggtgaggttgataataaaacatttcgacgggagtcatcagctttaatttaaggggtgatttttactatccttgtggtgctcatttttccaaagagccaagagaaacaacggacaggctggaagaggctggctcaggcctgcgggctaggaagtggggtgggcagggctgtggggtaagcttgtcttttccaagcaagttctgctgctactcctccttcttaggagtgagttcaggcagggaaagggggggggacaggggggagcagaggcagaagcaccacccccccccccagcttgactgcaggactggcagggaggaggaagcttgtctggaatgcagagctaagaggctggggtagcactgagaagcagcagggtgacatactgggagaaaggcagggcaagaagacaagggaggccagagccaggccagagccagtccacagccaggaaagaagcagagttcccaggagccaggaaaagacagtctgcactctgcaagggtcaaagacagtgaaatctctaaactaatttttgatagtcccctgctaactggggcagagttgacacgaaaacaagccctccttgctctttccaggagtcagcaccaggctaggtgggagcaacggaaagccagtgtccttggccgcaggccagctacccaccaaggcaagcccctgagtctcctgcctcgggtcagcccagctagctggccactcctctgccagccccagcaagcaggaccagagcccagatgccggcttccccctatgccttctccgggtagcaaaggcagcttccactctgcagaagtgagataacctcccagccagcagctagcgggcccagctgcccaggctgccagtggggcctgcccactgcaaagttaggttctcagccggccaagcagaggaggacaacggggtgggcagatgtcttggggtgggtggtaattaggggctgcgagctccagacttgtctagggtagaggatgtgtctgttggctgtaattataaagctcagaaacccgtgggtcccctgatcccatcttttcctgccagctacccccctgcagcagggtgggttgaggtgtggcccagcatcctggaagctggaccaggggaccccccatagagctttttgctccctccccttcctggtagcaggtagcatgctagctgctcacttactggctggctcgctcactgatgctctcacctacctcgggctgcctgtctgccactgtgccaggcgctcctcttggggacgtcacgcctccaacagaatgaagacgcccagacgcaggctgggggaggagggatgagggaggaagacaggtgcggcctacactaggccacaaaggccaagaaaacagctcaactcctgacatgctcccgccccccccttccccctctgccagctcaggactccttctctgtgccctgcagcctgccctaccaccatcccatatatctctcatttaccaccagtagagcatccttttgggttgagcattgccatctcctctctgggcctcttgcaaatgcaaacatcccagagaaaggtagcccttgcactgactgctgcctggcgggaggaggcgggtaataactttttggtatttttgtctctgagaggttgaaggcattgacaggtgagggaaagtttatggctaacagacagaggttggaggaaggggaagacagtggtcatccaatacctaagtgggcaggcatgctcatccaaggctaagcagagtctcaagggtaccaaccccaaaggcccccaaccccatgtcagggataggactctgagtaagggccaaagaggccctccagtggtcttctgtggggcccagggaaagggacagagctctgagccccccctccactgcagacgtcctcttcaggggccctcaccactagctcccagagcctgcccaggagccgggaccacacccaagagcccccagacacacctgtgggaactctctgccacctcaggaaaggtcaccccgaaaggctccctagggtcctcacctcttgactgaagtgctcccaccacccaggcactggcttctgaagagttcaaccagcagacgcagaaccccaggcccacatcccatgtggatctcagaggggaaagtggggcagacccagcgcgcaccctgggggagtagggagatggaatttagaacattctttatttccaccatgagctggccccagggacgtgaggctgagtagcaggctgtgggaagggggtgcccagcgtggagactctcagagcactggccccgccgcctaccctgaggccccacagtggcccagaatggaggatgatgggcgcacacgcgcgcacacacacacacacacacacacacaccctcccccatcaccgagagctttccgacagacgacagagggtcagacagactaaccacggctcccactgacacgtggattcgggcaccccactaggcaagcccagctcagtccgcaaagcggctctcccgcacccaggggcaggcacggtgccgagacagggtaaggaagcgcggagcctcctccgaaacggactgaactctaaggagggggtgtcactcgtggcctgggggcagggggcgctcgtacgcggggcctcaggactccccgccgccgccactgccgccccatttctgcacaaacagcttcagaccgccccggtgcgggggcgcctctctcaggccgggcctccgcctcgcagccccgcccccgcgcggggagggggcgccgccagttcccgggcgccggggaagcccgaccccggaggggaccccccagcacacacacgcgcgcgcacgcacggcctggccacccgcccggcggccccacagagcctcgggttcaccggggtcccggagagggtcggtgcagagtatcggaggagcccctgaccctgaagtcccggggccgcgcggagcccccaggccctggggcgcagtcccaagccgcagcggccgcgagccagcgggtccccggctcggccagtggcgaaggtgccgctggggcgaccagggtagcgggacgcggtgcaagggaaaggagccgaggcgcgcgaggctggcgctgcccgccctgccgccgggggaccgcggggaaggggtgcagatgacgccccgcgcccccgcctgccctgcccctccgcggagggggcgcgctaatgcccccgcccccacctgagagctgccacgacccccatttggcagaacctgacataagccccactgcacagagacactttcccccaggcccggaaaataaataaataaataaataaataaataaataagccgctgccccgtccctccctcgcgggcgttcggggagcctgccctagccccgaagggagaccctccagcccgggtcccgcgccctccggccccgagggctccggtccgccggccctcctccgggcagcccgagcgcgggagctcagaggccacctccgcgaaccccgaggtccccgccgcagcccacgccccagaggccggagggcaccgtcccctccgccggttccccgcgggccacaactcaccgcgcgccggcgaggtctgagccgcggcgaggggtcggttgcgctcccgcctgccccgggggcgccgggaggcggcggcggccgcgggctgctcgcgctgcccagagcccgggccgcggcggacggcgctgacgctgcggaccgagccgggcgccgagccgcccggagtcccggacgcagcggggatgggccggcggccgcccggccggagccgcctccccgcgcgcggcgttctgctgctgctccggcaagagcaagggagcggcggccagccctgccccggccccgcggagcccggcgtccaagccgaagggagcgggcgaggcggctccgggcagcggggtccggccgggggctccgggcgggggagtgcagcgcgagccgacctgcgagcgcagccggccgagatgcgggcgcccggcggcgcggcggcagcggcagcggcagcggcagcggcggccgcggcggcagcagcaaggaaaaatgagagcgagcgagagagcgcgccggagagcgagtgagagacggggagagcgcggaagacgcgcagacgggaggctgcgggaggggcgggggcgcccggagcaccagggggcgaggggaccgccgcggctcagcccccgcgcccgccgccgccgccgccgccgccgccgccgccgccctcgaggaggcgcgagccgggcccggcaagtttgcgctgcgagtgcggaccgagcgcgcggcgcctccgccggcctcttaaagagcgagcacctgggcgcccacccccgaccccgcacccgcacccgcacctccgccgccggaaggccgggcgggccgagcgccactccgcctcgccacacccgccccgcagtttccccctcccgccacgccccagcggcgccctcccctggaagcccccttccttgccccgcccccgtgggtcagcccagcggcccgaggacgcgtgggggggaccctcctgactccaacggtcgagggtcagggaacacagcctccgacacacacccgcagaagtacagcaaagcacagcgatgcaaaggggttgcgctcctccccacccctgtgcgtcacgagaactcccacccgcagggcctcttctcacacatccgcatgcacgtggcgtgtgcccccatgtggcatgttcatttgcacgccccaccgctcctggttggagcataccacgggcggggggggggggggggaaaaaaattgggcccccggggggaatttcccccggcctttatctccacccggtggggggggggttttcttttggggcccccctcctccccagaaccccactaggccaggggaacctccaagccctggtccacagtcagccggtctcccatcaaccttggtttgccaagtgtaacaggtggcctggctgccaggctaacacaagccagggaaagaatccctgttggggagaagctggagccccagctctcttccttccctggggggtgctgtgaaaaatcccaggagagggcaggccttagagccaggcagaggaagaagagagggagggagccatgcagccctcttaggattgcaagagcatctcgtcccagactgcagaagtggcttcaattagagctgtgacgtgtgactgtccttgtcccggggagggtgctcagcacagtgccagggagctggggggagaatggctggcaatggcctccctccccctcggtccctcagtcctcctggctgatctgcagggtgccaccctgggcttaaatgtgcctctgcccatggggtggggggcctcagcccccccttacagcccctcccctaattgccatagatagcacccttataggtcaagggaatgtctggggagtctggggacagcaggaatgaccctcccccctactcatctgatctttctccctccatgcctcatatccaccacccgtgccccttcccagagacccactcgggcacccccacctggtccagaattgcagactatgccaggctgggaccgcaactggtttaccatggttcatccggtgcttggcactatgcctgacccatagtgtgaactcaatgaatgtttggtgaaagaagaaatgttggcaaagcatgaactctctttgctgacacattaatggccccaaatacatgtctagtttatccagtcagaccaaagtctctgatggaaggacctagagcatgaattcattcataccttttgaaatgcaatcaacactggaggagatcctattccattcccagtcctgggaatccacgaatgactgaacactatcctgcccttgaggagcgcaccccatggccatgcacacctcagcctggagcattttacagggatgtaagctaaggccacgaaagctcctgccatccagtggctctacgtagcctcatgtgcacagctctgggcttgcaggacactcctgtcactcctgaagaggcctgctccctgggaacagcctgcctgggtccccctgctcagggtccctcagtttccctaaccggtatgtagaacaaggaccacgatgccgacctcagagcagctgctggtgggcaataagccacccgttcagggaatgctgggaggctccaattcaacttgccttgggcttggcaagtgactcgtcctatcttgaggctgcatctgactaaaggggggggtccttcatctaattcatggaaagttaccctaagagctagcggtacctgggtcctactggccaggccgtcgtgagaaaggaatgagataatgtgtgcagagcgcccagtcctgtgttcaggtgccagcaagtgggagccacatttttaacacggtatcgtccccaatatccttgtattgaattaattgataaatcagttcattaatcaataaagctgaaaatacatgggccatggtttatggagaaggcaaactaacacagcctttcttgccatcccctgccctgggtgttgccttcactgaccataattatctcgcccctgccccccaccagctgtgtcgcagaaggctgggcaggctctatttttcaggggttaaaaaaagaaacgctgttggctggcagatagctgagagtgtgcacttgtccagtttgaagatgcccagcctgaagcctcgctctgggcagccgtcccgggccactccggggcctccctcccctccacccccccagagcactcagccccccactctcaccggtgagccccagcttggtctagctgggccaccctccttctcctacctgctggctttggctgacctgacttgtcatggagacagacatacatacacacatagagacacattcagatatacagacacacacatatatatacaaacagccacacacccacggagaccctcagacccagacccacatggaaacacacatatatacagacaggcacacaccctcagagaccctcagacacacacacacaggtacacacacatatatacagatattcaaataggcgcacacctgcggagaccctcagacacacacacacacacacatacacacacacacacacacacacacggatacacacatacacctcaaggaacttcagttggtgtccctgacctgggcatgatgtggaaacaagggagatacagtgccacctctataggggaagagtgatcagaagtgacctcaaggggtcagggaacaagggtcctggtgcctagggccaggtgggacacaaaggcctgaattcccagatgccccattcagcaagctgtaccctgactgttaggggctgaggtggggggagagggcccaggactggaagcaagaggctaggtcctctgtgtaagactgtgtgacctgggggaggttgcccagcctctctgagcattggtttccttaccagtgagatgaggggccaggctggtgtttctctaagcatgctgggattcagggttgcatctcactcggaaatctttaaaaaaggccgacctgcttgacatgagggggggcaggggggcggtgttgggggagtgagcatgctggttgttctaatccaccaatcccatgggcacaggcttccccagagaaaaggagacaccatctcagcattgggggtaggggcttggtggaggaggaaaaagagacaggtagtcctagagaaaataataatactcctgcgcttcatgtcgttgtgacctggaaattcttcccgaagtctgacctaactcccttatgctgcagcagagacttcctttgggctctgattctgacctccctgttatggggaaacaacttccctgccccttcccacccactgtgttggcaactgtatccaaattactcctctgacttcctcatttcaaaggatgccaaataggaaagggtgattgattgcctttgaaaatcgtgaagtttagaatttgttgaaataaatcagagtgaacttgaaagtggccagggccagaggagagcctggcaggcctagaacacctaataaatggttccttgtccagttgacctgaccaccgtctcaacctccatgtctgatgggcttcaattttggtttcccctaaaccaggccattagatgaaaatgcctctgatggaggagttcctttaaacaataactgtcccccagcaggacatttccagggtgaagagctaactgctagagaaggcagtggttccaggctctctgggaggggcctaaattactctgctggcacttggctgagagcaggtgtcagaggcaggaccctggggttaagaatcctgaggccaatcagtcctcttctgcctcctggggtcacaccagcccctctcctttgccccacggagatactgagtctcaggggcatgggcatggggactctgaaattcccccagccaggacaaggtgtgagcgaccccctcctgacactgccgagggttagcagaagagggacctgaggatctactcttcccttaggccagtgtgggtccaacctccaggacattccacttcaatgagctctgggactttctcaggagtcgtgaactggctaaagctatgatccccttttcacaattccaaagtccagaatgctctgaaagccacaagttggtccataagtattccacaaactcctctggctgcaaaagctgatgtgagagcgagtcattgccacatctggctcccttggtgggagataactctgcttcaccgcaggcataggagccagcatattcctttggggaatactgctccaaggcctcctggggtattgtataatagataatatttgtgccatattttcttctaaattccaaaaaaatctaactgaggtttctgacaagggtctgctcccctggaatgatccaattgggaccaaggactctccaggttacacagcatggtcacacctaggccctcccacctgccacctgccttgtgaagggagagaggggacccaacagaatagagagcaaaaaagagcaaattctgaatacagctctgctaaacccaagtgcatgggaccagaggcaaaagccagacgagatatgcaaggattcaggggacattcagcagcatcttgctggagagaggttaacagaggctgcaggagcaccccacaagaatgggggtacaggtaagatgctgggggaccctccctgcctgtgtggtgatgaagccagctgggaaggagaggaagttcatctggtgggtgggcaggggaagcatggtgggtggggcggatggagggagagaaatggtctaaggtcaattttagctgcttccctctgcccctcagctctgaggcctgaaaaatgatgcttccccttcccttcctcagcctcactttcccccacctttagggcaaaagagggaggggagaggagaaaggtaaaggaggggaagcatccgtgctgtctcaagctcaagggtggccaggaagggaggtcagggactagtgtcacttagactctgacagaggagctgagagactctggccccatgcacagggcagtggggcgcacggcccaactgggctttggatcctccacagctgagccagtgcagagcatgcagtaggtgcatgttcgcttgttaaacagatgaagggctgaccccccccccccagtccctaggcatcctccttctcctccctagtttccactttcacctcctcctctctccagcaaccctccctctctcttttttttcttaagactcaggattttccagcctctttgccacactgcaatttaaaactacttatcatccctctctctccacatgtccgggggctgtcagctgcaagccaaatgtcattaggatggatgtcacaggccgggatgtcaaaatacaattaacatttaaaaacccctcccgcctgccaggccttgtggccagcctgctccttgggctgagtggcagggctctgggtgccagggggaccagccaggtgacaggcacaggaggggacacagtccagctggccatggtgggagggggacaggcccaagctggaaaaggcatgtgttctctcggctgcaccccactcacagggtctttttccaggtctgctccccaacacatctctccagtcccaatcacacactccatgggcagcccaagggcagatagaccccaggaccgctgctctaatccagtcccatgccactcccctacttggagcttcagtgtccctcctgccaaatgtggatcgtgatgctgctggggctctgtgaggcactgcgattagagccttaggttgtcctccaaatgggccccaggcccttgggaagaggcacaggccacacagactggccgaccgattgacagctgggctagaaattgccagcaagcccctttgtcaatccctgctgccccctcaacacacgccagccttggtcctccttaggaacctcccagacagtgctagaagggagccccagcatttgctccctctgaaggaggacccagacagctaacaggacagaaagctggaaatgacccccaagacctcccactatcagagcctctgatgcatctctctgcattcgtgctgtctccaagattcttgtcctcactgctgaggtctctaactcagccctcgaggcagcgccagggaggcttccactgtcccatgggggggcagtcatagtcagatcacagggctggggtcacaaccccacggcctctcctcaccccacaccctcagttatcctggaaatctaagccacatgcaggatccgattccttgctaaggcagcggcattcctgcaaacaccctttgccctcctccttcgcccattttctcttgcctcttgcacctgcctcacaaagaccaacccatcacacaggactcccccccctccaagaggacaaagcagtgctgggaatgaaaagcccacacccatcagctcctcccttcgtgggctgcattttaatggcatttgattggattggatgcgcttttaattccctcctgggacatcagaaggagggtagaaagaatctttaattcatcaaactgaaatattaatagaacaccaaccagctggagtggggtgtgagaccccccacaattgaagacgaggattgcgcaggagcaaggtgggagatggctaggtgggaaggaggggcctctcagctgggctgggcgcgggaatgggtagaggacccagggctcccagccctcccaaccctcccaccccatgcacgaagtcctacccaaacatcccctcacctgggcctcccctagccctcaccgcctcaggggtctttaccacccctttgggcctgtacacctgagcaactgaggcgcagaaagggggagccaccaggccagtgcttcacgtcagcttcaccacagaattcagcctgacctctggacccaaggcctccctggccccagtccctgggggtcacaggaggagtgggcaccctgaggcattggcttggtcccaccaagcgttccccacctgctgacagagcctaactcacctctccaggggcaaaggcttttcccacacactgcagaggtgggggctgacggcagaccctctcccaagagtagggggagcttcagaggcgcaaaagtagaagcaggggcatgaaagacaccctctgtttctggcaggcgggcatcagggtgtaagctgacaccggctgaccttggggcggctcagattaaggaactctgtggttaaaggccaggctcttcttccgcctgagcctaagacacctgctctcagccccagccacgacactcactgtgtcactgtggggccacaggaggtcacttgacctctccagcctcagtttcctcactaataaagaggggctgacacagctccctttgcaaggttgctctgatgaccggccccagagatagtagagctgctggcaccaggcctcccgctgctcctccctcccctgcagcctccagcccaagtgggaccctgggccctccttctctgtctcacctacatggtggatcaccttctcttctccacccgagacaccaacaaccccccccccccagtcgcccacctccaagccccagcttaaccactacccctgtggagaattcccgagctttcagtctacatcccccatggggaaggatcatctcttgcccctctatttcctgtgcccggtgggtgtacagcctgtgagcaccagggtcctgaatagacaggtgcatggacacacagacaaacggttagatggacaggtggtcctgacctccaccaccaacccctgtcccaaagttcagaattcaggaagccagtgggaaacggacagaacgaaaaccaggagcgcagggctggtggccccgctcctctgccggctcctgcaggagggggtgcgccccagcctcctcgggcagggcccattcagcccccttccaccccagaatttcagggagaccacatctcagggcgctccagatcgggaaggggcgcgaagagcctcctctccggagagcggccccgcgggccttccctcccctctcccaggcccggccgggagccccagtcgccgcgaaggcgccccagtgcggacagcagcgcctcccggtggccgagcgccctcactgcagcgctggcccggccccgggcggctctgcccggacctgggctggaccgaggccccggctgcgcggcgcagagcgctcggcgcctcctccctccgacgccgggtgcgacgccccgattgagaggcctgtttttcacctgaacagattcccggacaaggcagcgggggcggcgaggggtctatttcaaggctgcttcccagctgggccgccgccccctcggattcttgcgcagcccagctcacctgctctgacggcagggagggagggggccccttctgatgccccgccaagtccagggggagccgggcagacccggggcaggaggcggtaggtgaggggatgtcctggattcctaggtgggcagaaggcagtgtaaggggggggcggagtgcgatgaggaggcatgaaaggggagcgaggggggcgtcagccccaggaggttgcatactccagcctcccaaaccagcctcacttctctctctgcccaaagtcaacatttgctgcactcccactatgtgccaggcccgtggctggcagccttactgaccactggagtcacctgggagcttttaaatatatatattttaaaatttttatttatttatgatagtcacagagagagagagagagaggcacagagacacaggcagagggagaagcaggctccctgcaccgggagcccgacaggggagacgatcccgggaccccaggaacgagccctgggccaaaggcgggcgccgaacggccgcgccacccagggagcccacctgggagctgttaaaactctcaatgtgggcagccccggggggacaacgttttagcggtgccttcggccagggcgtgatcctgtaatcccgggatcgagtcccacgtcggggtccctgcgtggagcctgcttctccctctgcctgtgtctgtgcctctctctgtgtgtgtctctgcctctctctgtgtctctcatgaataaataaataaaatctttaaaaaaaataaaactctcaatgtccaggcacatcccagaccaattaaatcagcccctgtgtggtcatctcaggtgatgcacagtccaaacatgtctacggcctcagtgtcaggcatcacctcaggcatcaccgatagcattgacaagctctgtcgggggtagccggttatcttcaccatggtcctgaaaggcacttggagtagtccccatccccgcagagcttaacagagagctggtatggaaccccctgtgtcatgcctgtgccaataaccatgtcctcccaggggccccgaggactgcattctgaggggacagactggagatcagggcaggtgagcactcttggaaaagagctctttccaaatttggaagtgtaaacagcaaagggcccaagggtggagaggtgcatgtgtttcacccatgagggcccatggagctccagggctctgagccacagctctgcttgttagacaaagggagtggttccaggggcactggatgaatcctcaaaatagatgccaagtctactcaacagcgtgggtgaaacccactgtcataatattgagcagaaagaagccagacccaagtatacatactgtgtgattccattcatgctaagtataaaaacagaataaataacctatggtgagagaagtcagagtactggtaatctttgagggggtagtgaccgaaaggggcatgaggggacttctggggacttctaggttctctccttcgtctggatgttaatggcacgggtgtgttcactctgtgaaagtgtgttttacttcagtaaaagtttaaaaaaatacacagaattatgaagctgcccggttcccagaaatgccccctgggcctcaggatcgcttaaaatcaggtccagagctcctccacctctctccccagctcccatctgcctctccctgcaacccagctccatccagggtagccggaaacttggtgtcaaagctaggattctttggttgccagcaataggacaactctggtcaacttaaacaaaaataaaataatggggactgacttgataactcatgtgtaacttgccagtggtcactgccagttctgtaaaagtacccaggctgggtttcaggccgccttaggataacagcagcagcctaaatccagatccctgcacatatccccccaaagccatgcagaagaacgaggagagtgataaaggcacccaggccccctaccctcagcgttaccaggaatcagagtgctgcgaacttcagtctatagctaagtacagaaagaaagcagcagagcaagccctggaccccaccgagtagagaaggtcaagtggagactccgtgcaaaagaaaaagaaggcagcaagagcctggatggggacacaaataaaatgatcctgagagagagtgaaccctgccctggtgggaaaatactgcgaagaggtctgatgcccagtagatcagagcgctggctgctgccagaattgaaagcaaggtgttttgggggcacccggctggctcagtcggaggagcatgagactcttgatctcagggtcgtgagtttgagccccacgttgggtatagagattacttaaaaataaaatcttttttaaaaaagaaagaaaggaaggaaggtgtttttttgaatgtgtgcagctggagtagctgtcttaaaaaggcaccagttctgggtgacagggacgactggggagggtggtggctctgggaggcttgctggtgaacagagggaaagacataaactgtcagtgaagtaagggattaagtttacagaaacgagaagatccagtaaattaaatgcctcagtctccccacccccaaaaaggtgtcatcggtttgcccaaaatgtcacttcactcttgcaacagaagacagtgctcctgaactaagaaacaaagtaagtcacccaaacttctcacctggtctgccaatgcctagtattgctggtcaaaataaacagaagtaggacgcctgggtggctcagccattgagcatttgcctttgatcagggtgtgatcctggagtccagggatcaggtctcacatcgggctcctgcagggatcctgcttctccctctgcctgtgtctctgcctctctctctgtgtgtgtctctcatgaataaataaataaataaattaattaattaattaaatctttaaaaacaacaacaaacaaaacaaaacaaacaaaataaacagaagctacctctggaagaacagagaaaagaagacgtttatacaaatccactctgtaaaaaaaaaaaaatgagaatcaaaacatttcagctgaaacttctacttataaaatagataagtcatggagatgaatagtacagcagagggaatacagccagtgctaaaggagtaatgttgtgtggtgacagatggtgactacacttaccatggtgagcattgaggaatgtgtagaattgtcacatcactgtcatacacctaacactagtagaacattttgtgtcaactatacttcaataacttttaaagtttatttacttattttagtaatctctacaactaatgtggggctcaaactcatgaccctgagatcaagagtcgcacactccaccaacgaagccaaccaggcgcccctgcataattaaaaaaaaaaaaaagaaaaatatttcatctgatgagaagtctcctccagaaaaataacaccaggcagaggacaattctgacacaacacctcaacctggactaaatattctttttaaaaaaaaaataattttatttatttattcatgagagaggcagagacacaggcagagggagaaacaggctccctgcaggagcccgatgtgggtctgggactcggtcccaggaccctgggatcacgacctcagcttaaggcctacgctcaaccactgatccacccaggtaaccctggactaaatattcttaaacaaccatttgcagagatgaaagacattttttttaaagattttatttatttatttatttatttatttatttatttatttgagagagagagggagagagagcgcaccagcagggggagcagcaggcagagggagaggaggaagcccactcccgatgagcagggagccgaacgcaaggctccatcccagaacctgggatcatgacccaagcccaagacagatgctcaaccaactgagctacccagacaccccaaaaaacactttaaatcagaaattttggaacatccagcagaaatgggccaaaaaattagaagcagaaataagagttaacaaaaatcaagaaattgaaaaaagaaagtcgaagtcttctcagaagtgatgattaaaaggcaagatacttaagagaaattaaattgaactgaaaatataataagaggcattcatatcaaagaaggaattaaaagaaccaagaaaacaaaagtaaaatcaataataatgtaggggcacctgggtggctccatcagttgggtgtctgacttctgatcttggctcaggccatgatctcagggtgacgggatcgagtcccacgttgggttctgtactcagcacagtctgcttaggattctctgtctccctctccctctgcccctccaccccttaaataagtagatgaagctttaaaaaatcaataacaaagttaaaaaaaaaagtgttagagagaaagagatggctgaagaagatatacaaagagaatacatcatgcaaaccactggagtgcccaaaaaagaaaaaccaaacggttgaaaagaactaatatcaaacaaaagtagagctccctcaccccccaaaagaagaaactttctagaaatacacaacaaaatctacacattgaaggggcatatcaaatacttagaaatgttgacatggaatggctgtctctggggtaaatcttaataaatttctcccatttactgggaaaaaaatggtgggccccaccctaaccagaggcagctcagccttcccagggaagaagagagaaactgatgtgggtgccccaagtgtggtgcagggagcctgccgtgccctccaggtagcattcttgccaggaatattttcacctgaatctgttcatgaggagaccactggataaatatggattggaagatactgtgcagagacccctggatttttcaaaatcggcaacatcatgaaagacaaaagacacggggcgcattctaggacacggcggagtcatgacaactcagtgcactacatacctttgattggttcctggatttttagaaaagagttataaaggacattactgggacaaagtttaaatagagactgtgttttaggtaatattactgtgttgaccttaaatttacaaggtttgggggcgcctgggtggctaagcagctaaactttgcttttggctcaggtcatgatctcagagtcctgggattgagtccgcagagagcctgcttctccctctgcctcttcctctctctgtatatgtctctcatgaataaataaataaaatctttatttttaaaaaatattttatttagggcagcccgggtggctcagcagtttagcaccgccttcagcccagggcctgatcctggagacccgggatcgagtcccatgtcgggctccctgcatggatcctgcttctccctctgcctgtgtctctgcctctgtgtgtgtgtgtgtctctcatgaataaataaataaattcttttaaaaaaaaatcaggaggttattagctggagatgagggaagaaaccatggatgttctacccacatggactgcacaagcttctgagtttaacttcttactgcttcccacatgaaaaggggctcgaccactgctccctggattctagtttcaaaaaatccacagggagggatccctgggtggcgcagcggtttagcgcctgcctttggcccagggcgtgatcctggagacccgggatcgaatcccatgtcgggctcccggtgcatggagcctgcttgtccctctgcctgtgtctctgcctctctctctctctctctctgtgactatcataaataaatacaattttttaaaaaattcttaaaaaaaaaatccacagggaagggatttattctattctcctggatccagctagctttggccagggttaaggtgatatgacaggaccaatccagaccaggtgcctcctccagaaccagccacctgtggccgggggtttgggtcctataagaacgtggctgctgtctatgttacagaacggatcttcagaacaggggagattctgagcagacattatccacagtgcagggtaaacgcaggatatcttgggcacccagaggagaagcaccaggcttggggcccagggtggcggggggggcgggaggcaagggggcgaatgggagctgcccgggcatttggaggaggcttccagaccttggagaagcctgttatgatgggcattccagacccgtgtggagcctcctctctcacctcccgcctccccttcctccacccacacctgcagtgagtgcagctgggagacctcacagtgcaaaggtcagatttgggggctgggtgtccaggccattgcaaatgtgcacatgtggctactgatacctgtccctacagggacagaagctgctccctcctccccaggagagttctcaggacagtggatggaacagctctgtcctcagggggccccacacggggccctggagtcctgatgggtttccctgcccctctctcaccttggcagcttccagctcggcctctgatcactagtgaccagcagagggcgcgcccacaccccttttggccatttcaagccccgtcctttctcctatcaattccttccttataagggtgctaggaccctggcaggtgtgaaggaaggaagtagaataacttactgagcacctaccgtgtcccaggcactgcgggctatttcactatcccgcacacttcatttgccccatttacaagggaggagacgggctcaggaagatggtcttcagggacattttccatcaggtgtacacagctcctgagaaaggtccaccctcactcactccgcaagctgggggcttaggtgaaaaggcctaacgaaagcagtaaggggaaccaccctgctgcctctcgatcatgtgcccccagccaggcctgggctcagaacacccccgggaaccgccacctgtgtttctgccctggccagcctccctcttcctcactgagtccaagggtttgctcctctgggctccaaggaccttggctgtgagctccccctctcctgggcgtgacccccagagagaggatgggagggcagaagggagagcgcctcccccccccccccccaggatacgacttccagtggggcacggattgccagcctagagctcccttaatgacattagcagttgccacacggagcccagcaaggacaggggctcagcctcactctggggccactcatcccctagactctgtgccactcctcacctagggcctctagctgagctgggcacttgggggcacggaatgggtactcttggcgaggcggctctggccactagatcccaaggcgctcagctctgtgggactctatcacagtttccccccagatccaagcttcagcctcccctcccataccttcccaccatcgtggcagatcctgtggcttcctggtgattttcagatacaaaaaagcccagtcccatctagtgccaacttaaactctacctctcagctaatcagacgctccctctgccctcatggtggggtagggggaggctatgggggaaagagaaaaaagatggggaggagctctatgtttcactgccccctggcattatctcctccttggggtgtcaatgtctcccttccctgtggctggtgtccagagcagtgcctcttgtaggatgcatgtgggtggcagaggcctggctgggtctgttcagtgccctgtgcacgcctccaccccctggggcccatcccaccactgctgctgctgagggtcctctgcccgtggccagccctcctaggggatgacaaacaaaatggccctagcactcccacagggtctactcggggtccaggggagactccctcatcctattcctgcctgcagatgtccccactccacccccacccctgtccactgctcaggtgggcatgaggaagatcagctgggccactgagaaagcagatgtccagccagagaatgagatgccagtctccactccccacgggcaccctgcccattgagaggaatctctggcgttcatcttcatggctggccctcccccctatgcccttgattcatgtgatttcttggacttcctaggctcttgcccataaagacccaggtgggagttggggggcaggtaagggttgggataatagtgataataataagtaataataatagcagatatataccgcttcctaggtcctggtcactgttctcttttacatgtactgcctgttagtcctcagcaaccctacaaggtgggcaccatttcgcggacagggcatctgaggtccagggaagttcagtaggtccccagttccctggctctgttactacaccatccctgctggtaccagaactgtgggctgaagcagaacaagttcagccgctttccagcagcccctggaggggcaagtctgctgcctgggcagagtcttctttctccagaatgtgaatccaaatgcctctttgtcccagctttggttcctaagtaacagcaggaacagggtcttccagcattgtttttcacagctggccagcacctgccgtttgacctttccttctccaccaccaagaccacacattgcatcttgagtttgtgctcaagtgagctcagtgagtgttggcagctgggacacctcacagtgcaaaggtcaggtttggggactgggtgtctgggccattgcaaatgtgcacagatggccactgatgcccgtccttataattggggcctgtctaatccttacaaccctgcacggagcccattttacagaagaggaaactgagactcgcctgagaccacacagcttgctggtatcaggaccagtccaagaaggatatgggatgcctgactctaaatctgaggcctggcttgagtcacttattcaaaccatttcttgccaggtgagtgctgggtgctgaggcagcccctgaaacatcacagggcagtgaggcagaggcagaggatggtacccgtgtggggactccagagccactgccccgtcgtccatcagggccaccacagacattctgcacagcaaggccaggctgcttttcttggggaaggtacatgtttccctcacggttaccagagcagaggcaagactcctcacccactcaccgggtccctgcttttgccaaatccaacacgtggagatttcatttcacaaaaaccaatgaaccggggcagccccggtggcgcagcgccgcctgcagcccagggcgtgatcccggagacccgggatcgagtcccacgtcgggctccctgcgtggagcctgcttctccctctgcctgtgtctctgcctctctctctctgtgtctctatgaataaataaataaaatcttaaaaacaaaaacaaaaacaaaaaccaatgaacctgggtggctcagcggttaagcgtctgccttcggctcaggtcatgatttcagggtcctgggatggagccccaccccccccaccccacctacccccgcatcgggctccctgctcagtggagggtctgctccctccctctgcccctgtgcccattccatgctttctttctctcaaataaataaataaaatattttaaaaaatcaattaaggtgaggttatttgcttcaccaaaaaagtgaatgcaggatttttaaataatacatttgttttatttttttaaatatctagatggcaaaacatttttaaaatacaaggaggcaggacagccccggtggctcagcggtttagcgccgccttcagcccagggtgtgatcctagagacctaggatcggtcccacgtcaggctccctgcacggagcctgcttctccctctgcctgtgtctctgcctctctctctgtctgtcatgaataaataaataaaatctttaaaaaaataaaataaaatacaaggaggcagaaaacaaaataataaccatctatcatctcaccgtgtaagaggttagacagtaaaaggcagagaagctgagcagcacgggaggatgtgcaggcgcacgtgatcagaccacagatagctcgggactcctgcaatccccaccctctcttgcatcttctttggtctcccagcaccttggctccatgctctgcaggcattctccccatgtgtcggaagtaagactgctgcctcactgagctcccacccttatgatgctcccaagtggaagaagcgcctcttcccactcaaattcagaattccccagggcagggctctaattggacatcttgggtttcgtgacccaacctgcagtctgaaggacggagctctgtaattgccagtcatgtgactgggctgggggaaaaaccagaagttctccaggagaaggggctgttcttcttgcagacaaaaggattagatgaccactttataccaccagggggaaatcatttttaatatctggccttcagtgcaggcaacagaacccatgcaggatggtttgtatagaaaggaaattattagagaatataaagagtcttctgtttctggcattatagcatccgggctgaggagaacaactaaactctgaaaaacatatttatttgaaatatagccaatctgacaagaggtaagggatgtccctgagcataccgccttctggacaagggattggacctggcaggggctggggcagcaggcaggcagccagatagatttccttcttttcctgggaaactgagccttgagccaagcccaaaacagggaaggggagtgttggggtccctcattcaaggcaagatgaagtaaccccatatcatggtgcttcctggtaccagcggaagtagaaaaacaaacgctatctgtaggactgctcccccaatcctcaactgagacccacaggattcctaccaattttaaaccagcaataaactcacaaagatgacaggaacacaaggaagcaagtgaccacgtctgtgagtcagcagaaacaatgagttgcaggtttagatccctaagaacaaaggtggaaggattttcagatacaaaatatagaacatacatttatgaaagacttaaagaaataaaagatgcagggcacccagctggctcagttgctggagtgtgctactcttttttttttttttttaagattttatttatttattcatagagacacagctagagagagagagaggcagagacacaggcagagggagaagcaggctccatgcagggagcctgatgtgggacttgatcctgggtctccaggatcacaccccgggctgcaggtggcgctaaaccactgcaccaccggggctgccctggagcatgctattcttgatctcagggttgtgggttcgagccccacactgggtatagagaccactgaaaaataaaatctattgcggcacctgagtggctcaggtggctaagcatcggaggggcttaggtcatgatctcagggtcctggattgagccccacatcccactctgcactcagcagggagtctgtttgtccctctgactctcccctggcatgtactctctctctctttcaaataaataaataaaatattttaaaacaaagtaaaatatttttaaattttcataaataaataaaagatgcagtcatgaagaagccattcaaaattaggaatcaacagatggattttaagatagaacttcaaaaaatgaaataatggttcaaattaaaaactttactgaagggatacctggatggcctagtcacttaagcatctgcctttggctcaggtcatgatcccagtgtgctgggattgagccccgcattgggctccctactcagtggggagcctgcttcttctccctctccctctgcctgccactcttcttccttgtgctctctctctgtcaaataaataaataaaacctttaaaaataataaacaaaattctaaaacctcacttagatattagagacagccaaagaaagaatcaatgagctgaaaccacatccaaagaaatcatctggcaaacaacacacagagggaagaaaattaagagtgtaaaagggattttagggtgcttgggtggctcagtcagttgagcatctggctcttgacttcagcctcaggtcacggtctcagagttgtgagatggagcctcactctgggctccgtgatcaacacagtctgctcatccctctccctctcactctgcccctcgccctgcatgcacatgctttccaccataaaataattagtaattaattcataaaaataaatctttaaaacaaaaagttctgaacttcaaaaaaaaaaaaaagaaagaaagagagagtgattttaaggggcacctaggtggctcagttggttgggcttctgactcttggttttggctcagtggtggtcttagagaggtgggatccagccccaagttggtctccacactcagcatggagtctgcttgggattctctctctctctctccctgcctctgcccctccccctgcttatgtgggcatactttccctctctctctcaaaataaataaaatatttttttgaagattttatttccttattcatgagagacacacacagagagaggcagagacacaggcagagggagaagcaggctccatgcagggagcctgacgtgggactcgatcccgtgactctgggatcatgccctgagctgaaggcagacgctcaaccactgagccacccaggcgtccctaattaagacatttttaaaaagagatttttaagggacttctgggtgactcagcagttgagcgtctgccttcagctcagggcatgatccctggagtcccaggatcaagtctgcatgaagtctgcttctccctctgtctgtgtctctccctctctctgtgtctctcatgaataaataaataaaaccttttaaaaattaaaaaaaggggatccctgggtggctcagcagtttagggcgtgatcctggagtcccaggtccaagtcccgcatcgggctccctgcatggggcctgcttatccctctgcctgtgtctctgcctctctctctctctcatgagtaaataaaatcttttcaaaaaaatttttaaaaagattttaagagatgtggaggatagagtaagaaaatctaacatatatttactacaatctcagaaaaggagaatagagaaaaggaggaaatgaaatacttaaagacataatgacttcgcaggctccagaagtgatagataacataaagtcactaagaaagcatacagtccaaccaaccaaataaagagaaaccaatgcctagctgcctcattgtaaaactatagaacaccaaagacaaagagatcttaaaagaaccagaaaaaaagagacagatccacctagacttgagagtcacaacagatgccagggacagtggaataatatcagtaaaatattaagggcaaataaatgtcagattagaattatgtgcctgggaaaatcacctttcaagaaccaggatgaggggcacctagatggctcagtcagtagagcatgtcaccctcttgatctctgggtcaagagttcaagcccatgttgggtgtttagattacttaagtaaataaataaaaatcaaaaagaaaagaagaaccaggattaaataagatcatttacatataaacaaaaacagggagagttttataatctgacaagcccaagagttgtcaaggatgtggtgggaatgtaagtgggtgcctgagtgtaaatgagtgtaacctaggacattatctagtgaaactgaaaaaatgcctaacccacctgtcagtaattccactcttgggtaaattacactggacttgagaaatgcatgcacacatacaggcatgtgtacatgcacacacacacacgcatatacactcatacacagaggagatgtactaaaagtgctcatagcagccttgcatgtactagcaatccacacacccatcagcaggggactagataaataagttataacatatcaatatgataaaatacgatatagcaataaaagtgagtgaatcatacttatatgcaacaacctaaatgaactgtacaagcgtttatgctaagagaaggaaacacacaagaacacgtgcaatatggttcacctgcataaagtccgaaacaagcaaaactaacctctgttatgtcagattatatatagctgaaactgggacgcctgggtggctcaatggttgagcatcttcctttggctcagggcatgatcctggagtcctggaatcaagtcccacatcaggctctctgcagggagcctgcttctccctctgcctgtgtctctgtgtctctcatgagtaaataaaactctcatgtaaaaaaaaataaaaataaaaataaaactctcatgtaaaataaaatctttaaacatttatatatatatatatatatatatatatatatatatatatatatgtgaaactaaaaagaaaagcaagggtatgattaacataaaagaacagttactgagtcatgatttaaaaaggaacatattgggaatctagtgttcagtttataattattctgtccacttttgtcttaggcacctttgtgtacatctgttatattttatataattgttcaaaagttccaaacagggcagcccgggtagctcagcagtttagcaccgctttcagcccagggcgtgatcctggagacccaggatcgagtgctacgtcgggctccctgcatggagcctgcttctccctctgcctgtgtctctgcctctctctctctctcccccctctctgtccctgtgtctctcattaataaataaaatctttaaaaattccaaacaaaacacaactgggagttcaaaccattatcaaacatacactaaaggaaatacttcaggagaaaggaatataattccagaagatgagactgaaaggcataaggaaacagtaagtgaatcaaatgatgaccatgtgagaaaaaaacaaacaaatcctattatataaaataaggtagaatttaaaggtgcaaaccaaaaaggatagacctaaaatgcagaacaaaaataagtcaggcaggagagtataaccagcatccaaggattctgaggtctttcttgcattattcaagaaggatattaatatatcgctcaatggtacatcttcttaagctacatatggattttttaaatcctgctacatattgtttacaaaagacatatccaagacataagacaaagaaagtttgaaagtaaagggatggaaaatatatagtaggcaaatattaacatcctcccaccaccaaaaacttagcatacctttattaatatcagacaagaccagttttttttaagatttatttattcatgagaaacacagagagagagagaaaaagagaggcagagacacaggcagagggagaagcaggctccacgcaaggagccggattcgggactcgatcccaggtccccaggatcacaccctgggctgcaggcggtgctaaaccactgcgccaccagggctgccccagacaaaaccagttttaagataaaaagcattatcagggatacagaaagtcattacataatgacaaaagtcaaactggttaaaaaatataacgttaaatgcctatttttttaaagcttttatttatttattcacgagaaacacagagagaggcagagacacaggcagagggagaaattggctccctgcaggaagcccgatgcaggactcgatctcaggaccctgtgatcacaacctgagccaaaggcagatgctcaaccattgagccatccaggtgccccatttaatgtctaattagataacagttgaatataaaaggcaaaaactagacagaaccatgagacaagtaaagaatccaccatcttaacagaacatttcaataaaccttttccgattagtaacaaatcaggaagaaaaaaatccagcaaagatatagatttgaatgacagaattaacaaactcaatctaatggacatgtaaacaagcctgcaggacaaaaaaatgttagactactcacacaaaacaatcacatgctaatcagagcaagtctcaaaaaatagtaacaattcagtatcatggagaccatagtctttgaccacaatgtgattatgtcatcaggcatcaacaaaaagggtaaatacaaagtttctgtacatttaaaacacactctcaaaataaactaggtttgagttaggagagcacatgggcatatagatgaaaatacactggccatatgttcataattggacctggctgtaggtacctagggactctttacgtattctcttctcttttatatatattttttccatgataaaaagtttttagaaaaatactcaagaataacatgtatgtgtcaaataattaaaagtaattttaaaatattttacaataaacattaatgaaaatacaccaaaacttggtggctacaatggaaacaatgagtagagggaaacatatcacattaaaagcttaaaaaagaggaaagtctgaaaataacatgttaactgtccaagttagagaaagaacaaccacataaattcaaaaacagcagcagtcagaaaatgacaaagataagagcagaaattaatagacaaaatgaacaaagggtagtggaaggggaggtgggccggcggatggggtgactgggtaacaggcactgatgggggcacttgacgggatgagcgcggcgtgttatgctatatgttggcaaatcaaactccaataaaaatatacaaaaaaaaaagaaaagaaattaatagacagaaaacaatgtaagagagaaaatcaatgaggtcgaaaattggtgctgtgaaaagaccaattaaattggcaaacctctggtgacactgactgagagaaaaagggagaagtcacaaataaacaatgaggaatacaccaaataggtagccccctacgcagcagtgggaggaaaggatgaaggaaatgtggacacctgtggaccccgggtgggagaggtagagtctgggtcagctcaggtgaggtacctaaggtcactccgctggccctggggtggagcatcagaacctcagccacttacaaccatgttccagagagcccgagcccagctcaccaccgtcttcaccgagaaagaaaccactagtgcccgccccccaccgtattgccactcacagctcctcccaagtgtctgagaggtggagcctggtcacagcctgtgctctaggtgggagaaagactcatggttctaccttcttctgtgatcaagcagacgtctccacatttggggagtgtggtcaaaagatgctagaaaggggacacctgggtggcataatcagttgagcaatctactcttggttttggctcaggtcatgatctcagggtcatgaaatgagccccaagtcagtctccacgctcagtgcagactctgcttatctctctccctctgcctctgctcctcctcacactcagctctctctctctcccccaaataaataaataaataaataaataaataaataaataaataaaatcttttttaaaaggaggggcacctgggtgccttagtcagttaaacatctgcctttggcttgggtcataatctcagggtcctgggatcaagccctgctttgggctctctgctcagcggggagcctgcttctccctctctctttccctgccactccccctgcttgtgctctccctctgtctctccatggcaaataaattttaaaaaaattttttaagtctgaggttttgccttacttgcaagctaacaagttagtctgccacagtttcatgggtactcacagaagacaggggactcgtgggtcagagacaaaggactttactacttcttcttttagggctttattgcttaaagcacagcgggcatcctgagtttcatgtttgcgttgttcctcttgcctcacaaatcccatggggtggcatgaaggccaggtatgttgtgccagtacacagagggtctgcatcacagctgaggagctcagtgaactcaagcctttttaaagaaactacaagaaaatctgcccaacctttgccctgaaagaagacattattatattattatatgggacagtaaacctaccctctgctctggagatagctgttatctccatcttccaagactgttccatatataaacatcccttgtccagaacaaggtgtgtgtgttgtggaactcaagagtaggacaggccagggcactgcaagcagcggctctcagagaagcagggccggacatggtcaagaaccaggtcccacagcagcagaacaacgacaagggcaagggcaaggaccaggcccctctcatgttttcctgggaccaggggaatctcagattcttatgtgagccaatataatggggatagagaatcaatatcagctgctgcccgttgtcctgccaacccggcagggagtcaattttaagtttattttgaaaaataaagaaatgtgacacttcaggcctaggtgttttggaaacagttcccacctctgtctaatggcctgtcccctctctctctctgaggccacacagtggcccacccatcatctgttcctggctccagccccattccaagtctttggcctccttctatcccaagacaggtagagcagtggcagagtgaggggaatattatttatttttaccccatctcatcccaaaaggattctaggtaaccaaaaaaatacatgcaagacaagatttgttaaatccaataagaggcaaaattgggataaagtggccttaatctggtaccctgttattccacgggtttctggattgggccctgagtttcctggtggccagggcaaagggggaagcaataacatcatcggatccaaagcataaatacaacatggttattcagaagaaagttgtccattcctttactcacatggagagagagttcttccctggtcctctttgggagaacaccatgtgatgtagtgaaagcatcctcaacaatatcccttccacaaatacaacagtaggtctgttgtgactcctccccaggtatcccttgctgaaagctacatgtatcctacactcaactcaatgagcgaagttttaaggggctagagaaagtctagccatgggctcctcagaggtctcccagaaagatttagaggttcaactcggtgaccagggcctcgcctgctggcctgacttgactagacagacctgctctggcctcattactgagctttgtgcctgcaatggagtttcctcgatggctcttctctaacaactgggcctccacactgtaaccttaacccaaaatccttctggcttcctcccctacacctgtagcagacatcactaatccatcccagcaccagtcctcagtccctgtccaggatcagatgaaaagaagactgtaacagagtttgcaatcagcataaccaacaaaacatacccagaacacctacatatcagtaagaaaaacataaatggcctaaaagaaaaataggcaaaagatctaatgagaactttcaaagaaagtaactgccaatggccaatccacatgagaagttgttgagtctaactagtaattaaggaaatgcaaattaaaactagaataaaagggatccctgggtggcgcagcggtttggcgcctgcctttggcccagggcgcgatcctggagacccgggatcgaatcccacgtcgggctcctggtgcatggagcctgcttctccctctgcctgtgtctctgcctctctctctctctctctctctgtgactatcataaataaataaaaaaaaaatttagaaaaaaaaaaaaactagaataaaataccatacccaacagattggcgaagactaatacacctcatggagcatgcagagaaacagaaattatagttagctgtaggagcgcaaatcagtgctaccactttggagaacactttgataattcttagtaaagctgaagatgcataaacattatgacccaaaatttctacttccagatgacaacggcagagaaactcttctttgcatgtccacggagacatgttcaagaaggttctctgtgacgttgattataatcataaactattaccagcaactattcttagcaggaaggtagataaattgtggtcatcataagataaaagacacagagagagtacaatgaatggattcgagttgcatacttcagcactgatagatctcagaaccatagtgttgagctaaagtaatttgcaaaaaaataaaaaataaaaaataaagtaatttgcaaaatgatatgtaacgttatgataccatttatgcagaattttagaacacaaaacaatattgttatggatatatacttatttggtaagttgccaagcatgtttgtgaatgaaagaatacttcaaggaggggagaaagagggaggtcaagggtgggcttttagttttttccatgacattttttcttttcaaaagaaaaataaataaataaggcagcccgggtggctcagtggtttggcgccgccttcagcccagggcgtgatcctggagacccgggatcgagtcccacatcaggctccctgcatggagcctgcttcttcctctgcctgtgtctctgcctctctgtgtgtgcatgtcttccgtgaataaataaataaaatcttttttaaaaaaatatatatatacacacacacatatatattctggggaaaagagccaaaacatttcaaatagtctcattagagagtgataggtatttgttattcattttctatatttttctgtatgtttcaaatatttcaaaatttgtaattaaaagcaaaataaaaaaaataaaataaaataaaaacaaaataaaggggatggctgggtggctctcagtggttgagtgtctgcctttggctcagggcatgatcctggggtcccgggatcgagtcccaccctgcggggatactgcttctccctctgcctgtgtctctacctctctctctgtgtctctcatggataaataaatagaatctttaaaaataaaataaataaaaacaaaataagaggcactggggtggctcagtcagttggctgtctgctttcgactcaggtcatgatcccagggtcctgggatgcagctctttgtcgggttccctgctcagtggggagtctgcttcccctctccttctgcccctcctccttgctctctcttctctcaagtaaataaataaaatctttagaaataaatatgcaaagtacaaagaaagggtgctacaatcccatcgtgacgctaggcagagcaggagcacgacagcgagaggtcaccatttctgtccctgcccagaaattccagtttctcggactaccacccccacacacaccatcccaggactcaccacacgcacctgaccataggccttgctggcaccgcctggccccgtcacctgcccctgcattcctgcaggaacctccccactcaccaccatgatctccgagtagatgcacatcccggttggctgaccatcactcctcatcacacaggctgagcagggaccctagggtttaaagcccgaagatctgggttcaaacagcagttctttcacaccttggctaagcgaccctgggcaagtcccttgacttcatgtcaggggtgataaaacaataggagggaaggaacccgggtccctgacatttgtgcagctggtctaccaaccctaaaaagcccccctctgtctcactgacatttgagagaaagcaattctgtcttgtgtaagccactactaatctagggactgaggtaattccactcttcccagaatgccccacgcctcccctcagagatcttggcttctcaaagtgtggtccaaggaccagcagcacgggtctcagctgggaacttgttagacatgcagaatctcaggcaagatcccagacacttacctatacctatatgttggaaggtgaggagcccagcttcagggctaggattccgagagggactttcctgttgccatggagctgctaaagctgcaaaactgggaacactaggagctgcatgctcctttgttctaaagctgctcccggggcaaacaggcctgctgccatcattgccaccagcttcccaggagcctcagtgacagaaccacggcagggctcccaagcagagtgggagtgttgtggcttctcccttttggtggcccccacccgccaccactagcccccaccccaggccaggcaagaaaagggctcccaggacctgggagggatgccccgcgaaaaggggaacctagcaagtgtctccttccctggaggggcagctcaacaatcagcaagcaaccatcccccaaaccacctgaacaggacgagggggtgaggggttgcaaagggacatgccctttctcccaaggggtgcagttatggcacgccaagactgccatgtcccagaagacatgactctgtcctggggcaggcgatctttcttcaggggtgctgctgggagtctccgcatttcctggtgccctggtgcccgacacaggctggccccttccagtcccaggcccccatgctgccagactccccttgcccgtagaggcttctgtgagactcctgaatccacgcatggcaaacacacatctttgccaaacggtggagggcaggctgccccttctctcagcccctccaacttttatctcctcctgctcagagggaggatggttcaggaaagccagcacccaaattgcaggaagtgtggagcagagagcagacaaaacaaaaagcagaaggatggaaattgttcaatcataatagcaaaaatgtggaaacaactcaaatgtccatcagctgatgaatgagtaaataaaacatggtttatccttttttttttaaagattttatttattaatttgagataaagagatatcgagagagagaacctgaccagagagaggggcagacgtagagggagaagcagactccccactgagcaggaagctccatgttgggctggatcccaggaccccgggatcatgacctgagccaaaggcagacgctcaaccatctgagccacccaggtgccccaaacatcgtctatccttataatggaatataattcagccatcaaaagaaatgaacaccagcacgctaccttgaatccatgcccagcgaaagaagccagacacactctatagggtatggtcccgtttatgtgaaatgtccaggagaagcaaatctatagaaacagaaagtagacgagtggctgccgagggcggaggggtgaagtggcagctaaagagggggtgcagtgtatgcatctgttttggacaaatgaatatgttctaaaatgtgctggtcggggcagcccgggtggcgcagcggtttagcgccgccttcagcccagggcgtaatcctggagacccgggatcgagtcccacgtcgggctccctgcatggagcctgcttctccctctgcctgtgtctctgcctctctgtttctcatgagaaataaataaaatctttaaaaaaataataaaataaaataaaatgtggtggtcggtgcacaactctgactatagccattgaattgtagcatactttttttaaaaatattttatttatttatttatgagagacacacagagagagagagagaggcagagacacaggcagagggaggagcaggctccctgcagggagcccaatgtgggactcgatcccaggaccaggatcacaacctgagccaaaggcagatgctcaaccactgagccatccaggcatcccaaattgtatactttaaataggtgaactgtatgggatgtgagttatatttcaataagctgtttgtagggcgcctgtggggctcagtcagttaagcgtctgctttcagctcaggtcatgatcccagggtcctgggatagagtcccgcattgggctccttgctcagcggggagcctgcttctctctctgcctctgcctctcaccctgcttgtgctctctctctctgtcaaataaataaataaaatattaaaaagaaaaaagttgtttgtaaaatttttgtaaattttttcccttaaaaagacaagcactcaagagcatttttccaggggtgcctggctaacccagtccgtggagcatgtgactcttggtctcaggatcgtgagttcaagccccatattgggtgtaaggattgcttaaaaataaaatctttgtggggggaaaaaagagaacatttctctgaagtgaaggatatgagtttccaaactaaaatggcctgtcaggtgtcaatacaatggacaaaaatagaccctcaccagagcccatgatcgtgaaatttcagacagggatattctacaagctttcgaagaggaaaaataggtcactttcctaaaaaaggtcaggactgagaacggctcccaactgctccaaccttcgaaacaagataccagggaagcctgggtggcttagatagttaagtgtctgccttcaggtcaggtcatgatctcagagtcctgggatcgagccccatgatctcagggtcctgggatcaagccccacattgggctccctgctcaggggggagtctgcttcttcctctccctctgtgatctctctcgctttcacacactctctcaaataattttttttttaaaagagtgcctccagctccagaacatttagaaaaaaagaaacaagaaaccaatggatcagcccttcaacatcctgaagaaaagtgatttcccacccagacacctaagccaggcagagagtagcaatcaaatgtgaggataaaccaaggacattcagggacctgccatgtcttgaaagggttctctcccaccagcccttctcagaaagttagaggatgtattccatcaataggaaggggtacaccatgggttacaggggaggggcatcaaccacagcagaggggaagggaacaccaggaagggatggaaaagggagagcctagggtccccgccaagaatcaggcagagggggcagccagaccatgctgtcttttaaaatagattttatttacttattcatgagagacacacagagagagaggcagagacacaggcagagggagaagcagagtgcatgtagggagcctgatgtgggactcgatcccgggtccccaggatcatgccctgggctgaaggcagcactaaaccactgagccacctgggctgccctgtcttttaaaataaataaaatatagtctatactcccctagataaaataatgagggctgattataaaaaacaggatgtatgggggcacctgtgtggcttagtcggttgggcatctgcctttggctcaggtcatgatcccagggtcctgggatcaagccccacatcaggctccctgctcagtgaggagcctacttctctctctccctctgcctgctgctctccatgcttgtgctcgtcaagtgaggaaggaaggaaggaaggaaggaaggaaggaaggaaggaaggaaggaaggaaggaaggaaggaaagaaagaaagaaagaaagaaagaaagaaagaaagaaagaaagaaagaaagaaagaaagaaagaaagagaaagaaagatatgttgtacgggaaagggcagcctggccgagctcctatccgctctcaatcacttgttgatgacgttcctcttgtgccccccaggtccagccacctctgtccactggggaccctcatgctttgacagctgataactgagaagcagaaattctgaggaacctgctcccccctgtacagtcctgctggacccccagccacaggccttgccatagagctgcagggagcaccaagttttcaggacttactcataagtttacagacttctccagagggggctccagtcccctctccggaaagctgaaggcagcccgggaccagaggctctgttcagatgacccctggcagccttcacccaacagtaacagacagcccttctgcggcttccacccagtgtgttcattgactacccttttcattcatttataggcaagtcctgccttataaaatttcctaagattttcttttgattgaggaagaaaatagagtggagagaagagtgtgcccagaagtcatgaagtcagagaagcaaaggaatacaagtgaaatgcaaagtttgaggccggaggttgcaaggagccgagccagccagctgagctggccgactgagccccgggcccggggggccattagggcaggcccgcagggggacacgtgctcccgagggtcatccctggactgccctggccactgccggcgagagtcctgcggggcccagggtcggcaccgctgccctcgctgccctccgctgcccggcctcggcctcgagccgccctgaagctggaagccccgcaggtgggcagggctggcccaggaggctggtctccatttccgggccgcaccgcggggtccgtcctgggctgtgaccccagctctccacatctcccctcggccactactcccctcggtcatgatttatttattttaaagattttattcatctattcttgatgacacagagagagacgcaggcagagggagaagcaggctcctcgcagggagcgcgacgcggggagggggtggggcccgggactggaccccgagcgagccgggcccggatcacgacccgagccgcaggcaggagcccatgagctacccgggcgtcccgggattcgatttatgatcaagagagccatgatgtgggtactggggtgtttttctcctcctggggctagaccgccacaggtctcgggggccctcggagcctcggttttacctcgaaggacaggaagagaggcggggcggggggtcgtcgcaaggtcaccgccctagagctcacgtcggcccaaccccagccgagcgccccgcgcccgcagcccgagagcaggcgcggcaacgccgagcacggccacgaggtggcgccaggaaaccgcgggaggcgcccaaacccagcatccaggctcctcgctcctcctctctcccgcgggcccggcccctccgcccgccgcccgcccccgggccctagttccccgagcagcccggcgggctggggaggggaagggggaagccgagcggccgccgggacgtcgtcgtggaaggagcttagggaccgcttcggtccagggccacctggaggctggactgcaccagcgacaccctggaggtgccgcgtcaggtgtgcagcccaccttccctgcgggagccctcgcgggagccttgctcctcctgcatcgtaaagggagagcacgggagtaggagaccttggggcagggcaccgcctgcgcccagctctgctgcgcctggctctggccagcctagtgtttccaggctctgccgggctgctgctagcgctgacccttccccaccacccgacgagactccatccgcttcccaggctgcacagctctcgctggcggagctcacatctgcacctgccacctcgcggccaagggtgctgaccactgtgctgggtcagagtcatcccaggcacacagcgcttgtcagaccccgaagcccaggctcctacagcctgaggaagctgggtcccaaggccaggctcccacccccacccagtcccacccctgaactgcagtctctttcatcgaggcccacaggccctgtaggggacgtaatcacaaggcctggaaagaacccgggctttggagcccatgcagacctggaataaagctccctctgcatttactggctgtgtgatcttgggcaagtcatctaacctctctgggtctcactgtcctcatctgtaaaatgagagcactcatacccaccttgggaggttgtaacttttagaaaccatacccatgaatattaaaaagttaaaaattaattaattttttttttaaagaaaccatatccatgaaagaatattcccggtgtagggcgagtgttcagcaaagtcagcttatcggagggcgcctggctggctcagcaggaggagcgtgtgactttttatttcagagctgtgagtttgagctccacgttggctatggagattacttaaataaatgaataaataaataaacaaactctgcttattggatattcatggactcctattttatgccaggccctctgctggggttcaagggaatccagagttgaatgagatgtaactgcagccctccaggaatgaccctctgggcaaaataaaactcatgcttcaaaattcaggcagcattttcctgatgctaaatgtggtggcattcaaacatttgtaacccttcagcctctaaacatgaggggcgcctgggtggctcagcagttgagtgtctgtcttgggctcagggtgtgatcctggagtcctgggatcgagtcccacatcgggctcccctcagggagcctgcttctctctctgccatgtctctgcttctctctctgtgtctctcatgaaaaaataaataaaatcttttttaaaaaataaaataaaataatagattaaaaaacaagccaccgcaaagagtggagctaccctttttgactctatactctgcaccaggttcttcacctacatacgttccccagatgcttagtgaagccctagtgggtgccaagtactgtgcagggacgtggggcacagccatgagcaggaaagtgtccgcacggaggcggagctgataagctaggggggaaccggtgacaaaggagtcaagacaaggatgcacttgtaattgaggtaagtgcctacaagggaaatggaagatcagtactgccgaggataccccgagggtggggggtgggggcgtctgcccagatgcaggcaacaagagggggtgtcatcaggaacaaattttaaaacaataagaacctactaaaagttggtctgctgcttattaacaccacataccagcaactctaaacagcgtcctccctcccaaaaaaattattctgttggtttaagacctcaacaattgtttccgttcctgttaatttttagtaatatacgtgtaaatttcaaattagtacatttgtattgcttatcctttaaaaaccattgtattctgcttagaagttaattgtgaaaattcccagtcattgagccactcccaccagctatccgtggtcatgtggatgcagaattgttcacgctcacttcagaggaatgttgtgtcttgaatctgaatccctgttgtactgtccttcatttaaacaggcagtttggggaaccctgggtggcgcagcggtttggcgcctgcctttggcccagggcgcgatcctggagacccgggatcgaatcccacgtcgggctcccggtgcatggagcctgcttctccctctgcctgtgtctctgtctctgtctctctctctctctctgactatcataaataaataaaatttaaaaaaaaaaaaaaataaaaaaataaacaggcagtttgaaataaacattgggagcatacctctgcgtgaccatttggagttcttatttgtttaaaaattaccaactgggaagatacctgaaagctgctagaatcgactctgaggaactacatgtggatagaagcgtaatttctggaatttatggtgaaatggatttttacataagtctctaccaaacttatccttatgtttaaggtttttcctaattatttttctatttttaaaaatattttctttatttgttcatgagagacacagagaggcagaaacataggcagagggagaagcaggctccatgcagggagcccgatatggggcttgatccccagatcccaaaggcgggcgctcaacggctgagccacccaggcgcccctcatgcatgccttctagtcatcaggaaagagcaaggggcaaaggaagcccacctactcccccagaagaacccaacacctgcctgcatccagtcagtcaggatttaaccatttggcccaaactagctacaagggagcctggggaaatggagtctttatttaaatggccttgtgccctgccactaacagggggtactctttctaaagaaggaaagaatggataatgggggaagggcacatgtctgccgtgccatcaagagaagcttggtctttttcctaaaagcaatagtgagccattgaacgttttttggttttgttcgttttttttttttttttttaagattttatttatttgttcatgagagacacagagaggcagaaacataggcagagggagaagcaggctccatgcagggagcccgatgtggggcttgatcccaaaccccaggatcacaacctgagccaaaggcagacactcaaccactgagccacccaggtgacctaaattcagtatttacaggaggaagagaaggccttccctgccatggccttccctgacctgtattgatgcagaggcaggaaaatgatgagaagaccgcaggtcaggggtcagcagacccggcctcgacacctctcttcctagaactcaattcttcatctgtaaaatggggtcaaggcaccaaccctactgtatagccgctctggttgcctctccaacaccattcctcctgattccctaacagaaccacagttttattggagagactatggcagaaactgccaatggccccaatatccattctctgttcttccatagaaatggaaattttggatggctaaagactacatttcctagcctcctttgcagtaaggggtggtcatgtgactacagtgagttgtgttacagcaggggaaccctgagtttagggaacctgaatctttttttttttttttaatttttatttatttatgatagtcacacaggagagagagagaggcagagacataggcagagggagaagcaggctccatgcaccgggagcctgacgtgggattcgatcccaggtctccaggatcgcgccctggccaaaggcaggcgctaaaccgctgcgccacccagggatccccgggggttaagatttaaacgtatgggaatgcctgggttgctcagtggttgggcgtctgccttctgctcggggcgtggtcctgggatcaagtcccccactgggctcccggaggggagcctggttctccctctgcttatgtctctgcctgtctctcatgaataaataaatgaaatctttaaaaaaaaaaaagatttaaacatatgattttgagaggatacattcagaccataacattctgcttccgcccccaaaattcatgtccttctcatgtcatcaactcaaaggtctaagtccaaagtctcatctaaatatcatctaagtcagatatgggtgagacttcctgtacaattcattgggctttgtgatatttatttttttttaatttttttttcatttatttatgatagtcacacacagagaaagagagaggcagagacataggcagagggagaagcaggctccatgcaccgggagcctgacgtgggattcgatcccgggtctccaggatcgcgccctgggccaaaggcaggcgccaaaccgctgcaccacccagggatcccaacctggatcttttaaaacagaatcttaacgaatttgccctttgacctggaggaaaacactatcttctaaggctgtttgctttatgaacttctttgagagatgtgcagaaacttgagggacctactgagaattaatgatttcccagcattgcagtaatattggattttgagggcagcccaggtggctcagcagtttagcgtcgccgtcagccagggcctgatcctggaggcccaggatcgagtcccacgtcgggctccctgcatggagcctacttctccctgcgcctgtgtctctgcctctttctctctgtgtatgtgtgtgtgtgtgtctcatgaataaataaataaaatctttacaaaaaaaatactgggttttgaatgagcagtagtgtaattacggccctgagatatgaagaggaattgtcagcagcttccaggagggctctcttctttcactgtatgttgttgacgtctggacatgacacttgacatcaggcagccctcttatgaccataaaaaacacggctgactccctggcaatggcagggttgaaggttgagaatagcctcagtagtggccgaggctggagagtcactcaaccagcaccggagccactcacctcttgccatcttgttacaaggaagcagaaatgtcctcattgttgaagccatctcagtcaggagtcagctggaggcatcctgaatcctgctcctgggcagcgtgcctccctcctagaagtgtcgggaggccacccagtacaaaagccaaggtgggaagtacttctccatgaggggcagtgctccacttaccagagggatgaggtgagacagctcagtgaggggttttcctcctcccaaactgcagattaaatagtccctggcctaccaacagaaaaccaaaccaactggcttgttggggccccttccagctctggggtctagggttgtttggtgccacctcactccaccccggcacactgctcctacgtcccctgaagctccagggagggacccccgcacttgcacttccaccggggtagtacctgtgggagtgggaaggagcaggaggccatttcccctccaggccccaaggggagcttcttctgcctcacggtggtggtcaccaccagaagccccagtgggaccctgctgcccgaccgtggggacagggcagttcagaggggagttcagaccgccatggggctactgggggttggtggaggggaccccaaggaggagcgtagctgggtgacacactcggcaatttcagtgtggcttggggctgcgggtgacagacggtttgtcagatgggttcaccaggactaatgggctgctctgttaccgcccacggaacatgctgggtgcagatctgaacatttgaaagggagctttctggggacacaggcttttaagccaaacatgaatctagctgggggagtggggtgggatttcaagcaccttgagcaaactggtggggcacgcttggggggaaagcagggattttatcactcctcacatcctcaagcgaccctcctccccattaagctcaaaagcaattattgagcacctgaagtatgcagataaaagacacaggactactcactgctggcttgacatctggaggcggcaggggattatcatttacctctcagctcaggctggtttcctccaggcagctggtccagagccacatcccaccccccccaaccccgctgcttgccatctcagcgggggttaccttcctgctatcccaggaggccctccaactcagcagttagccaccaccttcccccaaacttgtttcagtgtggatcttcccactcacccccctaggccgagcctagcacgatgccaggccccaggagctgggggggggggcatgccccaaaggcaaggaggaaggcagccccctctgggagagcccaccaaaagattaggttccaggaaaaaatgaatggaggccaaggggggggcatggggcggaactttgggggggggggggtgcaggaagaggggggctggcccctgagcaaggcccgtaagactcagtggcaaggttacatggaagaagctttagatgtccttagcgctacagctcggggaagcccctggagagctggagccaggaaattaacctcatccaggcacgtctagagatattgtgggttcggttccagaccaccgcagtaaagcaagtcaagtgaatcttttggtttcctggtgatataaaagttatgtttacactatactgaggtctgttaagtgttcagtagcatttcatctgagacagcaatgtacatacgataattaaaaaaaaaaatttatcacagaggtgccaggctggttcagtcagtacagcatgtgattcttgatctcgaggtcatgagttcaaacctcacactgggtatagagattactttaaaaacaaaatattgtattgctaaaatatgctaaccatcatctgagctttcagtgagttgaaatcactgatcacagatataataatgaataacaaatataatcctaatttaaaagtttgggaaaaaaaagaaagtttgaaatattatgagaattaccaaaatgtgacacagaaacaccaagagatggatgcctgggtggctcagtggttgaggccttcagctcaggtcatgatcccagggtcctgagatcgagtcccacatcgggctccccacagggagcctgcttctccctctgcctgtgtctctgcctctctctgtgtctctcatgaataaataaaatctgaaagaaagaaagaaagaaagaaagaaagaaagaaagaaagaaagaaagaaagaaagaccaagtgagcaaatgttgtttgaaaattatcccaacagacttccttaatgtagggttgctgcaacaaggctttactttgtacaaaatgcaatgtctttgaagtgcagtaaagcaaagcacaataaaacaaggtatgcctataaagctttatttgggcaattgtgatgtgcaagacaccagcttagatgttctacatatatttcctttattttctttttaagtaatctctatgcccaacgtggggctccaactcatgacccctagatcgagttagacactccaactgagccacgtatttcctttttaaatcctcatgctgtgggcagccccggtggcgcagcggcttagcgccgcctgcagccaggagtatgatcctggagacccaggatggagtcccgcgtcaggctctctgcatggagcctgcttctccctctgcctgtgtctctgcctctctctctctctctctgcatctctatgaataaataaataaaatcttaagaaaataaataaatcctcatgccgggacgcctgggtgggtggctcagcggttgagtggctgcctttggctcaggtcctgatcccagggtccttggatcgagtcccacatcaggctccctgcgaggagcctgcttctccctctgcctgtgtctttactgtctctgtgtgtctctcatgaataaataaataaaattaaattttataaaaataaataaataaatcctcatgccaaccctataagatggatatgagcatcccatttggctgggagacagaagcaccacaaccaccaagtggcaaagctgggacttgaatctcagactctctgaccccatccccagcaggagctaacgtttgggccacatgccttacagacaacattgcccataactagccacccttgctggaatatgtcacaggccaccactatgctacactgtctctcccctccactcctggaagaggcatcagtctttactgacgtaaatccttcaacacagggcacaccctccgcatagggcagcagccatgtgaatgaatcatcctggaaagagctcctccagcctccatcaaaccttcagatgactgcagtcctggccaacgtcataactacaatctcatcgcagaccccagctagcattactcagataagccacttccagactcctgactcccactcactgcattttggaatgatttcttactcatcaataggtaactaatgcacactccaatctgggtcccgcccctcctggctgtgggaccatgggcaactttacctctctgggcatatggtttctccagctcagacctttctgctaaactccagattaatgcaatcagcaaccaccattaaggtccttcaggtgtgggcacgtagcatatctcaaatacctctctctttgtttaaagattttatttattattcatgagagacacagagagagaggcagagacacaggcagagagagaagcaggctccatgcagggagcccgatgcgggacttgatcccagggctctaggatcacaccctgggccaaaggtggcactaaatcgctgagccatccgggctgcccctttcaaatatctcttaatccactttccaccatggctcaggccctcactgactctcccttcaattattgaaacagtctcctcattgattctcctgtcttgtataaggctgcaaataacaaaatcccaaaataccgtataaagaacttataaaactcaataccccaaaaatgaaaaatccaagtaaaaaatgggcagaagacaggcattttcctaagaagacatacagatggccagcagacatgaaaagatgttcatcacttaccatcaggggaatacaaatcaaaactacaatgagctatcacctcacacctgtcagaatggctaaactcaacaacacaggaaacaacaggtgttggtgaggatgtggaaaaaggagaaccctcttacactgttggtgggaatgcaaactggcatagcactgtggaaaacagtgtggaggctcctcaaaaagttaaaaatagaactaccttgtgatccaacaatcacaccactagatatttacccaaagaatacaaaacacaaattcaaagaaatacataaacttctatatttatagcagcattatctacaatagccaacttaatgaaacagctcaagtttccactgattgatgaatggataaagatgtgacatatatacaatggaatattactcagccataaaaaagaatgaaatcttgtcatttgcaacagcatagatggagctagagagtataatatctagtataatagctagagagctaagtgagataagtcagtcagagaaagacaaataccacatgatttcactcatgtgtggaatgtaagaaataaaatgagaaagaggaaaaatagaggacaaattaagaaacaaactctagggatccctggttggcgcagcggtttggtgcctgcctttggcccagggcgcgatcctggagacctgggatcgaatcccacatcgggctcctggtgcgtggagcctgcttctccctctgcctatgtctctgcctctctctctctctctctctctctctgtgactatcataaataaataaaaattttaaaaaaagagaaaaaaaaacacaaactctaaactacagagaaactgatggttactagagggaaggtggtgaaataggtggatgaaatacgtgaagagcattaaagaggacacttgtgatgagcatcaggtgttgtatggaagtgttgaatcattatttatgtacctgaaactagtattacactgtattttcactgaatttttaattttttaaaaatctcaaaacaccagggatccctgggtggtgcagcggtttggcgcctgcctttggcccagggcgcgatcctggagacccaggatcgaatcccacgtcaggctcccggtgcatggagcctgcttctccctctgcctgtgtctctgcctctctctctctctgtgtgactatcataaataaataaataaataaataaataaataaataaataaataaataaataaataaataaatttaaaaatctcaaaacaccagggatccctgggtggcacagcggtttggcgcctgtctttggcccagggggcgatcctggagacccgggatcgaatcccacgtcgggctcccggtgcatggaacctgcttctccctcagcctatgtctctgcctctctctctctctctctgtgactatcataaaaaataaaaataaaataaaataaaattcagattattaaaaaaaaaatctcaaaacaccagcagattacaactaagcaaaactgtatttccctttcacactcaagaagtccaaaggcagatagtccagagttagcatggcataccatggagccaagaactcaggttctttctttttttttaagatttcatctatttattcataagagacacacacagagaggcagagacataggcagagggagaaagaggctccatgcaggaagcccgatgtgggactccatcctgggactccaggatcatgccctgagccaaaggcagacactcaactgctgtgccatccaggcgtcccaaacccaggatgccttctatctgatgatcagcagcacatggatttcattcccaaagtttcctcacagtctaaaatagctgctagtgctccagccataatgtccacattctagacattagaaaggtggaactggaaaaacaaatcccttccctttaaaaacatttttattttccactgaccatatctagcaagggaggcaaggaaacagtctattttgaggttcatcatgtgctcagctaaaaatacagaaattttgtacttaggaagaaggtgagagcaggcatataggacaaccagcagtctgcagcaccctccaccgctgctgccccgtaaagggttttattattacttctgggttttgtccttcattataaaaatgatatagtatagaaagctgaggcccggagatgggtcaagagagttggtggctgtgccagaagcagactcctgaactgtggtccctttccactctgtcctcagttttctcagcaggtattattttataattggggcagtgaaacacataaacatacaacaaaagagcattctagttttgacctaagttacaaaggaaattgaaagaaaatatttatagttatatctttaaaaataacaaagaatcctggccccatgtttgaaggaggcaaacttcctggctgagttcttggaatcaggaaaaatgatcacacctcctttgtacctcaggctctgtgcctcaaacctatagaatagagcctgttttttttttccttataaatataaaactattattgctagaggatagacatgggaaacaaaaatggaatagacttgaactgcctttttttttttaagattttatttatttgttcatgagagacacagagagagtggcagggaaatagagggagaagcaggctccctgcagggagcccaacgtgggactcaatccccttctggggattgaggatcacaccctgagccgaaggcagatgctcaatcactgagccacccaggcaacctaagctgcttcttttttaaaaggtgacataatctaaaaggaatgaacgtgaatttaagagttatcctttaaggtatacgcagaatgttaatagtgttgggactgagtatgagagactttctatgtggggttacctatctctataccatttgaaccttgcaagaagcatagattgtacataaaaatggggggggggggacatttgaaatcaaatatagccaataccctctctaaataaaataacaggtgctcattatagaaaatacagaaatatataaaacaaaaatttttaaatcaactattttttattttatttttttaatattttatttatttattcatgagagacagagggagaggcagagacataggcagagggagaaggaggcccctcatagggagcccaatgcggaactcgattcctgaaccccgggatcatgccctgagccaaagatggatactcaaccactgagccacccaggtgtccctaaaacgacagttttaatgacctccaattttatcccttcagagagagccccactttaatatgttgatatgatgccttcaatcccctaacttaggatcattctggatatagtcctttccaagatttattatgagaattttcaagcagatagtaaagctaaaagaattgttcagtgaccactcatacccaccccatagatcctcccactaacattgtactccagttgctttattgcagttacccaactggtcacagataactttttatttttttattatttttttaaaagatttattaatttattcatgaaagacacagactgagagagagaggcagagacacaggcagagggagaagcaggctccatacagggagcccaatgtgggacctgattccagatcctgggatcacagccagagccaaggcaggcgcccaactgctgagccacacaggcatccccacagatagctttttaaactatcatacactcatagtaacctcttttggtttagtggtgtgcagttctatgaatgttatatgtataggcatgtgtaaccaccacaatcaggattcagaacagttccatcatccccaagtaattccctcttaaaaaaaaaataaattaagagaggaagagagagaaaaaaagagagggagggagggagggagagagagagagagagagagagagagaaggggcagagggagagggagaaagagaatcttaagcaggctccatgcccagcatggaactcaatgcagggctcaatctcacaaccctgagatcatgacctgagccaaaaccaagagtcagatgcttaactgactgagccacccaggtgcccctcacatgagtccctcctgccctccccttgtaggtatgccttctccccccacccctaagccctgggaaccactgctctattctcagcaccattgttttgtatcttctagaacgccacagacattgaaccatagagcatgtatcctttgagactggctttttgcagtcacattatgtgtagcaagagtttgtcccttggggatccctggatggctcagtggtttggcgcctgccttcagcccggggcataatcctggaggccccgggatcaagtcccgcatcaggctccctgtgtggagcctgattcttcctctgtctgtgtctctgcctctctctctctgtgtgtgtctctcatgaataaataaataaaatcttaaaaaaaaagagtttgttccttaggaggcacttaaatatatgaagccaatctttacagacataaagggagaaatagacagtagggatccctgggtggcgcagtggtttggcgcctgcctttggcccagggcgtgatcctggagacccgggatcgaatcccacgtcaggctcccggtgcatggagcctgcttctccctctgcctatgtctctgcctctctctctctctctctgtgactatcataaataaataaataaaaattaaaaaaaaaaagaaatagacagtaatacaataatagtagaggacgttaacactccacttacatcaatgaatagatcatccagacagaaaatcaataaggaaatattggctttaaaagacacattagaccagatggacttgatagatttatatagaacttccatcaaaagcaacagaatacatattcttctcaagtgcacatggaaccttctccaggacacattaggccacaaacaagtctcaggaaattcaagtagatgaaaattatatcaagtatcttttccaaccacaaggctatgaaactagaaccagttacaagaaaactgggaaaaaaaccacatatacactaagactaaaaaacatgccactaaacaaccaatgggtcaactaagaaatcgaagaagaaatttaaaaatacctggagacaaataaaaatggaaacaactttccaaaatgcagcaaaagcagttttgagagggaagttcatagcaattcaggactacctcaaaaaataaaattctcaaacaatctaactttacacctaaaaaaagaacaaacaaagccccaaattaccagaaggaaggaaataataaagaccagagcagaaataaatgaaatggagacaaaagcaaaaagaaaaaacaaaacaaaagaatgacatgcacacacacaatagaaaagatcagtgaagggtatctgggtggttcagttaagtgtctgactcatggtttcagctcaggtcatgatctcagggttttgagatccagccttgcattgggcttcaagcttagcacagagtctgcttgagtttctctctctccctctccctctgcccctccctcattctctcaactgtctctcaaataaaaactttacaaaaagagagatcaatgaacctaaaagctggtttttggaaaagacagacaaaattaataaacccctaaccagacttattaaggaaaaaaaaaagaggggaagggtgtccagctggctcagtcagtggaatgtgtgactcttgatcttagggttgtgagttcgggccccacattgggtgtagattactaaaaaataaaatcttaggggctcctgggtggctcagccatttaagcgactaacttttgctttgggctccagtcatgatctcaggatcatgaatgaaactgagcccagtgttgggctctgcactgtgtgtagagcctgcttaacattctctctctccatctgttcccgtcctgtgctcatgctctcacttgctctttctaaaaaaacaaaatgagggatccctgggtggcgcagcggtttagcgcctgcctttggcccagggcgcgatcctggagacccgggatcaaatcccacgtcgggctcccggtgcatggagcctgcttctccctctgcctgtgtttctgcctctctctctctctcactgtgtgcctatcataaataaattaaattaaattaaaatttaaaaaatgaaataaaaataaactcaaatggactaaaacttgaatgtaagaccccaaatcataaaaatcctagatgaaaacataggcagtaagcaatctgacattaattttagcaattttttttttttttttgaccagtctccttaggcaaggacaactaaggctaaaataaacaaatgggatcacattaaaatgaaaagctttttcacagtaaaggaaatcatcaacaaaatgaaaaggcaggaatccctgggtggctcagcggtttggcgcctgcctttggcccagggcacaatcctggagtcccgggatcgagtcccgcatagggctatatctatcatgaataaataaataaaatctttcaaaaaaattgaaaaggcaacctactgaatgggagaagatatttgcaaatcatacattcaataagaggttaacattcaaaatacattaagaaaaaaaaagagaaaaaaaatacattaagaactcatacaacttaatatttaaaaaaacaaacaattcaaaatgggcaggaggcatggctagacacttttcttctttcctttttcttttttaagattttatttatttattcatgagagacgcagagagagagaggcagagacacaggcagagggagaagcaggctccatgcagggagccggacacggacttaatccctggtctccaggatcacgccctgaactcaaggcggcgctaaatcgctgagccaccttgggctgccttcttttttctttttaaagattttatttatctattcatgagagacagagagagagagagagaggcagagatataggcagagggagaagcaggctcctcgcagggagcctgatgtggaacttgatctcaggaccccaggatcatgacctgagcactcaatcactgagcactcactgatcatgacctgagcactcaatcactgagcactcaatcactgagccactcaggtgccctagctagacatttttttctagagaagacatacagatggccagcaggaaccagaagaaatgctcatcactcatcatcagggaaatgcaaatcaaaaccaaactgagggtatccctgggtgcgtcaaaggcttagtgcctgccttcagcccagggcttgatcctagatcctagagtcccggatcgagtcccacaacaggctcccggcatggagcctgcttctccctcctcctgtgtctctgcctctctctctctctctctctctgtgtctctcatgaataaataaaattaaaacacacacacacacacacacacacacacaaaataacacaaaaaactgagatctcacctcctacctgtcagattggctgttatcacaaagacaataagttacaagtgttagtgaggatgttgtgtgctgttgttgggaatgtaaattggtgcagtcactatggaaaacagtgtagaagttcctcaaaaaatgaaaatgaaaatatcaacttgaagagatgtatgctccctatattcactgaagctttatttacaatcaccaagatatggaagcaacctgtgtccatcgataaatgagtggataaagatgttgtatatgtgtgtatatatatatatatacacatacatacatacatgcaatggaatattactcagccataaaaaggagatcttgccatttgtggcaacatggcatgataatacttagagaaaaatcctatgtgatttcacttatatgtggaatctaaaaaaacaaaacaaatgaacaaaacagttacaagaaacaaattgttgcttacctgactggggaggggtgggaggatggacaaagtaggtggaggagtttaagaggtacaaacttccagttataaaataaataagtcatggggatataatgtacaacatagggaatatagtccaatgataataattttgtatgttgatagtaactagacttatcagggcgatcatttcataatatataaaaatactaaatcagggatccctgggtggcgcagcggtttggcacctgcctttggcccagggcacgatcctggagactcgggatcgaatcccacatcgggctcccggtgcatggagcctgcttctccctctgcctgtgtctttgcctctctctctctctctctctctctctccgtgactatcataaattaaaaaaataaaaaaataaaaaaaaatactgaatcactatgatgtacacctgatactgaatgatattgtatgttggttatggaagaaggaaggaaggaagcaaggaaggaagcaaggaaagaaggaagggttttgttcatttttactgctaaatagtattacataaatgaaccacagttcatttacccactcccccagtttgggttgggttgcttccagctttgggtgattctgaacaaagctgctaccaacattcttgtacagctgtttgtgtgaatgtaagttttcatttctctaaggtaatatccaggagtgggattgctgggtcatggcagttttaatttgcacttagccagtggctaatggtgtggagcatctctgcatgtgcttatttgccatctgtaaatcctcttgaagtgtctgtagctcttttgctcatttaaaattcatcatttttctttttttaaattttaaggtttttttttttttttttttaattcatgagaggcacagagagggagagagagagaggcagagacacaggcagagggagaagcaggctccatgcagggagcccgacgtgggactcgatcctgggactccaggattgcgccctgggccgaaggcaggcgccaaaccgctgagccacccagggattccctcctctgtttatttagatcttggtttcttttattactgttttggagttttcagcatagacaacctgtgtatgttagatttatacccaagtgtttctttttttccttctttctttttggaaatattataatagtattgcctttttaatttgttttcaagcgttgactgagagcataaagaaataggattgatttttgtgtgttaatcttgccttgcagccataatgaactcagttactacttgtaagagttctagaaaactttctttaaaaaagattttattttggaggcgcctggggcgcctgagctgaaggcagctggttaagcatctgcctttggctcaggtcatgatcctggggtcctgggatagggccccgcatctggctctctgctcagtgaggagcctgctgctccctctccctctgcctactgcctcaccctgctgtgctcatgttctttctgtctcacaaatcttaaaaaaataaaataaaataaaatattttattttatttttaaataatctctacacctagtgtggggctcaaattcacaaccctgagatcaagagtcacatgcttgggcagccctggtggctcagtggtttagtgccacctgcagcccaggctgtgatcctggagacctgggatcgagtcccacgtcaggctccctgcatggagcctgcttctccctctgcctgtgtctctgctcctctctctgtgtctctcataaataagtaaataaaatcttaaaaaaaaaaaaaaaagagtcacatgctcttgtgactgagctggccaggtgcctcgagttctagaaatcttgagcacttctgatggcatttactctctttgaaaaaatatattgctataaaaaattccatgggggatccctgggtggctcagaggtttggcacctgcctttggcccagggcgtgatcctggagtcccgggatcgagtcctgcatctggcttccggcatggagcctgcttctccctcctcttgtgtctctgcctctctctctctctctctatcaagaaagaaagaaagaaagaagaaagaaagaaagaaagaaagaaagaaagaaagaaagaaagaaagaaagaaagaaagaaagaaatcttaaaaaaaaaaaattccatgattcttccctctttatgttagcaattccctcctgttggatattcacattgttttcttttattactattactataattattagtgatggaatgaatttgattctgggacataaatctctgacctcttctctgtgagaaaggattcctagaaatgggattagcaggtcaagggctgggccctccttaagtactacacatggctcagctgctttccaaaaaggtccaactaactcattcccaacagctacatgtgagagcactcagcgtgctgaaacgttgccagcactgggaattatcattttaaagcgttttgccatttgataggagaaagacagtatttcccttgcattttaaagtaatcccttctaaaatgccaacttgtcccacccctgctaaaaaccttctatgcctccctattacttttggaaaaaagcccatggcccagctataggtaggcaccccaatattagctcccatttactccattgtcaaattctgtggcttccttttcctaccctgtactcacactacagcatggctggttatttctgaaacccactacaaaagctccttccctccaaggctctgcccatactatcccttctgcccagaatgcaggtgttttcctcctgttggcccctcaccaaggtacacaagagaggttttagagtgttggttctggagccagactgaccatgttccaacccagctctgccctgcggccttgggaaagttattcagcctctctgtgcctgcattactgcaatggtgaagtggtaggaagaatagcagccacttagggggttgttataaggattacatgagttaaaaagagtatatcagaactgtgtctggcactttgaaagtattagtacatcttagctattcctattattactgttattcatgtctgcccacccctactcttggaaggagggagcaggatggcaaaaccactaattccctgggtgccgagcactgtgctgccccattcagggcacaccctgcagcctagcaggacatggaacacaacccaagggattcaagaggctttaatggaagggcactggtggagggaagaggaacagtgtggtgggggagtgggggggtagcacccacacctgcaatgtgcaatggcaggaagtcattgtgactcccagggctgaaagggcaaggggcagaggtaccgggagcttgaagatgcaaggggattcatggaaggacacagcccagccagaccaggggccaaagcagggctggggccagggcaggagtatgccgacttctccttccctcagatgccctttgagtgggtgctgcccgacagagagccagctggcaagggggcccgggcacagagccagtcagggcagggatggatggggaggtaagggcggggatgcaagcacagggggatgtgttactgtccaccacacctcccatcttgcaggtgaccagactgaggcccgagacaggaagaaacttggccactgttacagagtaggtgaggtggggctgggagaagaccgcaggctcagaggcaccgtccctcgtcctaggtccctggtccccgcgcgcggtgccagcagcatgcagggcggcggcagcgcccaggccccctgcctccctcctctcctcgctgcctcccactggtcacttgtcccttcctcgggctcgggctcgggctcgtctgccatggcctgcgtgaaggctgcggctctcccctcctgggtctcgtatcctgctccgctttagctctttctcctcccagtgtcagcttctgggccccggcgttcggtcttggcactcctctcggcctttctctcccacacggctggcttgccgcggccccctcagctcctctgctctcgcctggcctgtccccggtgccgctccgtcccccggccccgccgcgagcgctcggtgcccgcacgccccgcccctgcggctcggtggcagggcccgggggcggggacagcgggctggcgcggcgcccggcctgagtcacacgcatgaggcagcgtgagtcaggcgcggagggaagtccctacggaaggggctttcggagccgcaatcgaatcacagggaaagagaaagtgttcggccgttcctctgacacagtgaccttgtgtgcgccgagccgggcacacccccaacaccctacccgcggacaacgacacgcgcggcccggccccccacccctgggtgcgcggccggggtcccagcggggggtgccgagcgctgtctcccaccccacccccgccccctcctccacgccagggcccggggccgcgcaccgtctgttccctgcgcctccggcgggcagtccctccagcttcccaagggccgggccagcattgctcagcagcagccacctcacactcgtcccccgtacccggtgcaggcagggtgtcaggaaggaccccgtccaggtcggccggcttgcctcgtggggccccgctgtgtggcaggagaagatgggccctggggatgaaggatcctccctcaggctctctgcccaaccctctcagattggccaggaatcaggttggctggattaaattgaacaaattttttattgaacacctataataaaatccagtgccagaccttaaaaacttaggataggaccaaaaaggccatgaacaaaatatgttgactcccaccctccgtgagcagatattgggggcagacaataaataataagcaaagaatctagatcagcactgtccatggaaatagaaggcgaggcatttggtaaaaaagaaataaatgaaataaactttgaaaatatacttcatttaagccaatatgcccaaatattatcatatcaacacaaaaatcaatatataaaaacttagtatttctttgtgggtttttttttttgatagtctgggaaatccaaagtacttcacatttccagcacatctcaattcagactccccacatttcaggtgctcagttgctacctgtgtgtggtggctacagtaatgggtagcacagtctagatgtgaggtcaggactatggaataaaaaaagtagcgcagggtaaggggcggggcaggattcagagcactgagacctggagatagactgaatcccagtcacctgacctcgctaaaccccaatttcctcatctacaaaatggagagaccaatcctcccctgtggatgagagtaatgagcactcattaaatgttattttgatccccacccctccagctgtctgtattagccgccagcgcacaggctcccagtctcagtcacatccctccacccccaacacttaatggccgccaaaaggcggcctagctgcccaccgggcagtccctccaccttgcatctattcctaccccttgctacagcaagataccctctttagaccttgctctcactgtaagatggatacttaagagctcctgagaaaaagtattgtagatttctggggaccaagccacggtttaagctggacccaggccaatgccaaggtaggtgggggtaccaggtgccaacttcatcatactgggaaggtgaaatccctttttgagaactcatagaagaatttctgcccgcaaaagacatcctgctccccaaacctcctcccaccaagggcagaactgccagaaaaagagatgcagagttgctgagagcagagcccaggagcagggattgaggagagagggccccaagcctaggggttgccatggcaggggttcttgagcacctttatccactctaccttcaaggtagataggccagcagaactacaagcccaagggaagttccaggatcaacaattagccccttcctgggggcctccatggctcaggaggaggccccagcaaggctggaagtgggggatgggagcaggcccagaagtggcccagacaaagaaggcagccgggtctgggcttcggatgcagctggccctcacccctcaccccaccccacccccaaagcccaagaattggcagggcaccctggatggtgacccagaaacctggctgtcagcagctcctgcctggcactgcccacggggagctccactgcttcccgcaggggtctctggcagctgtcagtggggcaagcccttggattttctctgcccactggctcactcctctacccctagagatccatcccagactctgcaaggtggcccagatcccactctctgtatttcctgtcatccagacctcagagtggggaaaggggaggggggagtccaaacctaggtttaccatcagactaacactgcccaccagggccattcagctactctggtcctggaggaccaccaacgccctagtggctgggttcctagaaagtaagaaagtaagaagacaaagaagggcgctgctcgattggcagtgaagagctgggcctagttggacctacgaccctaggactcgtagggtgggagggaggcggggaggctgggtgagcagggggtaacgaggtctaagccagagtggtgggcaggggagccggccaggcccgtccccgccgccatctcctagccagattccagaccagcaggctcgccctgctccgcctgcctccctcctcctcctcctccgccctcccgccagtggctacctcccctcccccagcccgcttctctcccctcccccagcttacccacttcctctgcccctcccccagcccttttggctctcattcatccatccattcaccaacttcagctgagcgccaaggcccccttaggccctggtgcgaggctcgcgggtggggagaagaacaaaacaaagccctggaggattccgacaaatccctggcctggtgttggctcctcccctcacccccagcccacctcctcctcaactagggcccccgcccttcgacctccaccctgctctcctttctatccgcagactctggccggccccaggccgtgagcccagcccaggcatcccacgtgctactgggctctactgggctccggcaggctgcaggcagcacgccctccagcccatccccggcatggagaccccagagccacgctgtcagccccaagaaaggtgcagggtggcctggagcagacagagcactggggaacccaggagacaccccaagtggagcagccctccgctgcagaggcagaaggacccagctgggccccaccccaccccagacaagtgggtaggagggagcctccccacaacttgtgaaggatagtcactcttgaaggcttcaggggtcactattccccttcctcagacccagcacttagggaagagagcaagagaaacaagttaaagaccacaggagattctcctgaatgcttggggcatgttcccaaaagagtgtgagggaggtaggagcaggtggctaaagctacaggacttgggaggcctgggtggctcgccggttgagctacctttggctcaggggctgatcagggatagagtctcgcatcgggctccttgcatggagcctgcttctcctccgtctgcctgtgtctctgcctctttcagtgtctcgtgaataaataaaatcttaaagaataaaaataaagctacaggacttgagtccccaagaactagagctggttattgaactgactggacatccaaccccagagggcatgtggtctggggagaaacccagcccagtgcctcaagccggactccagaattacacttcagcccccagagaacagggtcccaggccctaatacttccttccacttgctcgcaaggatggggctttcacagactacgtagttttcaagtgtgtgtattttcagccgttcctgaaacggctgggcattgtacctgcagagcctgttgcactggacattgtcaggtagttccttggagcaaagggacacctgttctgtgcaaagcttaaatcttacactcactcaaagcacactctggagagctgccaccaccgcccagccaccaataagcaaagcaacccggctggtccactctggccaaagggccaagatggttgccaggtggcggccagctcctgatgactaaacctgagaccaaagggaaaaaatttcccctgattgctggcaaactgtaagatctagaagtagtgcctgctagaaattagtctgcagatgacaatggtacagtgactttaacatagacagaaagcaggtgtttctgtagggtgtagaagctgcatcttgggctaggccatcttgtgactcccatgatgatatgctgggttcctcacccttttgtctgccttgaggtttggggacagatggcctttgcccaacccaatgccctgtgggttggcttttgtgataacggaaatcacttctgctaaacattcttcattcaacagttgttttagatttgaacactgtgtgagaccctgggaatccgcctgtcaataccacacatcaaatcctctggccttccaatggacactgttggacaggaaacaaatgtaccacttttaccgattacaattaagtacaaagttagttatatagtacgttagcaactgataagtgttatggggggagaagcgtggtaaagtagatgaagaattgcagggcaaatgtgcaattttacatagcatggacagtaatattgaacagagacctgaaggtggtgacagggtgagtcctgagaatatttataggaatagcaggtcaagcagagggaatggcaagtgcaacaaaggccctgaggtgagctctcacctggcaggtgtggggaccatggaggaagctggtgcagctgaagtagaatggcaggtaggtgatggggttaggggtggggagattgctgagctttggggtttgggtgaagacttcatttttaccctgtgagatgagaatctatgaaggattctgaacagaggtgggacatgccttatgttttaggtggaaagagatttaataccaggaattaggtgctcttaaaacttttggaagaactgaggagccagctctaggctgggcctcctgggaaaacacaactgaactgcctccctctgctctgatgggggtgggaatccagaggccctcccatctgagtagctgacctgccatccaggaataggaggccctttcttgccgtccccgcatacctggctcttgatccccataaagctggaaactggatgttatatggattccagaaagcccaagtctccacagcccacacagtggtatttccctctctctgcttccttcaaattttcctctttctttggtgggatctaattcacatcctaaactgtgtggggaatggtgctgagtccagctcctatgtgtgtcacagcccggagcccatccccacatcagatgccctgctgcctcacctgcccactcccaggccttcctgtgatgctccacccacacactgggcccctgccttgtgcttcctcgggcccccattccagcaggtaccacactgttcaaagtatatttgccatgtacttgtctgccccccatcccacccaaagtacaccacttaaagacagggaatgtagctacctggttcaaggccacatcccttatgcctctcttggtgcctagagagagccatctggccaggctgggagaaggcagcaacgccacccagcctgggcatagaagcagaatgtcaagctgtttaatcttcctgagcctcagttttagcacctgtataatggcggcaacagcatcactgatctggtaggagtgttgaaggatctgagaacacatttgcatttagtccatgctcataaactccttttcctcattttttttctgaggctgctgaggagtggggcttacctgtgtttcagccttgaagaaagctgacaaagtccatggtgccctgcagccatgcagcatgggtaattggctcagggcacgggggtgcctgtctcctgggccttccaattcgttgaagagattttccctcgaaagttggaagcagaagaggctctcctcccattctaggcctgccaggcctcctggcagcagagcttgtggtcagcagggcctggagacctgatcctgccagatgaccagatgtactagtagctgggtgactctccaggagtggtcaaacactgtacaccagggcgcccctatatgtgacatgcgtgggtcaatcctggtgatacagccggggatcaatcccagttttatgctgtctggtcaaaattaccgcgaagtccccccttttactcttaagtggcctacttgcttgtaatagctggacaaacctatcctacaatccaagaattcctttcctaggcactacttagcagaaatttgcacatctaatcacaaagacatattctggaacacccacagtagtactatttgtaataacccaaaccagagtccatccaaatgcccttcaacagaacagatacataaactgtggcacattcacaccatataactatgcagcaagaagaatgaatgtcagccgcatgctaccacatggatgaaactcagatataatgttgaacaaacccaggagtgtatcacctatgattccatccacgcgatgcatgcaaaaggggaaagtacaggaggctattagaagtggcaatggtggtgacgtggtggggctggagatggtttctggatctgggtgctggtgacacagggtgttccttctacaaaaatgcattgagctgatacagggttgtgcattttctgcacatacagttttcatcagtaaaatgtttactttaaaaagtatcccagtttgggcaatggttaaactattctggtttctcttcttcctgcctcctcccactaccttttatgttgggctggacatacaatgttaatcaaacctcatcccccgggcttctagaaaacctcaactaacccaaacactacatggaaccattgacagtggtcttctcctctactcttccaagagctagccgtagatgactcagaagaggtattgagaagcgcatatgctgactggagagatgtactgagacatgaatccccagggaaagctaagagacactccaacccactacaacctctgcatttccaaacttcgactgggattgtcagtctcccgctacaccacttggcaaggcaggggacgaactggcatccatcaggaggaattgcaacagctcaggtgaaaatgaacttaacctgcagctgtcctgaaatacagagttgatcggaactcctcactccgtggacattcctgttgggttcctgaagttggctggttgtccttgtggaaactgcataacccaactctgacagtaagaaaatgtttcctaaggggaagaccagttctgacatgatggattcccctgggactcctcaggccttgaccaaccaggttgatgccccaggcttagaatagctctttcttgctgctcctaattccctagttatccaaatgccatcaagaccagctcaaggcctacttcagcccagctcctccagccaacttacttccctgactattctgagctcccatcttctctccctctgtagcatgagtctctgtttaaaggcctgactccctagacataagcttcaagagcacagggaattttactttgttcactgcttgtaccccaagagtttggaccagctcttagtacctagtaggctttcaataaatactgactgaatcaaagagtgcacctggcctcatggcatctcctgggttgctcctcagctttctctggtgtgttcttggttctgattcctctaaatatgaaacttgctggagcaagaaccatatcttattcatctttttctcacgaccactcacccttctgcttaatacttactgaaaaaggaaggacagaaaaggaagggaattcagggcatctttaatccagaaggcaaggaggtcagtggtagttctgcggattgcaggggcgaggggaatcctgaagaggagcaagctatcgtatttgcccccaagtgtatttatacctgcctccttccagggagggtttgaggtggctgacaagaacacccgcaggacaaggtaaaaaaccaagtcggtgagaaaatcaggacgaggggaaaaataagggtaggaaaaataagatcaagtcggctagttagaagtgggccaaaaagttggccaagttttcccacagcccctggaggcagaagtccctctcccttccccaggtccctcagggaaggccgcaggacaccggccaagcgcgcaaggcagggctgccccaggtaagctgcgtcccggggaggggcctcccaggccgtgggccccggagctcggcctggcgcccggcgtctaggggcgcgcgcgcttctgcgagggccacccccgggccaggcgcggggcccgcgtcgccggcggggaaccgtgacctgacggtagtggggcaagaactgaaggctcgttcttccgctcaacgctgcagaggttctcgagccacctcaaggcgtccagccaacccaagtcgcggcctactaagcgcgcgctccgcacgcagggcacaaagatggagggagccgcgcgccttccaccccgccccgcccccaccccggctccaaacaaaggggcaggccgcccctcccccagcctctcccaggccttcccctccaccctcctctcccctccggtgacttcctttcccctccaggggcggcctgggcacttcgcaggaactccgtttcacctgggcgcggggagccggcgcgcgcagggcggcctcccggcccaccccgagccctggcggccccaggcccgcgcgccctcctggctgaacccgcgcccggggccgccggcgccttcccgcccgggcgcccccgcccccgcccccacccggccgagcacgtgctgcccccggccccgagcgccggcccgccgccccgggtgggggctgggcccatcccgcgctgctccccacccccaccggaaacattcctgaaacattcctgaaagtaggaggcccggcccctccggctccccaccccgcctccactgcgggcgcagggttttcctggcggccccctccttcgcccgctcgccccctgaggagggggctgggctagggcctcggccggccggggaggaaggaggggagcaaagaacaagatgagtcacagccgtggtcactgggccgcattgcatttccctgcatcacgggaggtgtggagggcagccgcggggaccaggggcgggaggtgcgcccgaggaggcccggacccggcctgcagggcgcgccgctctcgacagcgccctttcttctcccaccgccctccccgccatctttcgactttggcttcctcctcgtcggtgcaacaagtctctgtggcgccgggcgggccaggcgtggcggggacggctcgcgtcgacccagtccctgccctcaaagtgcttccaggcgaccgtgggctcacgctttctcgttctccttcgcagcggagaaggctagggcacccagtgggtaggcgtatctccaagcaccacgcgagccccctggagggacgagtccaccctcgggtttacctgcaagcgagccaatcgtttgcttcgcttggaggctgcacctggatgacgtctcactcgcggccattaataagcgagaactcgggatttcacaagtttcacgtttggatttcacaagacttgtatttcaaccagtcagccacacgcaggttggcactgaaatgcacatgctgacacctgtccgcccaggggaatctgcgagccgcgattctgggcgctggggcggcggtaggccgcgaattctcccgggcgcgttcctccccgcccccgcccgcccgcgcggatcccgcgggcactaacgcccgcccacacccagcgcgccccgcgggcgccgggcccacgcgcccggaaggtccctggaggtgatcctcccaggaccgcccccccgccccgttccaggctgtgaggacgccctcccctctccccccgcggaaagctccttggcgttcccactctatgc

(The sequence listing continues in the following parts.)

We claim:

1. An isolated nucleic acid molecule selected from the group consisting of: (a) an isolated nucleic acid molecule comprising the sequence of SEQ ID NO:1; (b) an isolated nucleic acid molecule comprising the sequence of SEQ ID NO:2 (c) an isolated nucleic acid molecule comprising at least 10 nucleotides of SEQ ID NO:1, wherein said nucleic acid molecule includes at least one alternative base as listed in FIG. 1; (d) an isolated nucleic acid molecule comprising at least 10 nucleotides of SEQ ID NO:2, wherein said nucleic acid molecule includes at least one alternative base as listed in FIG. 2; and (e) an isolated nucleic molecule which is complementary to the isolated nucleic acid molecule of (a), (b), (c) and (d).

2. The isolated nucleic acid molecule of claim 1 which is a probe or primer.

3. The isolated nucleic acid molecule of claim 1, wherein said isolated nucleic acid molecule comprises two or more bases as listed in FIG. 1 and the two or more bases are in linkage disequilibrium with one another such that an allele at one of said two or more bases is predictive of an allele at the other of said two or more bases.

4. The isolated nucleic acid molecule of claim 1 comprising a SNP allele or haplotype that is associated with a risk of developing Necrotizing Meningoencephalitis in a subject.

5. The isolated nucleic acid molecule of claim 1 comprising one or more SNPs with loci in the sequence of SEQ ID NO: 1 selected from a group consisting of nucleotide variations at the indicated position: 5166878=A or G; 5217389=G or A; 5227499=G or A; 5275229=A or T; 5622709=C or A; 5710832=A or G; 5734305=A or G; 5791672=G or A; 5829667=A or G; 5843592=G or C; 5916360=A or G; 5931001=G or A; 5935549=A or G; 5992526=A or G; 6024841=T or A; 6028685=G or A; 6059850=A or G; 6064245=C or A; 6149213=G or A; 6160615=A or C; 6164202=A or G; 6184107=G or A; 6197313=A or C; 6200280=G or A; 6218850=A or G; 6238545=A or G; 6257019=G or A; 6289014=G or A; 6299459=A or G; 6311277=C or A; 6320910=A or G; 6342204=A or C; 6653816=A or G; 6686088=G or A; 6793393=A or G; 6809061=A or G; 6832252=A or G; 8822596=C or G.

6. The isolated nucleic acid molecule of claim 5, wherein the one or more SNPs that are associated with the risk of developing Necrotizing Meningoencephalitis in a subject are selected from a group consisting of nucleotide at the indicated position: 5166878=A; 5217389=G; 5227499=G; 5275229=A; 5622709=C; 5710832=A; 5734305=A; 5791672=G; 5829667=A; 5843592=G; 5916360=A; 5931001=G; 5935549=A; 5992526=A; 6024841=T; 6028685=G; 6059850=A; 6064245=C; 6149213=G; 6160615=A; 6164202=A; 6184107=G; 6197313=A; 6200280=G; 6218850=A; 6238545=A; 6257019=G; 6289014=G; 6299459=A; 6311277=C; 6320910=A; 6342204=A; 6653816=A; 6686088=G; 6793393=A; 6809061=A; 6832252=A; 8822596=C.

7. The isolated nucleic acid molecule of claim 6, wherein the subject is a canine species selected from a group consisting of Pug Dog, Chihuahua, West Highland White Terrier, Pekingese, Labrador retriever, Golden retriever, Beagle, German shepherd, Dachshund, Yorkshire terrier, Boxer, Poodle, Shih tzu, Miniature schnauzer, Pomeranian, Cocker spaniel, Rottweiler, Bulldog, Shetland sheepdog, Boston terrier, Miniature pinscher, Maltese, German shorthaired pointer, Doberman pinscher, Siberian husky, Pembroke welsh corgi, Basset hound, Bichon frise, and other existing or non-existing breeds.

8. The isolated nucleic acid molecule of claim 1 comprising a SNP with nucleotide variation at the indicated position: 31971609=A or Gin the sequence of SEQ ID NO: 2.

9. The isolated nucleic acid molecule of claim 7, wherein the SNP that is associated with the risk of developing Necrotizing Meningoencephalitis in a subject comprising the following nucleotides at the indicated position: 31971609=A;

10. The isolated nucleic acid molecule of claim 9, wherein the subject is a canine species selected from a group consisting of Pug Dog, Chihuahua, West Highland White Terrier, Pekingese, Labrador retriever, Golden retriever, Beagle, German shepherd, Dachshund, Yorkshire terrier, Boxer, Poodle, Shih tzu, Miniature schnauzer, Pomeranian, Cocker spaniel, Rottweiler, Bulldog, Shetland sheepdog, Boston terrier, Miniature pinscher, Maltese, German shorthaired pointer, Doberman pinscher, Siberian husky, Pembroke welsh corgi, Basset hound, Bichon frise, and other existing or non-existing breeds.

11. An isolated nucleic acid molecule that specifically hybridizes under stringent conditions to said isolated nucleic acid molecule of claim 1.

12. An isolated nucleic acid molecule comprising at least one nucleic acid segment of SEQ ID NO: 1, wherein said segment consisting of nucleotide positions 4,713,392 to 8,834,652 of SEQ ID NO: 1 comprises one or more SNP haplotype blocks represented by: SEQ ID NO: 3 at position 4713392-4821633, SEQ ID NO:4 at position 4836721-4923170, SEQ ID NO:5 at position 4938082-5088561, SEQ ID NO:6 at position 5108726-5364188, SEQ ID NO:7 at position 5491709-5672682, SEQ ID NO:8 at position 5710832-6078099, SEQ ID NO:9 at position 6149213-6342204, SEQ ID NO:10 at position 6492201-6982375, SEQ ID NO:11 at position 6992493-7270218, SEQ ID NO:12 at position 7338759-7350261, SEQ ID NO:13 at position 7384390-7643147, SEQ ID NO:14 at position 7725530-7830733, SEQ ID NO:15 at position 7927872-7944953, SEQ ID NO:16 at position 7950821-8158994, SEQ ID NO:17 at position 8208369-8265940, SEQ ID NO:18 at position 8327142-8386063, SEQ ID NO:19 at position 8429601-8533350, SEQ ID NO:20 at position 8546686-8713747, and SEQ ID NO:21 at position 8719506-8834652 on Chromosome 12.

13. An isolated nucleic acid molecule comprising at least one nucleic acid segment of SEQ ID NO: 2, wherein said segment consisting of nucleotide positions 31,736,206 to 32,225,068 of SEQ ID NO: 2 comprises one or more SNP haplotype blocks represented by: SEQ ID NO: 24 at position 31,736,206 to 31,795,128, SEQ ID NO: 25 at position 31,866,373 to 31,883,390, SEQ ID NO: 26 at position 31,971,609 to 32,009,283, and SEQ ID NO: 27 at position 32,183,184 to 32,225,068 on Chromosome 8.

14. A method of classifying a subject to an NME disease risk group, comprising:
receiving a nucleic acid-containing sample from the subject;
detecting the presence of at least one haplotype block listed in Table 3 and Table 4, wherein the haplotype block comprises at least two linked markers within the haplotype block, wherein the haplotype block is represented by: SEQ ID NO: 3 at position 4713392-4821633, SEQ ID NO:4 at position 4836721-4923170, SEQ ID NO:5 at position 4938082-5088561, SEQ ID NO:6 at position 5108726-5364188, SEQ ID NO:7 at position 5491709-5672682, SEQ ID NO:8 at position 5710832-6078099, SEQ ID NO:9 at position 6149213-6342204, SEQ ID NO:10 at position 6492201-6982375, SEQ ID NO:11 at position 6992493-7270218, SEQ ID NO:12 at position 7338759-7350261, SEQ ID NO:13 at position 7384390-7643147, SEQ ID NO:14 at position 7725530-7830733, SEQ ID NO:15 at position 7927872-7944953, SEQ ID NO:16 at position 7950821-8158994, SEQ ID NO:17 at position 8208369-8265940, SEQ ID NO:18 at position 8327142-8386063, SEQ ID NO:19 at position 8429601-8533350, SEQ ID NO:20 at position 8546686-8713747, and SEQ ID NO:21 at position 8719506-8834652 on Chromosome 12, and at position 32,183,184 to 32,225,068 on Chromosome 8; and
classifying the subject into a risk group based upon the presence of at least one haplotype block, whereas classifying the subject into a non-risk group based upon the absence of any haplotype block.

15. The method of claim 14 wherein detecting the haplotype block further comprises a method selected from the group consisting of Sanger sequencing, pyrosequencing, SOLID sequencing, massively parallel sequencing, barcoded DNA sequencing, PCR, real-time PCR, quantitative PCR, microarray analysis of genomic DNA, restriction fragment length polymorphism analysis, allele specific ligation, and comparative genomic hybridization.

16. The method of claim 14 wherein the marker is detected indirectly.

17. The method of claim 16 wherein detecting the marker further comprises microarray analysis of RNA, RNA in situ hybridization, RNAse protection assay, Northern blot, reverse transcription PCR, quantitative PCR, quantitative reverse transcription PCR, quantitative real-time reverse transcription PCR, reverse transcription treatment followed by direct sequencing, flow cytometry, immunohistochemistry, ELISA, Western blot, immunoaffinity chromatograpy, HPLC, mass spectrometry, protein microarray analysis, PAGE analysis, isoelectric focusing, and 2-D gel electrophoresis.

18. The method of claim 14 wherein the haplotype block is associated with a high risk of developing NME and wherein the risk group comprises subjects with a high risk of developing NME.

19. The method of claim 1 wherein the subject is a canine species selected from a group consisting of Pug Dog, Chihuahua, West Highland White Terrier, Pekingese, Labrador retriever, Golden retriever, Beagle, German shepherd, Dachshund, Yorkshire terrier, Boxer, Poodle, Shih tzu, Miniature schnauzer, Pomeranian, Cocker spaniel, Rottweiler, Bulldog, Shetland sheepdog, Boston terrier, Miniature pinscher, Maltese, German shorthaired pointer, Doberman pinscher, Siberian husky, Pembroke welsh corgi, Basset hound, Bichon frise, and other existing or non-existing breeds.

20. A set of molecular probes used in assessing the risk of developing NME of a subject comprising:
a first probe capable of detecting a first SNP selected from FIG. 1 and FIG. 2; and
a second probe capable of detecting a second SNP differing from the first SNP selected from FIG. 1 and FIG. 2.

21. The probe set of claim 20, wherein the SNPs detected by the probes are associated with a high risk of developing NME and wherein the risk group comprises subjects with a high risk of developing NME.

22. The probe set of claim 20, wherein the subject is a canine species selected from a group consisting of Pug Dog, Chihuahua, West Highland White Terrier, Pekingese, Labrador retriever, Golden retriever, Beagle, German shepherd, Dachshund, Yorkshire terrier, Boxer, Poodle, Shih tzu, Miniature schnauzer, Pomeranian, Cocker spaniel, Rottweiler, Bulldog, Shetland sheepdog, Boston terrier, Miniature pinscher, Maltese, German shorthaired pointer, Doberman pinscher, Siberian husky, Pembroke welsh corgi, Basset hound, Bichon frise, and other existing or non-existing breeds.
